United States Patent Application Publication US 2011/0183924 A1 - sequence listing, part 166

SEQ ID NO: 424444 - DNA, 3169 bp, Homo sapiens
agcggtgctcaacggcgcgtgcgcagagggaggcaggcgggtgggctgccggcggtggactcgtcggagccgcgggcggtcaggaatttgaccctctagggcatgaatactgtgctgttcagttctgagctgtgctagcaatacccttcaaaggaagagcaatggctgcagcagcagcttctcacctgaacctggatgccctccgggaagtgctagaatgccccatctgcatggagtccttcacagaagagcagctgcgtcccaagcttctgcactgtggccataccatctgccgccagtgcctggagaagctattggccagtagcatcaatggtgtccgctgtcccttttgcagcaagattacccgcataaccagcttgacccagctgacagacaatctgacagtgctaaagatcattgatacagctgggctcagcgaggctgtggggctgctcatgtgtcggtcctgtgggcggcgtctgccccggcaattctgccggagctgtggtttggtgttatgtgagccctgccgggaggcagaccatcagcctcctggccactgtacactccctgtcaaagaagcagctgaggagcggcgtcgggactttggagagaagttaactcgtctgcgggaacttatgggggagctgcagcggcggaaggcagccttggaaggtgtctccaaggaccttcaggcaaggtataaagcagttctccaggagtatgggcatgaggagcgcagggtccaggatgagctggctcgctctcggaagttcttcacaggctctttggctgaagttgagaagtccaatagtcaagtggtagaggagcagagttacctgcttaacattgcagaggtgcaggctgtgtctcgctgtgactacttcctggccaagatcaagcaggcagatgtagcactactggaggagacagctgatgaggaggagccagagctcactgccagcttgcctcgggagctcaccctgcaagatgtggagctccttaaggtaggtcatgttggccccctccaaattggacaagctgttaagaagccccggacagttaacgtggaagattcctgggccatggaggccacagcgtctgctgcctctacctctgttacttttagagagatggacatgagcccggaggaagtggttgccagccctagggcctcacctgctaaacagcggggtcctgaggcagcctccaatatccagcagtgcctctttctcaagaagatgggggccaaaggcagcactccaggaatgttcaatcttccagtcagtctctacgtgaccagtcaaggtgaagtactagtcgctgaccgtggtaactatcgtatacaagtctttacccgcaaaggctttttgaaggaaatccgccgcagccccagtggcattgatagctttgtgctaagcttccttggggcagatctacccaacctcactcctctctcagtggcaatgaactgccaggggctgattggtgtgactgacagctatgataactccctcaaggtatataccttggatggccactgcgtggcctgtcacaggagccagctgagcaaaccatggggtatcacagccttgccatctggccagtttgtagtaaccgatgtggaaggtggaaagctttggtgtttcacagttgatcgaggatcaggggtggtcaaatacagctgcctatgtagtgctgtgcggcccaaatttgtcacctgtgatgctgagggcaccgtctacttcacccagggcttaggcctcaatctggagaatcggcagaatgagcaccacctggagggtggcttttccattggctctgtaggccctgatgggcagctgggtcgccagattagccacttcttctcggagaatgaggatttccgctgcattgctggcatgtgtgtggatgctcgtggtgatctcatcgtggctgacagtagtcgcaaggaaattctccattttcctaagggtgggggctatagtgtccttattcgagagggacttacctgtccggtgggcatagccctaactcctaaggggcagctgctggtcttggactgttgggatcattgcatcaagatctacagctaccatctgagaagatattccaccccataggggatgagaaattatcagtttcttctgctcccaagccaacttcccttcccttagttcttggttgttagtggcacatgcagaatagactcagcctatgtcctgattccagctgggtagttctagaactttagaagctccatcttttaatgtttttatttgttatgtccccctccccgcttcccacctaaatttagagctttaaaagatgcactgcccaaataggacacacgatggtgttagctgaagtttgattagcaattaggcacttccaaggctttagtagagagagccactttagccctttgtgccatgtttgaaatttgcccttgtattaaatccttgattttttcccatttggctttgatgcccttgatccattgtttccttcctactataatgtgcttcatctgtgacactttctcttgaactctgattggattcactgtgcatgcttcagtgggatctgctccacctttcagtgacatttaagacatcatattcccgtaacattatgtctcagtctgatcgtctttaccagtatgaaagtcattcatttagtgctaccaaaggggatacacaagccctttaggaagcagtacctctcgcctggaggatctgtgccatcttggattgagaattgcagatgtgacagaatggattgaccctagttggttggtattgatgacttcagcctggaaattgcttgccttttaaagaagcatatatgggttggaattatgccaaagcataggaagctgggaataagcaaacaaatgctgatatagtcagcaaatttggatagtctctagggctcatcatttttcatactacctctctcttctggcctgtgtctaaggaattgtacaacataggccagggccaacaaagtggagaggtggacacattttcatgttcattactaaaacaaacagcaaaactattggtttgttattctgtgttttcctcaagtcagtacatactatttggtttcaggatttctttccatttctctatcaagcattaaataattgagaactgtttcttca

SEQ ID NO: 424445 - DNA, 3722 bp, Homo sapiens
agcggtgctcaacggcgcgtgcgcagagggaggcaggcgggtgggctgccggcggtggactcgtcggagccgcgggcggtcaggaatttgaccctctagggcatgaatactgtgctgttcagttctgagctgtgctagcaatacccttcaaaggaagagcaatggctgcagcagcagcttctcacctgaacctggatgccctccgggaagtgctagaatgccccatctgcatggagtccttcacagaagagcagctgcgtcccaagcttctgcactgtggccataccatctgccgccagtgcctggagaagctattggccagtagcatcaatggtgtccgctgtcccttttgcagcaagattacccgcataaccagcttgacccagctgacagacaatctgacagtgctaaagatcattgatacagctgggctcagcgaggctgtggggctgctcatgtgtcggtcctgtgggcggcgtctgccccggcaattctgccggagctgtggtttggtgttatgtgagccctgccgggaggcagaccatcagcctcctggccactgtacactccctgtcaaagaagcagctgaggagcggcgtcgggactttggagagaagttaactcgtctgcgggaacttatgggggagctgcagcggcggaaggcagccttggaaggtgtctccaaggaccttcaggcaaggtataaagcagttctccaggagtatgggcatgaggagcgcagggtccaggatgagctggctcgctctcggaagttcttcacaggctctttggctgaagttgagaagtccaatagtcaagtggtagaggagcagagttacctgcttaacattgcagaggtgcaggctgtgtctcgctgtgactacttcctggccaagatcaagcaggcagatgtagcactactggaggagacagctgatgaggaggagccagagctcactgccagcttgcctcgggagctcaccctgcaagatgtggagctccttaaggtaggtcatgttggccccctccaaattggacaagctgttaagaagccccggacagttaacgtggaagattcctgggccatggaggccacagcgtctgctgcctctacctctgttacttttagagagatggacatgagcccggaggaagtggttgccagccctagggcctcacctgctaaacagcggggtcctgaggcagcctccaatatccagcagtgcctctttctcaagaagatgggggccaaaggcagcactccaggaatgttcaatcttccagtcagtctctacgtgaccagtcaaggtgaagtactagtcgctgaccgtggtaactatcgtatacaagtctttacccgcaaaggctttttgaaggaaatccgccgcagccccagtggcattgatagctttgtgctaagcttccttggggcagatctacccaacctcactcctctctcagtggcaatgaactgccaggggctgattggtgtgactgacagctatgataactccctcaaggtatataccttggatggccactgcgtggcctgtcacaggagccagctgagcaaaccatggggtatcacagccttgccatctggccagtttgtagtaaccgatgtggaaggtggaaagctttggtgtttcacagttgatcgaggatcaggggtggtcaaatacagctgcctatgtagtgctgtgcggcccaaatttgtcacctgtgatgctgagggcaccgtctacttcacccagggcttaggcctcaatctggagaatcggcagaatgagcaccacctggagggtggcttttccattggctctgtaggccctgatgggcagctgggtcgccagattagccacttcttctcggagaatgaggatttccgctgcattgctggcatgtgtgtggatgctcgtggtgatctcatcgtggctgacagtagtcgcaaggaaattctccattttcctaagggtgggggctatagtgtccttattcgagagggacttacctgtccggtgggcatagccctaactcctaaggggcagctgctggtcttggactgttgggatcattgcatcaagatctacagctaccatctgagaagatattccaccccataggggatgagaaattatcagtttcttctgctcccaagccaacttcccttcccttagttcttggttgttagtggcacatgcagaatagactcagcctatgtcctgattccagctgggtagttctagaactttagaagctccatcttttaatgtttttatttgttatgtccccctccccgcttcccacctaaatttagagctttaaaagatgcactgcccaaataggacacacgatggtgttagctgaagtttgattagcaattaggcacttccaaggctttagtagagagagccactttagccctttgtgccatgtttgaaatttgcccttgtattaaatccttgattttttcccatttggctttgatgcccttgatccattgtttccttcctactataatgtgcttcatctgtgacactttctcttgaactctgattggattcactgtgcatgcttcagtgggatctgctccacctttcagtgacatttaagacatcatattcccgtaacattatgtctcagtctgatcgtctttaccagtatgaaagtcattcatttagtgctaccaaaggggatacacaagccctttaggaagcagtacctctcgcctggaggatctgtgccatcttggattgagaattgcagatgtgacagaatggattgaccctagttggttggtattgatgacttcagcctggaaattgcttgccttttaaagaagcatatatgggttggaattatgccaaagcataggaagctgggaataagcaaacaaatgctgatatagtcagcaaatttggatagtctctagggctcatcatttttcatactacctctctcttctggcctgtgtctaaggaattgtacaacataggccagggccaacaaagtggagaggtggacacattttcatgttcattactaaaacaaacagcaaaactattggtttgttattctgtgttttcctcaagtcagtacatactatttggtttcaggatttctttccatttctctatcaagcattaaataattgagaactgtttcttcatctctggtgttcatgtcttttaattaaatacggaattttggagatgataagagggataacctgcgctatgccattttgcttccttatctcactgtgttctttcagagtgtagatatctacccaggtcaaaattcagccaaaagcactattatgtaaagataataatccaaatctttctcccaaatacatgtgtacagaatcatcccccaaggtttagagtcaccaataccctattctgagcttctgctgtatgttttatgtttataattacagttcacaaaaaggaagttagtcttgtttttaagatcagaagtgggtgagaggacctgtgatgaggttcctgagggtttggtgtttactaagtaatatatcttactctaggtgcagggctgatggcaagccaaagagcaactgccttactttgatgtaaacaaaatttgctaaactgagctgctcaaaattgtttttatggtagtagtgtttctttggattgtatcataatagctgccaaaggataggtaaagaggtcattaaaatgatgttgaactagttt

SEQ ID NO: 424446 - DNA, 3176 bp, Homo sapiens
gggctgaggagatccgaggagatgcagctgggggaggggagcgaggggctctgaagagatttgcggttgcagcatctcgggaggtatgaggaatttgaccctctagggcatgaatactgtgctgttcagttctgagctgtgctagcaatacccttcaaaggaagagcaatggctgcagcagcagcttctcacctgaacctggatgccctccgggaagtgctagaatgccccatctgcatggagtccttcacagaagagcagctgcgtcccaagcttctgcactgtggccataccatctgccgccagtgcctggagaagctattggccagtagcatcaatggtgtccgctgtcccttttgcagcaagattacccgcataaccagcttgacccagctgacagacaatctgacagtgctaaagatcattgatacagctgggctcagcgaggctgtggggctgctcatgtgtcggtcctgtgggcggcgtctgccccggcaattctgccggagctgtggtttggtgttatgtgagccctgccgggaggcagaccatcagcctcctggccactgtacactccctgtcaaagaagcagctgaggagcggcgtcgggactttggagagaagttaactcgtctgcgggaacttatgggggagctgcagcggcggaaggcagccttggaaggtgtctccaaggaccttcaggcaaggtataaagcagttctccaggagtatgggcatgaggagcgcagggtccaggatgagctggctcgctctcggaagttcttcacaggctctttggctgaagttgagaagtccaatagtcaagtggtagaggagcagagttacctgcttaacattgcagaggtgcaggctgtgtctcgctgtgactacttcctggccaagatcaagcaggcagatgtagcactactggaggagacagctgatgaggaggagccagagctcactgccagcttgcctcgggagctcaccctgcaagatgtggagctccttaaggtaggtcatgttggccccctccaaattggacaagctgttaagaagccccggacagttaacgtggaagattcctgggccatggaggccacagcgtctgctgcctctacctctgttacttttagagagatggacatgagcccggaggaagtggttgccagccctagggcctcacctgctaaacagcggggtcctgaggcagcctccaatatccagcagtgcctctttctcaagaagatgggggccaaaggcagcactccaggaatgttcaatcttccagtcagtctctacgtgaccagtcaaggtgaagtactagtcgctgaccgtggtaactatcgtatacaagtctttacccgcaaaggctttttgaaggaaatccgccgcagccccagtggcattgatagctttgtgctaagcttccttggggcagatctacccaacctcactcctctctcagtggcaatgaactgccaggggctgattggtgtgactgacagctatgataactccctcaaggtatataccttggatggccactgcgtggcctgtcacaggagccagctgagcaaaccatggggtatcacagccttgccatctggccagtttgtagtaaccgatgtggaaggtggaaagctttggtgtttcacagttgatcgaggatcaggggtggtcaaatacagctgcctatgtagtgctgtgcggcccaaatttgtcacctgtgatgctgagggcaccgtctacttcacccagggcttaggcctcaatctggagaatcggcagaatgagcaccacctggagggtggcttttccattggctctgtaggccctgatgggcagctgggtcgccagattagccacttcttctcggagaatgaggatttccgctgcattgctggcatgtgtgtggatgctcgtggtgatctcatcgtggctgacagtagtcgcaaggaaattctccattttcctaagggtgggggctatagtgtccttattcgagagggacttacctgtccggtgggcatagccctaactcctaaggggcagctgctggtcttggactgttgggatcattgcatcaagatctacagctaccatctgagaagatattccaccccataggggatgagaaattatcagtttcttctgctcccaagccaacttcccttcccttagttcttggttgttagtggcacatgcagaatagactcagcctatgtcctgattccagctgggtagttctagaactttagaagctccatcttttaatgtttttatttgttatgtccccctccccgcttcccacctaaatttagagctttaaaagatgcactgcccaaataggacacacgatggtgttagctgaagtttgattagcaattaggcacttccaaggctttagtagagagagccactttagccctttgtgccatgtttgaaatttgcccttgtattaaatccttgattttttcccatttggctttgatgcccttgatccattgtttccttcctactataatgtgcttcatctgtgacactttctcttgaactctgattggattcactgtgcatgcttcagtgggatctgctccacctttcagtgacatttaagacatcatattcccgtaacattatgtctcagtctgatcgtctttaccagtatgaaagtcattcatttagtgctaccaaaggggatacacaagccctttaggaagcagtacctctcgcctggaggatctgtgccatcttggattgagaattgcagatgtgacagaatggattgaccctagttggttggtattgatgacttcagcctggaaattgcttgccttttaaagaagcatatatgggttggaattatgccaaagcataggaagctgggaataagcaaacaaatgctgatatagtcagcaaatttggatagtctctagggctcatcatttttcatactacctctctcttctggcctgtgtctaaggaattgtacaacataggccagggccaacaaagtggagaggtggacacattttcatgttcattactaaaacaaacagcaaaactattggtttgttattctgtgttttcctcaagtcagtacatactatttggtttcaggatttctttccatttctctatcaagcattaaataattgagaactgtttcttca

SEQ ID NO: 424447 - DNA, 3230 bp, Homo sapiens
agcggtgctcaacggcgcgtgcgcagagggaggcaggcgggtgggctgccggcggtggactcgtcggagccgcgggcggtcagatgagtgatggggaaagagcttttggaagtttgagttaattccttatggtcatgcagctaagaatttgaccctctagggcatgaatactgtgctgttcagttctgagctgtgctagcaatacccttcaaaggaagagcaatggctgcagcagcagcttctcacctgaacctggatgccctccgggaagtgctagaatgccccatctgcatggagtccttcacagaagagcagctgcgtcccaagcttctgcactgtggccataccatctgccgccagtgcctggagaagctattggccagtagcatcaatggtgtccgctgtcccttttgcagcaagattacccgcataaccagcttgacccagctgacagacaatctgacagtgctaaagatcattgatacagctgggctcagcgaggctgtggggctgctcatgtgtcggtcctgtgggcggcgtctgccccggcaattctgccggagctgtggtttggtgttatgtgagccctgccgggaggcagaccatcagcctcctggccactgtacactccctgtcaaagaagcagctgaggagcggcgtcgggactttggagagaagttaactcgtctgcgggaacttatgggggagctgcagcggcggaaggcagccttggaaggtgtctccaaggaccttcaggcaaggtataaagcagttctccaggagtatgggcatgaggagcgcagggtccaggatgagctggctcgctctcggaagttcttcacaggctctttggctgaagttgagaagtccaatagtcaagtggtagaggagcagagttacctgcttaacattgcagaggtgcaggctgtgtctcgctgtgactacttcctggccaagatcaagcaggcagatgtagcactactggaggagacagctgatgaggaggagccagagctcactgccagcttgcctcgggagctcaccctgcaagatgtggagctccttaaggtaggtcatgttggccccctccaaattggacaagctgttaagaagccccggacagttaacgtggaagattcctgggccatggaggccacagcgtctgctgcctctacctctgttacttttagagagatggacatgagcccggaggaagtggttgccagccctagggcctcacctgctaaacagcggggtcctgaggcagcctccaatatccagcagtgcctctttctcaagaagatgggggccaaaggcagcactccaggaatgttcaatcttccagtcagtctctacgtgaccagtcaaggtgaagtactagtcgctgaccgtggtaactatcgtatacaagtctttacccgcaaaggctttttgaaggaaatccgccgcagccccagtggcattgatagctttgtgctaagcttccttggggcagatctacccaacctcactcctctctcagtggcaatgaactgccaggggctgattggtgtgactgacagctatgataactccctcaaggtatataccttggatggccactgcgtggcctgtcacaggagccagctgagcaaaccatggggtatcacagccttgccatctggccagtttgtagtaaccgatgtggaaggtggaaagctttggtgtttcacagttgatcgaggatcaggggtggtcaaatacagctgcctatgtagtgctgtgcggcccaaatttgtcacctgtgatgctgagggcaccgtctacttcacccagggcttaggcctcaatctggagaatcggcagaatgagcaccacctggagggtggcttttccattggctctgtaggccctgatgggcagctgggtcgccagattagccacttcttctcggagaatgaggatttccgctgcattgctggcatgtgtgtggatgctcgtggtgatctcatcgtggctgacagtagtcgcaaggaaattctccattttcctaagggtgggggctatagtgtccttattcgagagggacttacctgtccggtgggcatagccctaactcctaaggggcagctgctggtcttggactgttgggatcattgcatcaagatctacagctaccatctgagaagatattccaccccataggggatgagaaattatcagtttcttctgctcccaagccaacttcccttcccttagttcttggttgttagtggcacatgcagaatagactcagcctatgtcctgattccagctgggtagttctagaactttagaagctccatcttttaatgtttttatttgttatgtccccctccccgcttcccacctaaatttagagctttaaaagatgcactgcccaaataggacacacgatggtgttagctgaagtttgattagcaattaggcacttccaaggctttagtagagagagccactttagccctttgtgccatgtttgaaatttgcccttgtattaaatccttgattttttcccatttggctttgatgcccttgatccattgtttccttcctactataatgtgcttcatctgtgacactttctcttgaactctgattggattcactgtgcatgcttcagtgggatctgctccacctttcagtgacatttaagacatcatattcccgtaacattatgtctcagtctgatcgtctttaccagtatgaaagtcattcatttagtgctaccaaaggggatacacaagccctttaggaagcagtacctctcgcctggaggatctgtgccatcttggattgagaattgcagatgtgacagaatggattgaccctagttggttggtattgatgacttcagcctggaaattgcttgccttttaaagaagcatatatgggttggaattatgccaaagcataggaagctgggaataagcaaacaaatgctgatatagtcagcaaatttggatagtctctagggctcatcatttttcatactacctctctcttctggcctgtgtctaaggaattgtacaacataggccagggccaacaaagtggagaggtggacacattttcatgttcattactaaaacaaacagcaaaactattggtttgttattctgtgttttcctcaagtcagtacatactatttggtttcaggatttctttccatttctctatcaagcattaaataattgagaactgtttcttca

SEQ ID NO: 424448 - DNA, 2746 bp, Homo sapiens
agcggtgctcaacggcgcgtgcgcagagggaggcaggcgggtgggctgccggcggtggactcgtcggagccgcgggcggtcaggaatttgaccctctagggcatgaatactgtgctgttcagttctgagctgtgctagcaatacccttcaaaggaagagcaatggctgcagcagcagcttctcacctgaacctggatgccctccgggaagtgctagaatgccccatctgcatggagtccttcacagaagagcagctgcgtcccaagcttctgcactgtggccataccatctgccgccagtgcctggagaagctattggccagtagcatcaatggtgtccgctgtcccttttgcagcaagattacccgcataaccagcttgacccagctgacagacaatctgacagtgctaaagatcattgatacagctgggctcagcgaggctgtggggctgctcatgtgtcggtcctgtgggcggcgtctgccccggcaattctgccggagctgtggtttggtgttatgtgagccctgccgggaggcagaccatcagcctcctggccactgtacactccctgtcaaagaagcagctgaggagcggcgtcgggactttggagagaagttaactcgtctgcgggaacttatgggggagctgcagcggcggaaggcagccttggaaggtgtctccaaggaccttcaggcaaggtataaagcagttctccaggagtatgggcatgaggagcgcagggtccaggatgagctggctcgctctcggaagttcttcacaggctctttggctgaagttgagaagtccaatagtcaagtggtagaggagcagagttacctgcttaacattgcagaggtgcaggctgtgtctcgctgtgactacttcctggccaagatcaagcaggcagatgtagcactactggaggagacagctgatgaggaggagccagagctcactgccagcttgcctcgggagctcaccctgcaagatgtggagctccttaaggtaggtcatgttggccccctccaaattggacaagctgttaagaagccccggacagttaacgtggaagattcctgggccatggaggccacagcgtctgctgcctctacctctgttacttttagagagatggacatgagcccggaggaagtggttgccagccctagggcctcacctgctaaacagcggggtcctgaggcagcctccaatatccagcagtgcctctttctcaagaagatgggggccaaaggcagcactccaggaatgttcaatcttccagtcagtctctacgtgaccagtcaaggtgaagtactagtcgctgaccgtggtaactatcgtatacaagtctttacccgcaaaggctttttgaaggaaatccgccgcagccccagtggcattgatagctttgtgctaagcttccttggggcagatctacccaacctcactcctctctcagtggcaatgaactgccaggggctgattggtgtgactgacagctatgataactccctcaaggtatataccttggatggccactgcgtggcctgtcacaggagccagctgagcaaaccatggggtatcacagccttgccatctggccagtttgtagtaaccgatgtggaaggtggaaagctttggtgtttcacagttgatcgaggatcaggggtggtcaaatacagctgcctatgtagtgctgtgcggcccaaatttgtcacctgtgatgctgagggcaccgtctacttcacccagggcttaggcctcaatctggagaatcggcagaatgagcaccacctggagggtggcttttccattggctctgtaggccctgatgggcagctgggtcgccagattagccacttcttctcggagaatgaggatttccgctgcattgctggcatgtgtgtggatgctcgtggtgatctcatcgtggctgacagtagtcgcaaggaaattctccattttcctaagggtgggggctatagtgtccttattcgagagggacttacctgtccggtgggcatagccctaactcctaaggggcagctgctggtcttggactgttgggatcattgcatcaagatctacagctaccatctgagaagatattccaccccataggggatgagaaattatcagtttcttctgctcccaagccaacttcccttcccttagttcttggttgttagtggcacatgcagaatagactcagcctatgtcctgattccagctgggtagttctagaactttagaagctccatcttttaatgtttttatttgttatgtccccctccccgcttcccacctaaatttagagctttaaaagatgcactgcccaaataggacacacgatggtgttagctgaagtttgattagcaattaggcacttccaaggctttagtagagagagccccccccgcttgtacctgcgagctttatctccttatgcacaattcacaggaatttcggggaagtatgtcctattgctaaaggattctctgacctgccatcccccaggatgatcatctattactattgctgaatgatggtctgtatcttctttgttttgaaggtggctagatgtttgctgtggacttgtatgggagaattatattcttccactgtacaccccctatgagccttaagccatttcaattgattaggcgagagagactaatctgactctgctctgaggtattatatcccttactcgtgatcatagtctgcctccgcccccgtctccg

SEQ ID NO: 424449 - DNA, 1913 bp, Homo sapiens
acatcaattttcattccagcctttgaatcagaaactaaggtcagagtaaacagtaacatgagaactgaagaagtaataaagcaacttctccaaaaatttaagattgaaaatagtccccaggattttgctcttcacattatttttgcaacaggagaacaaagacgactaaagaagacagacattccgctactgcagaggctcctacagggaccttctgaaaagaatgctcgcattttcctcatggataaagatgcagaagaaattagcagtgatgtggctcagtacattaactttcacttttctctcttggaatccattcttcaaagattaaatgaagaagagaaaagagagattcaaagaatagtaacaaaattcaataaagaaaaggcgattatactgaaatgtcttcaaaataaactagtaataaaaacagagacaacagtttagcagtacaagcttctattgctaaaacatttcaaaaaactcagagatattactctttgatgaatgcataagttctgtacttgcatttatacgaacatatatgagacttgaatcgtagaaaattgaatgtcaaaaaaagctcatttctttttgaagtgatgaggttaattagggttcacagttggacaaaatgagtttgagtttagtttcagtaactgaaataagcttgaatactgcatatgccaaatagcttttatagtaaaccatgtaatgaactcaaatttaaatggtgtcttcagataagcagtttaaacttcatttagcttggactctcaagagaactgaaacataatcaatggattcagaaatgactcagaaaaaagaagctgccagttcttggaatgaaaaagaaatacagtcttacaccatcaaggaatctacctgatagtgacagtagcttcttgaaaactctggcattttcataaaatctaggactatcttaaatggcctgttgacttctgactatctgtaacatcagagctgtctggcctttggaaaggaaaaattatggactctgttaagaaatcctaattgaaattttctgaacctccccccagcccttttattctctctcttctgctgatgaaagacctttcatcagttcaaagcttttcttaagctcttttttaagttaattgaactttttctttatttatttttcaaaaaaatgtttatatcacatagacatattacatcggctaaagcaagacttggcccacaaatacctatttgttgctgaatgaatacaatggataaagcaaggctgttgtagctgaagttacatagggaatcccaaactctgccctcttagcatcttattctacatgacaactctcaaggtactcacagatctgtttaacccacttgaaaaaaaaacactaaaaatgaagaaatgctataagtataaactatgattttatttataaattctgtattaaaatggaattatatgcaacattctttcattctgtaaactaattccatttgcattcctcataagcattgtagtaaattgatcatattacatgtactaaggaatgagattatatgcagtaaacccaactggaagattaacaatattaaaatatgaaacatttttaagacaaaggcattacttctcagtattaccaaacctaaactggttgaaggtgaaagtgtgctatggccttttcaagcctaagaagtctctcttactgagtaaaccagaggcttgcatcgctattctttcacctgtcaatattaataagaaaatagtctcatctcacttaaatgaggcaaatgtaatagttaaaattcaacatacttataaaaaactagtgtcatgtacctgccatgaacatgacaaaaggttagtcttcaatagactgaaatgtataagagaagaaccaagtcttacatagaaaaaaaag

SEQ ID NO: 424450 - DNA, 382 bp, Homo sapiens
caagagcatgcacattggatactccgttctttaatatgtccaatgcacaaaatatgtccaatttttaatagtctttcttcttctcattttcagattcaataaagaaaaggcgattatactgaaatgtcttcaaaataaactagtaataaaaacagagacaacagtttagcagtacaagcttctattgctaaaacatttcaaaaaactcagagatattactctttgatgaatgcataagttctgtacttgcatttatacgaacatatatgagacttgaatcgtagaaaattgaatgtcaaaaaaagctcatttctttttgaagtgatgaggttaattagggttcacagttggacaaaatgagtttgagtttagtttcagtaac

SEQ ID NO: 424451 - DNA, 396 bp, Homo sapiens
gacatgatttgggtctggtcaggttagaaaacatcatataacaacaaagaatttatatttgttcattttttcccttgacagattgaaaatagtccccaggattttgctcttcacattatttttgcaacaggaggtaagaaagcttgatcacactttttacctgactctagagtgctacagtttgctgcccagggggaaggcagaagaacagtttgcctcattctgtggagaaaggggaggaatgggtaggagaaaaggaaggagtggtctttagaacattatctatagtccacaattttaaagaaagataacttaagaataaggtatccctgaagggttgattatatgaaagagtttgcttgttggccagacattaaattatctaaatggagatca

SEQ ID NO: 424452 - DNA, 411 bp, Homo sapiens
gatatgaatatattttgcaggtatttccccagtttattatttgccttttaaattttatggtcttctttacataaaaaggttttccctcttttttatttataatcagattatcttttactgttgtgatttctactttaagctatttagaaagcctttcataatcttgaaaccagatcacagtttacatatatatacttctaagttttaattttattgtttttttcccttaaaaaatatatgtatgtgtttatgtgtgtgaatatatgtatatgcatatatatctgtgtgtatgtgtgtgtatacatgtatatgcatgtatttagcccctaatccacctttaatttgtttgtgtctattgtgtgtgatagaaatctaattgaattttttattcaaataaataatcaactgtcg

SEQ ID NO: 424453 - DNA, 582 bp, Homo sapiens
gctggcagagatcttggggcgagaatttattctctcagagaaatggtagtgatggaccatggaaacttgtctatggtaatctgtgttagaatatattcttgaaagttctaagaatacattatatccacaagtagattatgccatcctagagactgcagctgacccttgaacaatgtgagtttgacccatgtggatccacatacacatggatttgacttttttttttttaagagatgaggtcactctctgttgcccaggctggagtgcagtgtacagtcatagcacattacagcctcaaacatctgggctcaaacagtcctcccatctctgcctcctgagtatctgggactgcatccacacactaccttgtctggctacacttggagtttcttctgcatctgccactctactgccaccctaagtcgtaatccctatgttgttcaagggtcgattgtattttcctttcacagtctatttgtgtagctagtaggcaatcttccaaaaacttcaatttaggtcgttccggagtgcttttcgagttttcagttttcttctatgccagtgaaggagagggatggagga

SEQ ID NO: 424454 - DNA, 1302 bp, Homo sapiens
gtagagatggggtttcacagtgttagccaggatggtctccatctcctgacctcgtgatccgcccaccttggcctcccaaagtgctgggattacaggcgtgagccaccgtgcccagcccaaatctccagtttctaaactggtaagctcaagttgctatgcctcaaggaatttgagagaatatttaatataagattcaggacccaatagtaagaattctactcaggacatctgatcttcattgaaaaggattctaatccaacttcagtcctcatagcaaggaagtactatttcagaaagtccctagattctcagatgcattggcaagcaccatacactgaagaattcacagaagattttagtcacttgctcactcatccacttgaagtaagaaaaatcaatcactgcatgtttattgttctataataaagcaaatgttagaaataaaagttagaaatgtcaaacacactaaattgttacataataaactaatcaagacacaacttttattcaggacatggatatttctgaaatgaaaataaaagaagagaattgacttaaaatgtttataaatacgaatattatgacagaaccaaagctatttatgagcattatttttaaaagcttgtttaagtatcatgcacttgtctgtgtgacattttgtaaagcggagaaaaattaaggagaaaggaattgtagaacactaacaggaagaggacagatactgaggaatggctcatggtataagtgagattatcagagactctctacaatggaatttgaaacgcagggagcacatttggtgtatggttgtagaggacttacactaagggcattcttctgctacctctgccagcagatgagtggctcctgagaatgcatacccaatttaattccccagctgttcacatgcatataagcagctgctgctgttactgcctaatacttatggcagtcttgtcagcacctctaatctctgccatagcagacaagccactcacctaaggcctctgctgtacttccaaagaaagaatttctcaagtagagactgagtggaactagactgccagctgtgagcctcagagctcctggctgcctgttgctgagtctatcagctgctgagcctttctcaccaaaaaaaaaaaaatgagcttaataaaataaccctgcacagaaattttctgaaattaagataacattcaatggaaaacagaatttaatctacagaaatacacttcacagatgttttaggaacagaacctagagaaaatgaaagtcaaaatttaataaaagaatttgtcagga

SEQ ID NO: 424455 - DNA, 2975 bp, Homo sapiens
  misc_feature (2942)..(2942): n is a, c, g, or t
  misc_feature (2949)..(2949): n is a, c, g, or t
  misc_feature (2972)..(2972): n is a, c, g, or t
agtcggaagtgcgcaggcagtgctcgcggcggcggcgacggcggcgggaggttcggttgtcgcccgttggccgcgcggcgccgcgctcggcggccgccattgcagcttgttttcacttgctttttaaagacagaaagctcatggtgcaaattgttatttccagtgcgagggctggaggcctggcagaatgggtgctgatggagctacagggggagatcgaggctcgctacagcactggattagctggaaacctcctgggagacctacattacaccactgagggaatccctgtgctgatcgtggggcatcatatcctgtatgggaaaatcatccacctggagaaaccttttgcagtccttgtcaaacacactcctggggatcaggactgtgatgagcttggccgcgagactggcacccggtacctggtgacagcactcatcaaagacaagatccttttcaaaacccgccccaagcccattatcaccagcgtccccaagaaagtatgaaagaacctcggattttccctagagagcggccaactccttggactcgtgctccgctgccacctcgaggacggctcgacggttccctgggaccacaggggggtcctgttctgaacacaggccacccactgggtgtgaactcggatcccttccttatggcggccggttctcttggtggaaatctgaccccatttccaaggaacccatctccttttccagcttcatcaggctcattggcttcaaatccagcacctttcccggctggtgctcgtgacccaagtatggcttcttttccaagagggatgaatcccactggcacaggtgcagtttctttcccaaggcctggtggcctcttggggccaggcccaggcccaggccccaccctaaaccctaggacaggggctctgccaggcccagggcctctgtctaaccccaggttagggggtctcccaggaccaggtcctatgtccaacccaagggcaggtggtctcctgggagcaggtcctgaccccagaggtggtggtcccatgggccctggatctggacctaacctgagagccggtgttctgttaacctctgggaatggtcctcccaatcctaggccagttggcctgggcccaggaccaaaccccaatctgagatcaggctttttagggacaaaccctgcccccaggtcaggtgtgtttccaggcccaggccttgggcccaacccaagaccaagtggcctgggcccaggccctaatctagatgccagagcaggtggcctcttgggcacaggatctggtcttaacttaagaatggctggacctcaaggcctcgatcttgcccccattctaagagcagcaggtcttttaggagcaaattcagcttctttctcacaggcttctggaaacatgggcacaagcccatcctccatggcaagagtacctggccccatgggcccaaactcgggtcctagctctcggggaattggccttccagggccaaatccatctcccatgtcaagggctcctggccccataggccctaattcagctcatttctcaaggccagttggccccatgggggtaaatgccaatccctttcccaggggagcaggttcatctgccttttctcagtcttctggcacattggcatcaaacccagctaccttccaaaggtccgctggcctccagggctcaaatccaaccattttcccaagagcctctgggccacttggccccaacccagctaacttcccaagggccactggcctgcagggtccaagtccaactaccttcccaaggtctactggcccattaggccctggtcaagttactttccccaggccagctgccgggcatctgggcccttctccagctggccctgtgggtatcaacccagctcctttcacaaggccaactgggaccctgggtctcaacccagcttcctttccaaggatgaatggccctgcaggcaagagtttcgtcccatttcctagagtggggagcctccctggcacaaacccagctgctttccccagaccagggggtccaatggctgcaatgtacccaaatggaatgttgcccccttaaacaccattttccctccaggaccaccttggtttctaggcactgtggttcttggcaggggctgtcttaggtaaaagggtagttgtggagctacagtctgaagaacatagcttgggctcaagttcaaatgagccatctttttcctttgcgtttttcttgactgaaggtgagatgttatttgtggcatgtgaactgtggcaggtgggaataatcctgcccttgagagaaaggatctccagcctcccagaagcctgctgtgctttcgtcccacagctttctgcccattgtttcttactagtttcttgaattgttcttgtggacttttcctcagggatacattggcctgcaggtcccagttcacatgtagtcccctgctcaccattggagaatcagctcactgctctctagaaacgtggcgttggtgaacggaccatgcttccgtagctctgacctgggcagcttggacctggtcatcctctactgccatacctttccctgggggcttgaacacagaacagggagatggacaaccacttcaaagaaagacccaccgaatgcagtttctgcttgactgactgggcctgcagctcccttctcctgggacttagaggtggccagatttaaggcccctctactcatccaactccctcttcactggtactcccaatcaatcaaagaacctcaaaatttaaactgatgtggatgggaatatgggaattagggtgggggtgggggatgaagggaagaaatcactgtgctttgttcggcctggtgtgcaaggatggttggtggttttcctgcattgtatcttttcttactgtttctttaataaatgggatgagagggcaaaaaaaaacaaaaaaacaanaaaaaanaaacacaaaaaaaaacaaaaganaaa

SEQ ID NO: 424456 - DNA, 2959 bp, Homo sapiens
  misc_feature (2926)..(2926): n is a, c, g, or t
  misc_feature (2933)..(2933): n is a, c, g, or t
  misc_feature (2956)..(2956): n is a, c, g, or t
cgagcggggcggagcgggagaagggcggaaagggtggccgagcgcgggcggaggacggagaagggggcggcgagggccggaatctcgagcttgttttcacttgctttttaaagacagaaagctcatggtgcaaattgttatttccagtgcgagggctggaggcctggcagaatgggtgctgatggagctacagggggagatcgaggctcgctacagcactggattagctggaaacctcctgggagacctacattacaccactgagggaatccctgtgctgatcgtggggcatcatatcctgtatgggaaaatcatccacctggagaaaccttttgcagtccttgtcaaacacactcctggggatcaggactgtgatgagcttggccgcgagactggcacccggtacctggtgacagcactcatcaaagacaagatccttttcaaaacccgccccaagcccattatcaccagcgtccccaagaaagtatgaaagaacctcggattttccctagagagcggccaactccttggactcgtgctccgctgccacctcgaggacggctcgacggttccctgggaccacaggggggtcctgttctgaacacaggccacccactgggtgtgaactcggatcccttccttatggcggccggttctcttggtggaaatctgaccccatttccaaggaacccatctccttttccagcttcatcaggctcattggcttcaaatccagcacctttcccggctggtgctcgtgacccaagtatggcttcttttccaagagggatgaatcccactggcacaggtgcagtttctttcccaaggcctggtggcctcttggggccaggcccaggcccaggccccaccctaaaccctaggacaggggctctgccaggcccagggcctctgtctaaccccaggttagggggtctcccaggaccaggtcctatgtccaacccaagggcaggtggtctcctgggagcaggtcctgaccccagaggtggtggtcccatgggccctggatctggacctaacctgagagccggtgttctgttaacctctgggaatggtcctcccaatcctaggccagttggcctgggcccaggaccaaaccccaatctgagatcaggctttttagggacaaaccctgcccccaggtcaggtgtgtttccaggcccaggccttgggcccaacccaagaccaagtggcctgggcccaggccctaatctagatgccagagcaggtggcctcttgggcacaggatctggtcttaacttaagaatggctggacctcaaggcctcgatcttgcccccattctaagagcagcaggtcttttaggagcaaattcagcttctttctcacaggcttctggaaacatgggcacaagcccatcctccatggcaagagtacctggccccatgggcccaaactcgggtcctagctctcggggaattggccttccagggccaaatccatctcccatgtcaagggctcctggccccataggccctaattcagctcatttctcaaggccagttggccccatgggggtaaatgccaatccctttcccaggggagcaggttcatctgccttttctcagtcttctggcacattggcatcaaacccagctaccttccaaaggtccgctggcctccagggctcaaatccaaccattttcccaagagcctctgggccacttggccccaacccagctaacttcccaagggccactggcctgcagggtccaagtccaactaccttcccaaggtctactggcccattaggccctggtcaagttactttccccaggccagctgccgggcatctgggcccttctccagctggccctgtgggtatcaacccagctcctttcacaaggccaactgggaccctgggtctcaacccagcttcctttccaaggatgaatggccctgcaggcaagagtttcgtcccatttcctagagtggggagcctccctggcacaaacccagctgctttccccagaccagggggtccaatggctgcaatgtacccaaatggaatgttgcccccttaaacaccattttccctccaggaccaccttggtttctaggcactgtggttcttggcaggggctgtcttaggtaaaagggtagttgtggagctacagtctgaagaacatagcttgggctcaagttcaaatgagccatctttttcctttgcgtttttcttgactgaaggtgagatgttatttgtggcatgtgaactgtggcaggtgggaataatcctgcccttgagagaaaggatctccagcctcccagaagcctgctgtgctttcgtcccacagctttctgcccattgtttcttactagtttcttgaattgttcttgtggacttttcctcagggatacattggcctgcaggtcccagttcacatgtagtcccctgctcaccattggagaatcagctcactgctctctagaaacgtggcgttggtgaacggaccatgcttccgtagctctgacctgggcagcttggacctggtcatcctctactgccatacctttccctgggggcttgaacacagaacagggagatggacaaccacttcaaagaaagacccaccgaatgcagtttctgcttgactgactgggcctgcagctcccttctcctgggacttagaggtggccagatttaaggcccctctactcatccaactccctcttcactggtactcccaatcaatcaaagaacctcaaaatttaaactgatgtggatgggaatatgggaattagggtgggggtgggggatgaagggaagaaatcactgtgctttgttcggcctggtgtgcaaggatggttggtggttttcctgcattgtatcttttcttactgtttctttaataaatgggatgagagggcaaaaaaaaacaaaaaaacaanaaaaaanaaacacaaaaaaaaacaaaaganaaa

SEQ ID NO: 424457 - DNA, 2857 bp, Homo sapiens
  misc_feature (2824)..(2824): n is a, c, g, or t
  misc_feature (2831)..(2831): n is a, c, g, or t
  misc_feature (2854)..(2854): n is a, c, g, or t
agtcggaagtgcgcaggcagtgctcgcggcggcggcgacggcggcgggaggttcggttgtcgcccgttggccgcgcggcgccgcgctcggcggccgccattgcagcttgttttcacttgctttttaaagacagaaagctcatggtgcaaattgttatttccagggaatccctgtgctgatcgtggggcatcatatcctgtatgggaaaatcatccacctggagaaaccttttgcagtccttgtcaaacacactcctggggatcaggactgtgatgagcttggccgcgagactggcacccggtacctggtgacagcactcatcaaagacaagatccttttcaaaacccgccccaagcccattatcaccagcgtccccaagaaagtatgaaagaacctcggattttccctagagagcggccaactccttggactcgtgctccgctgccacctcgaggacggctcgacggttccctgggaccacaggggggtcctgttctgaacacaggccacccactgggtgtgaactcggatcccttccttatggcggccggttctcttggtggaaatctgaccccatttccaaggaacccatctccttttccagcttcatcaggctcattggcttcaaatccagcacctttcccggctggtgctcgtgacccaagtatggcttcttttccaagagggatgaatcccactggcacaggtgcagtttctttcccaaggcctggtggcctcttggggccaggcccaggcccaggccccaccctaaaccctaggacaggggctctgccaggcccagggcctctgtctaaccccaggttagggggtctcccaggaccaggtcctatgtccaacccaagggcaggtggtctcctgggagcaggtcctgaccccagaggtggtggtcccatgggccctggatctggacctaacctgagagccggtgttctgttaacctctgggaatggtcctcccaatcctaggccagttggcctgggcccaggaccaaaccccaatctgagatcaggctttttagggacaaaccctgcccccaggtcaggtgtgtttccaggcccaggccttgggcccaacccaagaccaagtggcctgggcccaggccctaatctagatgccagagcaggtggcctcttgggcacaggatctggtcttaacttaagaatggctggacctcaaggcctcgatcttgcccccattctaagagcagcaggtcttttaggagcaaattcagcttctttctcacaggcttctggaaacatgggcacaagcccatcctccatggcaagagtacctggccccatgggcccaaactcgggtcctagctctcggggaattggccttccagggccaaatccatctcccatgtcaagggctcctggccccataggccctaattcagctcatttctcaaggccagttggccccatgggggtaaatgccaatccctttcccaggggagcaggttcatctgccttttctcagtcttctggcacattggcatcaaacccagctaccttccaaaggtccgctggcctccagggctcaaatccaaccattttcccaagagcctctgggccacttggccccaacccagctaacttcccaagggccactggcctgcagggtccaagtccaactaccttcccaaggtctactggcccattaggccctggtcaagttactttccccaggccagctgccgggcatctgggcccttctccagctggccctgtgggtatcaacccagctcctttcacaaggccaactgggaccctgggtctcaacccagcttcctttccaaggatgaatggccctgcaggcaagagtttcgtcccatttcctagagtggggagcctccctggcacaaacccagctgctttccccagaccagggggtccaatggctgcaatgtacccaaatggaatgttgcccccttaaacaccattttccctccaggaccaccttggtttctaggcactgtggttcttggcaggggctgtcttaggtaaaagggtagttgtggagctacagtctgaagaacatagcttgggctcaagttcaaatgagccatctttttcctttgcgtttttcttgactgaaggtgagatgttatttgtggcatgtgaactgtggcaggtgggaataatcctgcccttgagagaaaggatctccagcctcccagaagcctgctgtgctttcgtcccacagctttctgcccattgtttcttactagtttcttgaattgttcttgtggacttttcctcagggatacattggcctgcaggtcccagttcacatgtagtcccctgctcaccattggagaatcagctcactgctctctagaaacgtggcgttggtgaacggaccatgcttccgtagctctgacctgggcagcttggacctggtcatcctctactgccatacctttccctgggggcttgaacacagaacagggagatggacaaccacttcaaagaaagacccaccgaatgcagtttctgcttgactgactgggcctgcagctcccttctcctgggacttagaggtggccagatttaaggcccctctactcatccaactccctcttcactggtactcccaatcaatcaaagaacctcaaaatttaaactgatgtggatgggaatatgggaattagggtgggggtgggggatgaagggaagaaatcactgtgctttgttcggcctggtgtgcaaggatggttggtggttttcctgcattgtatcttttcttactgtttctttaataaatgggatgagagggcaaaaaaaaacaaaaaaacaanaaaaaanaaacacaaaaaaaaacaaaaganaaa

SEQ ID NO: 424458 - DNA, 2841 bp, Homo sapiens
  misc_feature (2808)..(2808): n is a, c, g, or t
  misc_feature (2815)..(2815): n is a, c, g, or t
  misc_feature (2838)..(2838): n is a, c, g, or t
cgagcggggcggagcgggagaagggcggaaagggtggccgagcgcgggcggaggacggagaagggggcggcgagggccggaatctcgagcttgttttcacttgctttttaaagacagaaagctcatggtgcaaattgttatttccagggaatccctgtgctgatcgtggggcatcatatcctgtatgggaaaatcatccacctggagaaaccttttgcagtccttgtcaaacacactcctggggatcaggactgtgatgagcttggccgcgagactggcacccggtacctggtgacagcactcatcaaagacaagatccttttcaaaacccgccccaagcccattatcaccagcgtccccaagaaagtatgaaagaacctcggattttccctagagagcggccaactccttggactcgtgctccgctgccacctcgaggacggctcgacggttccctgggaccacaggggggtcctgttctgaacacaggccacccactgggtgtgaactcggatcccttccttatggcggccggttctcttggtggaaatctgaccccatttccaaggaacccatctccttttccagcttcatcaggctcattggcttcaaatccagcacctttcccggctggtgctcgtgacccaagtatggcttcttttccaagagggatgaatcccactggcacaggtgcagtttctttcccaaggcctggtggcctcttggggccaggcccaggcccaggccccaccctaaaccctaggacaggggctctgccaggcccagggcctctgtctaaccccaggttagggggtctcccaggaccaggtcctatgtccaacccaagggcaggtggtctcctgggagcaggtcctgaccccagaggtggtggtcccatgggccctggatctggacctaacctgagagccggtgttctgttaacctctgggaatggtcctcccaatcctaggccagttggcctgggcccaggaccaaaccccaatctgagatcaggctttttagggacaaaccctgcccccaggtcaggtgtgtttccaggcccaggccttgggcccaacccaagaccaagtggcctgggcccaggccctaatctagatgccagagcaggtggcctcttgggcacaggatctggtcttaacttaagaatggctggacctcaaggcctcgatcttgcccccattctaagagcagcaggtcttttaggagcaaattcagcttctttctcacaggcttctggaaacatgggcacaagcccatcctccatggcaagagtacctggccccatgggcccaaactcgggtcctagctctcggggaattggccttccagggccaaatccatctcccatgtcaagggctcctggccccataggccctaattcagctcatttctcaaggccagttggccccatgggggtaaatgccaatccctttcccaggggagcaggttcatctgccttttctcagtcttctggcacattggcatcaaacccagctaccttccaaaggtccgctggcctccagggctcaaatccaaccattttcccaagagcctctgggccacttggccccaacccagctaacttcccaagggccactggcctgcagggtccaagtccaactaccttcccaaggtctactggcccattaggccctggtcaagttactttccccaggccagctgccgggcatctgggcccttctccagctggccctgtgggtatcaacccagctcctttcacaaggccaactgggaccctgggtctcaacccagcttcctttccaaggatgaatggccctgcaggcaagagtttcgtcccatttcctagagtggggagcctccctggcacaaacccagctgctttccccagaccagggggtccaatggctgcaatgtacccaaatggaatgttgcccccttaaacaccattttccctccaggaccaccttggtttctaggcactgtggttcttggcaggggctgtcttaggtaaaagggtagttgtggagctacagtctgaagaacatagcttgggctcaagttcaaatgagccatctttttcctttgcgtttttcttgactgaaggtgagatgttatttgtggcatgtgaactgtggcaggtgggaataatcctgcccttgagagaaaggatctccagcctcccagaagcctgctgtgctttcgtcccacagctttctgcccattgtttcttactagtttcttgaattgttcttgtggacttttcctcagggatacattggcctgcaggtcccagttcacatgtagtcccctgctcaccattggagaatcagctcactgctctctagaaacgtggcgttggtgaacggaccatgcttccgtagctctgacctgggcagcttggacctggtcatcctctactgccatacctttccctgggggcttgaacacagaacagggagatggacaaccacttcaaagaaagacccaccgaatgcagtttctgcttgactgactgggcctgcagctcccttctcctgggacttagaggtggccagatttaaggcccctctactcatccaactccctcttcactggtactcccaatcaatcaaagaacctcaaaatttaaactgatgtggatgggaatatgggaattagggtgggggtgggggatgaagggaagaaatcactgtgctttgttcggcctggtgtgcaaggatggttggtggttttcctgcattgtatcttttcttactgtttctttaataaatgggatgagagggcaaaaaaaaacaaaaaaacaanaaaaaanaaacacaaaaaaaaacaaaaganaaa

SEQ ID NO: 424459 - DNA, 2799 bp, Homo sapiens
  misc_feature (2766)..(2766): n is a, c, g, or t
  misc_feature (2773)..(2773): n is a, c, g, or t
  misc_feature (2796)..(2796): n is a, c, g, or t
agtcggaagtgcgcaggcagtgctcgcggcggcggcgacggcggcgggaggttcggttgtcgcccgttggccgcgcggcgccgcgctcggcggccgccattgcagggaatccctgtgctgatcgtggggcatcatatcctgtatgggaaaatcatccacctggagaaaccttttgcagtccttgtcaaacacactcctggggatcaggactgtgatgagcttggccgcgagactggcacccggtacctggtgacagcactcatcaaagacaagatccttttcaaaacccgccccaagcccattatcaccagcgtccccaagaaagtatgaaagaacctcggattttccctagagagcggccaactccttggactcgtgctccgctgccacctcgaggacggctcgacggttccctgggaccacaggggggtcctgttctgaacacaggccacccactgggtgtgaactcggatcccttccttatggcggccggttctcttggtggaaatctgaccccatttccaaggaacccatctccttttccagcttcatcaggctcattggcttcaaatccagcacctttcccggctggtgctcgtgacccaagtatggcttcttttccaagagggatgaatcccactggcacaggtgcagtttctttcccaaggcctggtggcctcttggggccaggcccaggcccaggccccaccctaaaccctaggacaggggctctgccaggcccagggcctctgtctaaccccaggttagggggtctcccaggaccaggtcctatgtccaacccaagggcaggtggtctcctgggagcaggtcctgaccccagaggtggtggtcccatgggccctggatctggacctaacctgagagccggtgttctgttaacctctgggaatggtcctcccaatcctaggccagttggcctgggcccaggaccaaaccccaatctgagatcaggctttttagggacaaaccctgcccccaggtcaggtgtgtttccaggcccaggccttgggcccaacccaagaccaagtggcctgggcccaggccctaatctagatgccagagcaggtggcctcttgggcacaggatctggtcttaacttaagaatggctggacctcaaggcctcgatcttgcccccattctaagagcagcaggtcttttaggagcaaattcagcttctttctcacaggcttctggaaacatgggcacaagcccatcctccatggcaagagtacctggccccatgggcccaaactcgggtcctagctctcggggaattggccttccagggccaaatccatctcccatgtcaagggctcctggccccataggccctaattcagctcatttctcaaggccagttggccccatgggggtaaatgccaatccctttcccaggggagcaggttcatctgccttttctcagtcttctggcacattggcatcaaacccagctaccttccaaaggtccgctggcctccagggctcaaatccaaccattttcccaagagcctctgggccacttggccccaacccagctaacttcccaagggccactggcctgcagggtccaagtccaactaccttcccaaggtctactggcccattaggccctggtcaagttactttccccaggccagctgccgggcatctgggcccttctccagctggccctgtgggtatcaacccagctcctttcacaaggccaactgggaccctgggtctcaacccagcttcctttccaaggatgaatggccctgcaggcaagagtttcgtcccatttcctagagtggggagcctccctggcacaaacccagctgctttccccagaccagggggtccaatggctgcaatgtacccaaatggaatgttgcccccttaaacaccattttccctccaggaccaccttggtttctaggcactgtggttcttggcaggggctgtcttaggtaaaagggtagttgtggagctacagtctgaagaacatagcttgggctcaagttcaaatgagccatctttttcctttgcgtttttcttgactgaaggtgagatgttatttgtggcatgtgaactgtggcaggtgggaataatcctgcccttgagagaaaggatctccagcctcccagaagcctgctgtgctttcgtcccacagctttctgcccattgtttcttactagtttcttgaattgttcttgtggacttttcctcagggatacattggcctgcaggtcccagttcacatgtagtcccctgctcaccattggagaatcagctcactgctctctagaaacgtggcgttggtgaacggaccatgcttccgtagctctgacctgggcagcttggacctggtcatcctctactgccatacctttccctgggggcttgaacacagaacagggagatggacaaccacttcaaagaaagacccaccgaatgcagtttctgcttgactgactgggcctgcagctcccttctcctgggacttagaggtggccagatttaaggcccctctactcatccaactccctcttcactggtactcccaatcaatcaaagaacctcaaaatttaaactgatgtggatgggaatatgggaattagggtgggggtgggggatgaagggaagaaatcactgtgctttgttcggcctggtgtgcaaggatggttggtggttttcctgcattgtatcttttcttactgtttctttaataaatgggatgagagggcaaaaaaaaacaaaaaaacaanaaaaaanaaacacaaaaaaaaacaaaaganaaa

SEQ ID NO: 424460 - DNA, 2998 bp, Homo sapiens
  misc_feature (2965)..(2965): n is a, c, g, or t
  misc_feature (2972)..(2972): n is a, c, g, or t
  misc_feature (2995)..(2995): n is a, c, g, or t
agtcggaagtgcgcaggcagtgctcgcggcggcggcgacggcggcgggaggttcggttgtcgcccgttggccgcgcggcgccgcgctcggcggccgccattgcagcttgttttcacttgctttttaaagacagaaagctcatggtgcaaattgttatttccagtgcgagggctggaggcctggcagaatgggtgctgatggagctacagggggagatcgaggctcgctacagcactggattagctggaaacctcctgggagacctacattacaccactgagggaatccctgtgctgatcgtggggcatcatatcctgtatgggaaaatcatccacctggagaaaccttttgcagtccttgtcaaacacactcctggggatcaggactgtgatgagcttggccgcgagactggcacccggtacctggtgacagcactcatcaaagacaagatccttttcaaaacccgccccaagcccattatcaccagcgtccccaagaaagtatgaaagaacctcggattttccctagagagcggccaactccttggactcgtgctccgctgccacctcgaggacggctcgacggttccctgggaccacaggggggtcctgttctgaacacaggccacccactgggtgtgaactcggatcccttccttatggcggccggttctcttggtggaaatctgaccccatttccaaggaacccatctccttttccagcttcatcaggctcattggcttcaaatccagcacctttcccggctggtgctcgtgacccaagtatggcttcttttccaagagggatgaatcccactggcacaggtgcagtttctttcccaaggcctggtggcctcttggggccaggcccaggcccaggccccaccctaaaccctaggacaggggctctgccaggcccagggcctctgtctaaccccaggttagggggtctcccaggaccaggtcctatgtccaacccaagggcaggtggtctcctgggagcaggtcctgaccccagaggtggtggtcccatgggccctggatctggacctaacctgagagccggtgttctgttaacctctgggaatggtcctcccaatcctaggccagttggcctgggcccaggaccaaaccccaatctgagatcaggctttttagggacaaaccctgcccccaggtcaggtgtgtttccaggcccaggccttgggcccaacccaagaccaagtggcctgggcccaggccctaatctagatgccagagcaggtggcctcttgggcacaggatctggtcttaacttaagaatggctggacctcaaggcctcgatcttgcccccattctaagagcagcaggtcttttaggagcaaattcagcttctttctcacaggcttctggaaacatgggcacaagcccatcctccatggcaagagtacctggccccatgggcccaaactcgggtcctagctctcggggaattggccttccagggccaaatccatctcccatgtcaagggctcctggccccataggccctaattcagctcatttctcaaggccagttggccccatgggggtaaatgccaatccctttcccaggggagcaggttcatctgccttttctcagtcttctggcacattggcatcaaacccagctaccttccaaaggtccgctggcctccagggctcaaatccaaccattttcccaagagcctctgggccacttggccccaacccagctaacttcccaagggccactggcctgcagggtccaagtccaactaccttcccaaggtctactggcccattaggccctggtcaagttactttccccaggccagctgccgggcatctgggcccttctccagctggccctgtgggtatcaacccagctcctttcacaaggccaactgggaccctgggtctcaacccagcttcctttccaaggatgaatggccctgcaggcaagagtttcgtcccatttcctagagtggggagcctccctggcacaaacccagctgctttccccagaccagggggtccaatggctgcaatgtacccaaatggaatgttgcccccttaaacaccattttccctccaggaccaccttggtttctaggcactgtggttcttggcaggggctgtcttaggtaaaagggtagttgtggagctacagtctgaagaacatagcttgggctcaagttcaaatgagccatctttttcctttgcgtttttcttgactgaaggtgagatgttatttgtggcatgtgaactgtggcaggtgggaataatcctgcccttgagagaaaggatctccagcctcccagaagcctgctgtgctttcgtcccacagctttctgcccattgtttcttactagtttcttgaattgttcttgtggacttttcctcagggatacattggcctgcaggtcccagttcacatgtagtcccctgctcaccattggagaatcagctcactgctctctagaaacgtggcgttggtgaacggaccatgcttccgtagctctgacctgggcagcttggacctggtcatcctctactgccatacctttccctgggggcttgaacacagaacagggagatggacaaccacttcaaagaaagacccaccgaatgcagtttctgcttgactgactgggcctgcagctcccttctcctgggacttagaggtggccagatttaaggcccctctactcatccaactccctcttcactggtactcccaatcaatcaaagaacctcaaaatttaaactgatgtggatgggaatatgggaattagggtgggggtgggggatgaagggaagaaatcactgtgctttgttcggcctggtgtgcaaggatggttggtggttttcctgcattgtatcttttcttactgtttctttaataaatgggatgagagggcaaaaaaaacacacaaacaacaacaaaaaaaaacaaaaaaacaanaaaaaanaaacacaaaaaaaaacaaaaganaaa

SEQ ID NO: 424461 - DNA, 2494 bp, Homo sapiens
  misc_feature (2461)..(2461): n is a, c, g, or t
  misc_feature (2468)..(2468): n is a, c, g, or t
  misc_feature (2491)..(2491): n is a, c, g, or t
agtcggaagtgcgcaggcagtgctcgcggcggcggcgacggcggcgggaggttcggttgtcgcccgttggccgcgcggcgccgcgctcggcggccgccattgcagcttgttttcacttgctttttaaagacagaaagctcatggtgcaaattgttatttccagtgcgagggctggaggcctggcagaatgggtgctgatggagctacagggggagatcgaggctcgctacagcactggattagctggaaacctcctgggagacctacattacaccactgagggaatccctgtgctgatcgtggggcatcatatcctgtatgggaaaatcatccacctggagaaaccttttgcagtccttgtcaaacacactcctggggatcaggactgtgatgagcttggccgcgagactggcacccggtacctggtgacagcactcatcaaagacaagatccttttcaaaacccggtctcccaggaccaggtcctatgtccaacccaagggcaggtggtctcctgggagcaggtcctgaccccagaggtggtggtcccatgggccctggatctggacctaacctgagagccggtgttctgttaacctctgggaatggtcctcccaatcctaggccagttggcctgggcccaggaccaaaccccaatctgagatcaggctttttagggacaaaccctgcccccaggtcaggtgtgtttccaggcccaggccttgggcccaacccaagaccaagtggcctgggcccaggccctaatctagatgccagagcaggtggcctcttgggcacaggatctggtcttaacttaagaatggctggacctcaaggcctcgatcttgcccccattctaagagcagcaggtcttttaggagcaaattcagcttctttctcacaggcttctggaaacatgggcacaagcccatcctccatggcaagagtacctggccccatgggcccaaactcgggtcctagctctcggggaattggccttccagggccaaatccatctcccatgtcaagggctcctggccccataggccctaattcagctcatttctcaaggccagttggccccatgggggtaaatgccaatccctttcccaggggagcaggttcatctgccttttctcagtcttctggcacattggcatcaaacccagctaccttccaaaggtccgctggcctccagggctcaaatccaaccattttcccaagagcctctgggccacttggccccaacccagctaacttcccaagggccactggcctgcagggtccaagtccaactaccttcccaaggtctactggcccattaggccctggtcaagttactttccccaggccagctgccgggcatctgggcccttctccagctggccctgtgggtatcaacccagctcctttcacaaggccaactgggaccctgggtctcaacccagcttcctttccaaggatgaatggccctgcaggcaagagtttcgtcccatttcctagagtggggagcctccctggcacaaacccagctgctttccccagaccagggggtccaatggctgcaatgtacccaaatggaatgttgcccccttaaacaccattttccctccaggaccaccttggtttctaggcactgtggttcttggcaggggctgtcttaggtaaaagggtagttgtggagctacagtctgaagaacatagcttgggctcaagttcaaatgagccatctttttcctttgcgtttttcttgactgaaggtgagatgttatttgtggcatgtgaactgtggcaggtgggaataatcctgcccttgagagaaaggatctccagcctcccagaagcctgctgtgctttcgtcccacagctttctgcccattgtttcttactagtttcttgaattgttcttgtggacttttcctcagggatacattggcctgcaggtcccagttcacatgtagtcccctgctcaccattggagaatcagctcactgctctctagaaacgtggcgttggtgaacggaccatgcttccgtagctctgacctgggcagcttggacctggtcatcctctactgccatacctttccctgggggcttgaacacagaacagggagatggacaaccacttcaaagaaagacccaccgaatgcagtttctgcttgactgactgggcctgcagctcccttctcctgggacttagaggtggccagatttaaggcccctctactcatccaactccctcttcactggtactcccaatcaatcaaagaacctcaaaatttaaactgatgtggatgggaatatgggaattagggtgggggtgggggatgaagggaagaaatcactgtgctttgttcggcctggtgtgcaaggatggttggtggttttcctgcattgtatcttttcttactgtttctttaataaatgggatgagagggcaaaaaaaaacaaaaaaacaanaaaaaanaaacacaaaaaaaaacaaaaganaaa

SEQ ID NO: 424462 - DNA, 1394 bp, Homo sapiens
  misc_feature (1361)..(1361): n is a, c, g, or t
  misc_feature (1368)..(1368): n is a, c, g, or t
  misc_feature (1391)..(1391): n is a, c, g, or t
agtcggaagtgcgcaggcagtgctcgcggcggcggcgacggcggcgggaggttcggttgtcgcccgttggccgcgcggcgccgcgctcggcggccgccattgcagcttgttttcacttgctttttaaagacagaaagctcatggtgcaaattgttatttccagtgcgagggctggaggcctggcagaatgggtgctgatggagctacagggggagatcgaggctcgctacagcactggattagctggaaacctcctgggagacctacattacaccactgagggaatccctgtgctgatcgtggggcatcatatcctgtatgggaaaatcatccacctggagaaaccttttgcagtccttgtcaaacacactcctggggatcaggactgtgatgagcttggccgcgagactggcacccggtacctggtgacagcactcatcaaagacaagatccttttcaaaacccgccccaagcccattatcaccagcgtccccaagaaagtatgaaagaacctcggattttccctagagagcggccaactccttggactcgtgctccgctgccacctcgaggacggctcgacggttccctgggaccacaggggggtcctgttctgaacacaggccacccactgggtgtgaactcggatcccttccttatggcggccggttctcttggtggaaatctgaccccatttccaaggaacccatctccttttccagcttcatcaggctcattggcttcaaatccagcacctttcccggctggtgctcgtgacccaagtatggcttcttttccaagagggatgaatcccactggcacagggatacattggcctgcaggtcccagttcacatgtagtcccctgctcaccattggagaatcagctcactgctctctagaaacgtggcgttggtgaacggaccatgcttccgtagctctgacctgggcagcttggacctggtcatcctctactgccatacctttccctgggggcttgaacacagaacagggagatggacaaccacttcaaagaaagacccaccgaatgcagtttctgcttgactgactgggcctgcagctcccttctcctgggacttagaggtggccagatttaaggcccctctactcatccaactccctcttcactggtactcccaatcaatcaaagaacctcaaaatttaaactgatgtggatgggaatatgggaattagggtgggggtgggggatgaagggaagaaatcactgtgctttgttcggcctggtgtgcaaggatggttggtggttttcctgcattgtatcttttcttactgtttctttaataaatgggatgagagggcaaaaaaaaacaaaaaaacaanaaaaaanaaacacaaaaaaaaacaaaaganaaa

SEQ ID NO: 424463 - DNA, 864 bp, Homo sapiens
  misc_feature (831)..(831): n is a, c, g, or t
  misc_feature (838)..(838): n is a, c, g, or t
  misc_feature (861)..(861): n is a, c, g, or t
gaagctatggggtctagggtactggaggtcctgccgggttgttttaaagtctgagcacggaaaggactctggtggtcgcctgatggctgtgcctggtgctggctcggggacgcattgccttgttttcacttgctttttaaagacagaaagctcatggtgcaaattgttatttccagtgcgagggctggaggcctggcagaatgggtgctgatggagctacagggggagatcgaggctcgctacagcactggattagctggaaacctcctgggagacctacattacaccactgagggatacattggcctgcaggtcccagttcacatgtagtcccctgctcaccattggagaatcagctcactgctctctagaaacgtggcgttggtgaacggaccatgcttccgtagctctgacctgggcagcttggacctggtcatcctctactgccatacctttccctgggggcttgaacacagaacagggagatggacaaccacttcaaagaaagacccaccgaatgcagtttctgcttgactgactgggcctgcagctcccttctcctgggacttagaggtggccagatttaaggcccctctactcatccaactccctcttcactggtactcccaatcaatcaaagaacctcaaaatttaaactgatgtggatgggaatatgggaattagggtgggggtgggggatgaagggaagaaatcactgtgctttgttcggcctggtgtgcaaggatggttggtggttttcctgcattgtatcttttcttactgtttctttaataaatgggatgagagggcaaaaaaaaacaaaaaaacaanaaaaaanaaacacaaaaaaaaacaaaaganaaa

SEQ ID NO: 424464 - DNA, 909 bp, Homo sapiens
agtcggaagtgcgcaggcagtgctcgcggcggcggcgacggcggcgggaggttcggttgtcgcccgttggccgcgcggcgccgcgctcggcggccgccattgcagcttgttttcacttgctttttaaagacagaaagctcatggtgcaaattgttatttccagtgcgagggctggaggcctggcagaatgggtgctgatggagctacagggggagatcgaggctcgctacagcactggattagctggaaacctcctgggagacctacattacaccactgagggaatccctgtgctgatcgtggggcatcatatcctgtatgggaaaatcatccacctggagaaaccttttgcagtccttgtcaaacacactcctggggatcaggactgtgatgagcttggccgcgagactggcacccggtacctggtgacagcactcatcaaagacaagatccttttcaaaacccgccccaagcccattatcaccagcgtccccaagaaagtatgaaagaacctcggattttccctagagagcggccaactccttggactcgtgctccgctgccacctcgaggacggctcgacggttccctgggaccacaggggggtcctgttctgaacacaggccacccactgggtgtgaactcggatcccttccttatggcggccggttctcttggtggaaatctgaccccatttccaaggaacccatctccttttccagcttcatcaggctcattggcttcaaatccagcacctttcccggctggtgctcgtgacccaagtatggcttcttttccaagagggaagaaatcactgtgctttgttcggcctggtgtgcaaggatggttggtggttttcctgcattgtatcttttcttactgtttctttaataaatgggatgagagggc

SEQ ID NO: 424465 - DNA, 648 bp, Homo sapiens
agtcggaagtgcgcaggcagtgctcgcggcggcggcgacggcggcgggaggttcggttgtcgcccgttggccgcgcggcgccgcgctcggcggccgccattgcagcttgttttcacttgctttttaaagacagaaagctcatggtgcaaattgttatttccagtgcgagggctggaggcctggcagaatgggtgctgatggagctacagggggagatcgaggctcgctacagcactggattagctggaaacctcctgggagacctacattacaccactgagggaatccctgtgctgatcgtggggcatcatatcctgtatgggaaaatcatccacctggagaaaccttttgcagtccttgtcaaacacactcctggggatcaggactgtgatgagcttggccgcgagactggcacccggtacctggtgacagcactcatcaaagacaagatccttttcaaaacccgccccaagcccattatcaccagcgtccccaagaaagtatgaaagaacctcggattttccctagagagcggccattcaacgcctccgggccattcaacgcctccgggccattcaacgcctccgggccattcaacgcctccgggccattcaacgcctccgcctccgaggccattcaacgcctccg

SEQ ID NO: 424466 - DNA, 564 bp, Homo sapiens
gaagctatggggtctagggtactggaggtcctgccgggttgttttaaagtctgagcacggaaaggactctggtggtcgcctgatggctgtgcctggtgctggctcggggacgcattgccttgttttcacttgctttttaaagacagaaagctcatggtgcaaattgttatttccagtgcgagggctggaggcctggcagaatgggtgctgatggagctacagggggagatcgaggctcgctacagcactggattagctggaaacctcctgggagacctacattacaccactgaggtgagggggcttttctttccctgcctaatgcctcaggaaagcaagctacaccaaggtggtgctcccaggacccagagtgaggactgcctcaggtttgttattcaaggcctagctaatctgcgatgctctctgcttgttctccccctacctctgcagtagcagggaaatttaattttggggaatctggaaagctcacatttctgaaagtggaaattctcctatgtggggctagaaagtaaaaagggcacatgggtgggtggtccagtgtgg

SEQ ID NO: 424467 - DNA, 130 bp, Homo sapiens
ggaggacggagaagggggcggcgagggccggaatctcgaggtacgtgcgggaaggggctcttcccggggttgggagggagcccagcccgctatgcttgcgggagcggagtagaactggaacctaggaagt

SEQ ID NO: 424468 - DNA, 2921 bp, Homo sapiens
agtcggaagtgcgcaggcagtgctcgcggcggcggcgacggcggcgggaggttcggttgtcgcccgttggccgcgcggcgccgcgctcggcggccgccattgcagcttgttttcacttgctttttaaagacagaaagctcatggtgcaaattgttatttccagtgcgagggctggaggcctggcagaatgggtgctgatggagctacagggggagatcgaggctcgctacagcactggattagctggaaacctcctgggagacctacattacaccactgagggaatccctgtgctgatcgtggggcatcatatcctgtatgggaaaatcatccacctggagaaaccttttgcagtccttgtcaaacacactcctggggatcaggactgtgatgagcttggccgcgagactggcacccggtacctggtgacagcactcatcaaagacaagatccttttcaaaacccgccccaagcccattatcaccagcgtccccaagaaagtatgaaagaacctcggattttccctagagagcggccaactccttggactcgtgctccgctgccacctcgaggacggctcgacggttccctgggaccacaggggggtcctgttctgaacacaggccacccactgggtgtgaactcggatcccttccttatggcggccggttctcttggtggaaatctgaccccatttccaaggaacccatctccttttccagcttcatcaggctcattggcttcaaatccagcacctttcccggctggtgctcgtgacccaagtatggcttcttttccaagagggatgaatcccactggcacaggtgcagtttctttcccaaggcctggtggcctcttggggccaggcccaggcccaggccccaccctaaaccctaggacaggggctctgccaggcccagggcctctgtctaaccccaggttagggggtctcccaggaccaggtcctatgtccaacccaagggcaggtggtctcctgggagcaggtcctgaccccagaggtggtggtcccatgggccctggatctggacctaacctgagagccggtgttctgttaacctctgggaatggtcctcccaatcctaggccagttggcctgggcccaggaccaaaccccaatctgagatcaggctttttagggacaaaccctgcccccaggtcaggtgtgtttccaggcccaggccttgggcccaacccaagaccaagtggcctgggcccaggccctaatctagatgccagagcaggtggcctcttgggcacaggatctggtcttaacttaagaatggctggacctcaaggcctcgatcttgcccccattctaagagcagcaggtcttttaggagcaaattcagcttctttctcacaggcttctggaaacatgggcacaagcccatcctccatggcaagagtacctggccccatgggcccaaactcgggtcctagctctcggggaattggccttccagggccaaatccatctcccatgtcaagggctcctggccccataggccctaattcagctcatttctcaaggccagttggccccatgggggtaaatgccaatccctttcccaggggagcaggttcatctgccttttctcagtcttctggcacattggcatcaaacccagctaccttccaaaggtccgctggcctccagggctcaaatccaaccattttcccaagagcctctgggccacttggccccaacccagctaacttcccaagggccactggcctgcagggtccaagtccaactaccttcccaaggtctactggcccattaggccctggtcaagttactttccccaggccagctgccgggcatctgggcccttctccagctggccctgtgggtatcaacccagctcctttcacaaggccaactgggaccctgggtctcaacccagcttcctttccaaggatgaatggccctgcaggcaagagtttcgtcccatttcctagagtggggagcctccctggcacaaacccagctgctttccccagaccagggggtccaatggctgcaatgtacccaaatggaatgttgcccccttaaacaccattttccctccaggaccaccttggtttctaggcactgtggttcttggcaggggctgtcttaggtaaaagggtagttgtggagctacagtctgaagaacatagcttgggctcaagttcaaatgagccatctttttcctttgcgtttttcttgactgaaggtgagatgttatttgtggcatgtgaactgtggcaggtgggaataatcctgcccttgagagaaaggatctccagcctcccagaagcctgctgtgctttcgtcccacagctttctgcccattgtttcttactagtttcttgaattgttcttgtggacttttcctcagggatacattggcctgcaggtcccagttcacatgtagtcccctgctcaccattggagaatcagctcactgctctctagaaacgtggcgttggtgaacggaccatgcttccgtagctctgacctgggcagcttggacctggtcatcctctactgccatacctttccctgggggcttgaacacagaacagggagatggacaaccacttcaaagaaagacccaccgaatgcagtttctgcttgactgactgggcctgcagctcccttctcctgggacttagaggtggccagatttaaggcccctctactcatccaactccctcttcactggtactcccaatcaatcaaagaacctcaaaatttaaactgatgtggatgggaatatgggaattagggtgggggtgggggatgaagggaagaaatcactgtgctttgttcggcctggtgtgcaaggatggttggtggttttcctgcattgtatcttttcttactgtttctttaataaatgggatgagagggc

SEQ ID NO: 424469 - DNA, 2988 bp, Homo sapiens
  misc_feature (2955)..(2955): n is a, c, g, or t
  misc_feature (2962)..(2962): n is a, c, g, or t
  misc_feature (2985)..(2985): n is a, c, g, or t
gaagctatggggtctagggtactggaggtcctgccgggttgttttaaagtctgagcacggaaaggactctggtggtcgcctgatggctgtgcctggtgctggctcggggacgcattgccttgttttcacttgctttttaaagacagaaagctcatggtgcaaattgttatttccagtgcgagggctggaggcctggcagaatgggtgctgatggagctacagggggagatcgaggctcgctacagcactggattagctggaaacctcctgggagacctacattacaccactgagggaatccctgtgctgatcgtggggcatcatatcctgtatgggaaaatcatccacctggagaaaccttttgcagtccttgtcaaacacactcctggggatcaggactgtgatgagcttggccgcgagactggcacccggtacctggtgacagcactcatcaaagacaagatccttttcaaaacccgccccaagcccattatcaccagcgtccccaagaaagtatgaaagaacctcggattttccctagagagcggccaactccttggactcgtgctccgctgccacctcgaggacggctcgacggttccctgggaccacaggggggtcctgttctgaacacaggccacccactgggtgtgaactcggatcccttccttatggcggccggttctcttggtggaaatctgaccccatttccaaggaacccatctccttttccagcttcatcaggctcattggcttcaaatccagcacctttcccggctggtgctcgtgacccaagtatggcttcttttccaagagggatgaatcccactggcacaggtgcagtttctttcccaaggcctggtggcctcttggggccaggcccaggcccaggccccaccctaaaccctaggacaggggctctgccaggcccagggcctctgtctaaccccaggttagggggtctcccaggaccaggtcctatgtccaacccaagggcaggtggtctcctgggagcaggtcctgaccccagaggtggtggtcccatgggccctggatctggacctaacctgagagccggtgttctgttaacctctgggaatggtcctcccaatcctaggccagttggcctgggcccaggaccaaaccccaatctgagatcaggctttttagggacaaaccctgcccccaggtcaggtgtgtttccaggcccaggccttgggcccaacccaagaccaagtggcctgggcccaggccctaatctagatgccagagcaggtggcctcttgggcacaggatctggtcttaacttaagaatggctggacctcaaggcctcgatcttgcccccattctaagagcagcaggtcttttaggagcaaattcagcttctttctcacaggcttctggaaacatgggcacaagcccatcctccatggcaagagtacctggccccatgggcccaaactcgggtcctagctctcggggaattggccttccagggccaaatccatctcccatgtcaagggctcctggccccataggccctaattcagctcatttctcaaggccagttggccccatgggggtaaatgccaatccctttcccaggggagcaggttcatctgccttttctcagtcttctggcacattggcatcaaacccagctaccttccaaaggtccgctggcctccagggctcaaatccaaccattttcccaagagcctctgggccacttggccccaacccagctaacttcccaagggccactggcctgcagggtccaagtccaactaccttcccaaggtctactggcccattaggccctggtcaagttactttccccaggccagctgccgggcatctgggcccttctccagctggccctgtgggtatcaacccagctcctttcacaaggccaactgggaccctgggtctcaacccagcttcctttccaaggatgaatggccctgcaggcaagagtttcgtcccatttcctagagtggggagcctccctggcacaaacccagctgctttccccagaccagggggtccaatggctgcaatgtacccaaatggaatgttgcccccttaaacaccattttccctccaggaccaccttggtttctaggcactgtggttcttggcaggggctgtcttaggtaaaagggtagttgtggagctacagtctgaagaacatagcttgggctcaagttcaaatgagccatctttttcctttgcgtttttcttgactgaaggtgagatgttatttgtggcatgtgaactgtggcaggtgggaataatcctgcccttgagagaaaggatctccagcctcccagaagcctgctgtgctttcgtcccacagctttctgcccattgtttcttactagtttcttgaattgttcttgtggacttttcctcagggatacattggcctgcaggtcccagttcacatgtagtcccctgctcaccattggagaatcagctcactgctctctagaaacgtggcgttggtgaacggaccatgcttccgtagctctgacctgggcagcttggacctggtcatcctctactgccatacctttccctgggggcttgaacacagaacagggagatggacaaccacttcaaagaaagacccaccgaatgcagtttctgcttgactgactgggcctgcagctcccttctcctgggacttagaggtggccagatttaaggcccctctactcatccaactccctcttcactggtactcccaatcaatcaaagaacctcaaaatttaaactgatgtggatgggaatatgggaattagggtgggggtgggggatgaagggaagaaatcactgtgctttgttcggcctggtgtgcaaggatggttggtggttttcctgcattgtatcttttcttactgtttctttaataaatgggatgagagggcaaaaaaaaacaaaaaaacaanaaaaaanaaacacaaaaaaaaacaaaaganaaa

SEQ ID NO: 424470 - DNA, 2917 bp, Homo sapiens
  misc_feature (2884)..(2884): n is a, c, g, or t
  misc_feature (2891)..(2891): n is a, c, g, or t
  misc_feature (2914)..(2914): n is a, c, g, or t
agtcggaagtgcgcaggcagtgctcgcggcggcggcgacggcggcgggaggttcggttgtcgcccgttggccgcgcggcgccgcgctcggcggccgccattgcagtgcgagggctggaggcctggcagaatgggtgctgatggagctacagggggagatcgaggctcgctacagcactggattagctggaaacctcctgggagacctacattacaccactgagggaatccctgtgctgatcgtggggcatcatatcctgtatgggaaaatcatccacctggagaaaccttttgcagtccttgtcaaacacactcctggggatcaggactgtgatgagcttggccgcgagactggcacccggtacctggtgacagcactcatcaaagacaagatccttttcaaaacccgccccaagcccattatcaccagcgtccccaagaaagtatgaaagaacctcggattttccctagagagcggccaactccttggactcgtgctccgctgccacctcgaggacggctcgacggttccctgggaccacaggggggtcctgttctgaacacaggccacccactgggtgtgaactcggatcccttccttatggcggccggttctcttggtggaaatctgaccccatttccaaggaacccatctccttttccagcttcatcaggctcattggcttcaaatccagcacctttcccggctggtgctcgtgacccaagtatggcttcttttccaagagggatgaatcccactggcacaggtgcagtttctttcccaaggcctggtggcctcttggggccaggcccaggcccaggccccaccctaaaccctaggacaggggctctgccaggcccagggcctctgtctaaccccaggttagggggtctcccaggaccaggtcctatgtccaacccaagggcaggtggtctcctgggagcaggtcctgaccccagaggtggtggtcccatgggccctggatctggacctaacctgagagccggtgttctgttaacctctgggaatggtcctcccaatcctaggccagttggcctgggcccaggaccaaaccccaatctgagatcaggctttttagggacaaaccctgcccccaggtcaggtgtgtttccaggcccaggccttgggcccaacccaagaccaagtggcctgggcccaggccctaatctagatgccagagcaggtggcctcttgggcacaggatctggtcttaacttaagaatggctggacctcaaggcctcgatcttgcccccattctaagagcagcaggtcttttaggagcaaattcagcttctttctcacaggcttctggaaacatgggcacaagcccatcctccatggcaagagtacctggccccatgggcccaaactcgggtcctagctctcggggaattggccttccagggccaaatccatctcccatgtcaagggctcctggccccataggccctaattcagctcatttctcaaggccagttggccccatgggggtaaatgccaatccctttcccaggggagcaggttcatctgccttttctcagtcttctggcacattggcatcaaacccagctaccttccaaaggtccgctggcctccagggctcaaatccaaccattttcccaagagcctctgggccacttggccccaacccagctaacttcccaagggccactggcctgcagggtccaagtccaactaccttcccaaggtctactggcccattaggccctggtcaagttactttccccaggccagctgccgggcatctgggcccttctccagctggccctgtgggtatcaacccagctcctttcacaaggccaactgggaccctgggtctcaacccagcttcctttccaaggatgaatggccctgcaggcaagagtttcgtcccatttcctagagtggggagcctccctggcacaaacccagctgctttccccagaccagggggtccaatggctgcaatgtacccaaatggaatgttgcccccttaaacaccattttccctccaggaccaccttggtttctaggcactgtggttcttggcaggggctgtcttaggtaaaagggtagttgtggagctacagtctgaagaacatagcttgggctcaagttcaaatgagccatctttttcctttgcgtttttcttgactgaaggtgagatgttatttgtggcatgtgaactgtggcaggtgggaataatcctgcccttgagagaaaggatctccagcctcccagaagcctgctgtgctttcgtcccacagctttctgcccattgtttcttactagtttcttgaattgttcttgtggacttttcctcagggatacattggcctgcaggtcccagttcacatgtagtcccctgctcaccattggagaatcagctcactgctctctagaaacgtggcgttggtgaacggaccatgcttccgtagctctgacctgggcagcttggacctggtcatcctctactgccatacctttccctgggggcttgaacacagaacagggagatggacaaccacttcaaagaaagacccaccgaatgcagtttctgcttgactgactgggcctgcagctcccttctcctgggacttagaggtggccagatttaaggcccctctactcatccaactccctcttcactggtactcccaatcaatcaaagaacctcaaaatttaaactgatgtggatgggaatatgggaattagggtgggggtgggggatgaagggaagaaatcactgtgctttgttcggcctggtgtgcaaggatggttggtggttttcctgcattgtatcttttcttactgtttctttaataaatgggatgagagggcaaaaaaaaacaaaaaaacaanaaaaaanaaacacaaaaaaaaacaaaaganaaa

SEQ ID NO: 424471 - DNA, 2711 bp, Homo sapiens
  misc_feature (2678)..(2678): n is a, c, g, or t
  misc_feature (2685)..(2685): n is a, c, g, or t
  misc_feature (2708)..(2708): n is a, c, g, or t
ttcttgttctgccaaagggaatccctgtgctgatcgtggggcatcatatcctgtatgggaaaatcatccacctggagaaaccttttgcagtccttgtcaaacacactcctggggatcaggactgtgatgagcttggccgcgagactggcacccggtacctggtgacagcactcatcaaagacaagatccttttcaaaacccgccccaagcccattatcaccagcgtccccaagaaagtatgaaagaacctcggattttccctagagagcggccaactccttggactcgtgctccgctgccacctcgaggacggctcgacggttccctgggaccacaggggggtcctgttctgaacacaggccacccactgggtgtgaactcggatcccttccttatggcggccggttctcttggtggaaatctgaccccatttccaaggaacccatctccttttccagcttcatcaggctcattggcttcaaatccagcacctttcccggctggtgctcgtgacccaagtatggcttcttttccaagagggatgaatcccactggcacaggtgcagtttctttcccaaggcctggtggcctcttggggccaggcccaggcccaggccccaccctaaaccctaggacaggggctctgccaggcccagggcctctgtctaaccccaggttagggggtctcccaggaccaggtcctatgtccaacccaagggcaggtggtctcctgggagcaggtcctgaccccagaggtggtggtcccatgggccctggatctggacctaacctgagagccggtgttctgttaacctctgggaatggtcctcccaatcctaggccagttggcctgggcccaggaccaaaccccaatctgagatcaggctttttagggacaaaccctgcccccaggtcaggtgtgtttccaggcccaggccttgggcccaacccaagaccaagtggcctgggcccaggccctaatctagatgccagagcaggtggcctcttgggcacaggatctggtcttaacttaagaatggctggacctcaaggcctcgatcttgcccccattctaagagcagcaggtcttttaggagcaaattcagcttctttctcacaggcttctggaaacatgggcacaagcccatcctccatggcaagagtacctggccccatgggcccaaactcgggtcctagctctcggggaattggccttccagggccaaatccatctcccatgtcaagggctcctggccccataggccctaattcagctcatttctcaaggccagttggccccatgggggtaaatgccaatccctttcccaggggagcaggttcatctgccttttctcagtcttctggcacattggcatcaaacccagctaccttccaaaggtccgctggcctccagggctcaaatccaaccattttcccaagagcctctgggccacttggccccaacccagctaacttcccaagggccactggcctgcagggtccaagtccaactaccttcccaaggtctactggcccattaggccctggtcaagttactttccccaggccagctgccgggcatctgggcccttctccagctggccctgtgggtatcaacccagctcctttcacaaggccaactgggaccctgggtctcaacccagcttcctttccaaggatgaatggccctgcaggcaagagtttcgtcccatttcctagagtggggagcctccctggcacaaacccagctgctttccccagaccagggggtccaatggctgcaatgtacccaaatggaatgttgcccccttaaacaccattttccctccaggaccaccttggtttctaggcactgtggttcttggcaggggctgtcttaggtaaaagggtagttgtggagctacagtctgaagaacatagcttgggctcaagttcaaatgagccatctttttcctttgcgtttttcttgactgaaggtgagatgttatttgtggcatgtgaactgtggcaggtgggaataatcctgcccttgagagaaaggatctccagcctcccagaagcctgctgtgctttcgtcccacagctttctgcccattgtttcttactagtttcttgaattgttcttgtggacttttcctcagggatacattggcctgcaggtcccagttcacatgtagtcccctgctcaccattggagaatcagctcactgctctctagaaacgtggcgttggtgaacggaccatgcttccgtagctctgacctgggcagcttggacctggtcatcctctactgccatacctttccctgggggcttgaacacagaacagggagatggacaaccacttcaaagaaagacccaccgaatgcagtttctgcttgactgactgggcctgcagctcccttctcctgggacttagaggtggccagatttaaggcccctctactcatccaactccctcttcactggtactcccaatcaatcaaagaacctcaaaatttaaactgatgtggatgggaatatgggaattagggtgggggtgggggatgaagggaagaaatcactgtgctttgttcggcctggtgtgcaaggatggttggtggttttcctgcattgtatcttttcttactgtttctttaataaatgggatgagagggcaaaaaaaaacaaaaaaacaanaaaaaanaaacacaaaaaaaaacaaaaganaaa

SEQ ID NO: 424472 - DNA, 2849 bp, Homo sapiens
agtcggaagtgcgcaggcagtgctcgcggcggcggcgacggcggcgggaggttcggttgtcgcccgttggccgcgcggcgccgcgctcggcggccgccattgcagcttgttttcacttgctttttaaagacagaaagctcatggtgcaaattgttatttccagtgcgagggctggaggcctggcagaatgggtgctgatggagctacagggggagatcgaggctcgctacagcactggattagctggaaacctcctgggagacctacattacaccactgagggaatccctgtgctgatcgtggggcatcatatcctgtatgggaaaatcatccacctggagaaaccttttgcagtccttgtcaaacacactcctggggatcaggactgtgatgagcttggccgcgagactggcacccggtacctggtgacagcactcatcaaagacaagatccttttcaaaacccgccccaagcccattatcaccagcgtccccaagaaagtatgaaagaacctcggattttccctagagagcggccaactccttggactcgtgctccgctgccacctcgaggacggctcgacggttccctgggaccacaggggggtcctgttctgaacacaggccacccactgggtgtgaactcggatcccttccttatggcggccggttctcttggtggaaatctgaccccatttccaaggaacccatctccttttccagcttcatcaggctcattggcttcaaatccagcacctttcccggctggtgctcgtgacccaagtatggcttcttttccaagagggatgaatcccactggcacaggtgcagtttctttcccaaggcctggtggcctcttggggccaggcccaggcccaggccccaccctaaaccctaggacaggggctctgccaggcccagggcctctgtctaaccccaggttagggggtctcccaggaccaggtcctatgtccaacccaagggcaggtggtctcctgggagcaggtcctgaccccagaggtggtggtcccatgggccctggatctggacctaacctgagagccggtgttctgttaacctctgggaatggtcctcccaatcctaggccagttggcctgggcccaggaccaaaccccaatctgagatcaggctttttagggacaaaccctgcccccaggtcaggtgtgtttccaggcccaggccttgggcccaacccaagaccaagtggcctgggcccaggccctaatctagatgccagagcaggtggcctcttgggcacaggatctggtcttaacttaagaatggctggacctcaaggcctcgatcttgcccccattctaagagcagcaggtcttttaggagcaaattcagcttctttctcacaggcttctggaaacatgggcacaagcccatcctccatggcaagagtacctggccccatgggcccaaactcgggtcctagctctcggggaattggccttccagggccaaatccatctcccatgtcaagggctcctggccccataggccctaattcagctcatttctcaaggccagttggccccatgggggtaaatgccaatccctttcccaggggagcaggttcatctgccttttctcagtcttctggcacattggcatcaaacccagctaccttccaaaggtccgctggcctccagggctcaaatccaaccattttcccaagagcctctgggccacttggccccaacccagctaacttcccaagggccactggcctgcagggtccaagtccaactaccttcccaaggtctactggcccattaggccctggtcaagttactttccccaggccagctgccgggcatctgggcccttctccagctggccctgtgggtatcaacccagctcctttcacaaggccaactgggaccctgggtctcaacccagcttcctttccaaggatgaatggccctgcaggcaagagtttcgtcccatttcctagagtggggagcctccctggcacaaacccagctgctttccccagaccagggggtccaatggctgcaatgtacccaaatggaatgttgcccccttaaacaccattttccctccaggaccaccttggtttctaggcactgtggttcttggcaggggctgtcttaggtaaaagggtagttgtggagctacagtctgaagaacatagcttgggctcaagttcaaatgagccatctttttcctttgcgtttttcttgactgaaggtgagatgttatttgtggcatgtgaactgtggcaggtgggaataatcctgcccttgagagaaaggatctccagcctcccagaagcctgctgtgctttcgtcccacagctttctgcccattgtttcttactagtttcttgaattgttcttgtggacttttcctcagggatacattggcctgcaggtcccagttcacatgtagtcccctgctcaccattggagaatcagctcactgctctctagaaacgtggcgttggtgaacggaccatgcttccgtagctctgacctgggcagcttggacctggtcatcctctactgccatacctttccctgggggcttgaacacagaacagggagatggacaaccacttcaaagaaagacccaccgaatgcagtttctgcttgactgactgggcctgcagctcccttctcctgggacttagaggtggccagatttaaggcccctctactcatccaactccctcttcactggtactcccaatcaatcaaagaacctcaaaatttaaactgatgtggatggatctgcgcacagggggcggggggggccggccaaaccgggtgcggccggggagagggggggccccggatc

SEQ ID NO: 424473 - DNA, 2587 bp, Homo sapiens
agtcggaagtgcgcaggcagtgctcgcggcggcggcgacggcggcgggaggttcggttgtcgcccgttggccgcgcggcgccgcgctcggcggccgccattgcagcttgttttcacttgctttttaaagacagaaagctcatggtgcaaattgttatttccagtgcgagggctggaggcctggcagaatgggtgctgatggagctacagggggagatcgaggctcgctacagcactggattagctggaaacctcctgggagacctacattacaccactgagggaatccctgtgctgatcgtggggcatcatatcctgtatgggaaaatcatccacctggagaaaccttttgcagtccttgtcaaacacactcctggggatcaggactgtgatgagcttggccgcgagactggcacccggtacctggtgacagcactcatcaaagacaagatccttttcaaaacccgccccaagcccattatcaccagcgtccccaagaaagtatgaaagaacctcggattttccctagagagcggccaactccttggactcgtgctccgctgccacctcgaggacggctcgacggttccctgggaccacaggggggtcctgttctgaacacaggccacccactgggtgtgaactcggatcccttccttatggcggccggttctcttggtggaaatctgaccccatttccaaggaacccatctccttttccagcttcatcaggctcattggcttcaaatccagcacctttcccggctggtgctcgtgacccaagtatggcttcttttccaagagggatgaatcccactggcacaggtgcagtttctttcccaaggcctggtggcctcttggggccaggcccaggcccaggccccaccctaaaccctaggacaggggctctgccaggcccagggcctctgtctaaccccaggttagggggtctcccaggaccaggtcctatgtccaacccaagggcaggtggtctcctgggagcaggtcctgaccccagaggtggtggtcccatgggccctggatctggacctaacctgagagccggtgttctgttaacctctgggaatggtcctcccaatcctaggccagttggcctgggcccaggaccaaaccccaatctgagatcaggctttttagggacaaaccctgcccccaggtcaggtgtgtttccaggcccaggccttgggcccaacccaagaccaagtggcctgggcccaggccctaatctagatgccagagcaggtggcctcttgggcacaggatctggtcttaacttaagaatggctggacctcaaggcctcgatcttgcccccattctaagagcagcaggtcttttaggagcaaattcagcttctttctcacaggcttctggaaacatgggcacaagcccatcctccatggcaagagtacctggccccatgggcccaaactcgggtcctagctctcggggaattggccttccagggccaaatccatctcccatgtcaagggctcctggccccataggccctaattcagctcatttctcaaggccagttggccccatgggggtaaatgccaatccctttcccaggggagcaggttcatctgccttttctcagtcttctggcacattggcatcaaacccagctaccttccaaaggtccgctggcctccagggctcaaatccaaccattttcccaagagcctctgggccacttggccccaacccagctaacttcccaagggccactggcctgcagggtccaagtccaactaccttcccaaggtctactggcccattaggccctggtcaagttactttccccaggccagctgccgggcatctgggcccttctccagctggccctgtgggtatcaacccagctcctttcacaaggccaactgggaccctgggtctcaacccagcttcctttccaaggatgaatggccctgcaggcaagagtttcgtcccatttcctagagtggggagcctccctggcacaaacccagctgctttccccagaccagggggtccaatggctgcaatgtacccaaatggaatgttgcccccttaaacaccattttccctccaggaccaccttggtttctaggcactgtggttcttggcaggggctgtcttaggtaaaagggtagttgtggagctacagtctgaagaacatagcttgggctcaagttcaaatgagccatctttttcctttgcgtttttcttgactgaaggtgagatgttatttgtggcatgtgaactgtggcaggtgggaataatcctgcccttgagagaaaggatctccagcctcccagaagcctgctgtgctttcgtcccacagctttctgcccattgtttcttactagtttcttgaattgttcttgtggacttttcctcagggatacattggcctgcaggtcccagttcacatgtagtcccctgctcaccattggagaatcagctcactgctctctagaaacgtggcgttggtgaacggaccatgcttccgaggcttcagtgcctgaccaggcttcagtgcctgaccaggcttcagtgcctgaccgggcttcagtgcctgacc

SEQ ID NO: 424474 - DNA, 949 bp, Homo sapiens
  misc_feature (916)..(916): n is a, c, g, or t
  misc_feature (923)..(923): n is a, c, g, or t
  misc_feature (946)..(946): n is a, c, g, or t
agtcggaagtgcgcaggcagtgctcgcggcggcggcgacggcggcgggaggttcggttgtcgcccgttggccgcgcggcgccgcgctcggcggccgccattgcagcttgttttcacttgctttttaaagacagaaagctcatggtgcaaattgttatttccagtgcgagggctggaggcctggcagaatgggtgctgatggagctacagggggagatcgaggctcgctacagcactggattagctggaaacctcctgggagacctacattacaccactgagatcaggctcattggcttcaaatccagcacctttcccggctggtgctcgtgacccaagtatggcttcttttccaagagggatgaatcccactggcacagggatacattggcctgcaggtcccagttcacatgtagtcccctgctcaccattggagaatcagctcactgctctctagaaacgtggcgttggtgaacggaccatgcttccgtagctctgacctgggcagcttggacctggtcatcctctactgccatacctttccctgggggcttgaacacagaacagggagatggacaaccacttcaaagaaagacccaccgaatgcagtttctgcttgactgactgggcctgcagctcccttctcctgggacttagaggtggccagatttaaggcccctctactcatccaactccctcttcactggtactcccaatcaatcaaagaacctcaaaatttaaactgatgtggatgggaatatgggaattagggtgggggtgggggatgaagggaagaaatcactgtgctttgttcggcctggtgtgcaaggatggttggtggttttcctgcattgtatcttttcttactgtttctttaataaatgggatgagagggcaaaaaaaaacaaaaaaacaanaaaaaanaaacacaaaaaaaaacaaaaganaaa

SEQ ID NO: 424475 - DNA, 738 bp, Homo sapiens
  misc_feature (705)..(705): n is a, c, g, or t
  misc_feature (712)..(712): n is a, c, g, or t
  misc_feature (735)..(735): n is a, c, g, or t
gaagctatggggtctagggtactggaggtcctgccgggttgttttaaagtctgagcacggaaaggactctggtggtcgcctgatggctgtgcctggtgctggctcggggacgcattgccttgttttcacttgctttttaaagacagaaagctcatggtgcaaattgttatttccagtgcgagggctggaggcctggcagaatgggtgtttcgtcccacagctttctgcccattgtttcttactagtttcttgaattgttcttgtggacttttcctcagtagctctgacctgggcagcttggacctggtcatcctctactgccatacctttccctgggggcttgaacacagaacagggagatggacaaccacttcaaagaaagacccaccgaatgcagtttctgcttgactgactgggcctgcagctcccttctcctgggacttagaggtggccagatttaaggcccctctactcatccaactccctcttcactggtactcccaatcaatcaaagaacctcaaaatttaaactgatgtggatgggaatatgggaattagggtgggggtgggggatgaagggaagaaatcactgtgctttgttcggcctggtgtgcaaggatggttggtggttttcctgcattgtatcttttcttactgtttctttaataaatgggatgagagggcaaaaaaaaacaaaaaaacaanaaaaaanaaacacaaaaaaaaacaaaaganaaa

SEQ ID NO: 424476 - DNA, 617 bp, Homo sapiens
cgagcggggcggagcgggagaagggcggaaagggtggccgagcgcgggcggaggacggagaagggggcggcgagggccggaatctcgagcttgttttcacttgctttttaaagacagaaagctcatggtgcaaattgttatttccagtgcgagggctggaggcctggcagaatgggtgctgatggagctacagggggagatcgaggctcgctacagcactggattagctggaaacctcctgggagacctacattacaccactgagggaatccctgtgctgatcgtggggcatcatatcctgtatgggaaaatcatccacctggagaaaccttttgcagtccttgtcaaacacactcctggggatcaggactgtgatgagcttggccagatttaaggcccctctactcatccaactccctcttcactggtactcccaatcaatcaaagaacctcaaaatttaaactgatgtggatgggaatatgggaattagggtgggggtgggggatgaagggaagaaatcactgtgctttgttcggcctggtgtgcaaggatggttggtggttttcctgcattgtatcttttcttactgtttctttaataaatgggatgagagggc

SEQ ID NO: 424477 - DNA, 5426 bp, Homo sapiens
ggggaggaagaaaggcgaaggcaaggcgaaggggtggagagtgatatgaagagcgagagaaaagagaggacagcggacgagcagatccggtatctggaatcccggcgcctagaacgtgtttttcgggagagcaaaggctgtgtctacggcaggctggggatatagcctctccttccgatgaaaagagaaaggaagaatggactacagccaccaaacgtccctagtcccatgtggacaagataaatacatttccaaaaatgaacttctcttgcatctgaagacctacaacttgtactatgaaggccagaatttacagctccggcaccgggaggaagaagacgagttcattgtggaggggctcctgaacatctcctggggcctgcgccggcccattcgcctgcagatgcaggatgacaacgaacgcattcgaccccctccatcctcctcctcctggcactctggctgtaacctgggggctcagggaaccactctgaagcccctgactgtgcccaaagttcagatctcagaggtggatgccccgccggagggtgaccagatgccaagctccacagactccaggggcctgaagcccctgcaggaggacaccccacagctgatgcgcacacgcagtgatgttggggtgcgtcgccgtggcaatgtgaggacgcctagtgaccagcggcgaatcagacgccaccgcttctccatcaacggccatttctacaaccataagacatccgtgttcacaccagcctatggctctgtcaccaacgtccgcatcaacagcaccatgaccaccccacaggtcctgaagctgctgctcaacaaatttaagattgagaattcagcagaggagtttgccttgtacgtggtccatacgagtggtgagaaacagaagctgaaggccaccgattacccgctgattgcccgaatcctccagggcccatgtgagcagatctccaaagtgttcctaatggagaaggaccaggtggaggaagtcacctacgacgtggcccagtatataaagttcgagatgccggtacttaaaagcttcattcagaagctccaggaggaagaagatcgggaagtaaagaagctgatgcgcaagtacaccgtgctccggctaatgattcgacagaggctggaggagatagccgagaccccagcaacaatctgagccatgagaacgaggggatctgggcaccccaggaaccgccattgcccataagacccccaggaagctaggcactttctttccatggaaacatttagacacaaacctccccagctccggccaagccatcatttgctacctggagctggatgtagaagtcagcagacagctccctatccctggacccctgccctccttttttctgctcacaaggacttttgattttagttataaggagggcccaaaatgtgtgtgtgtacatgtgtgtgcacacatggtacgtgtccatgtgcctacctgatactttcacatgtaattaaattccaggcaaccagcacaagagccgtgagcttggcacatgtgctgctcgtgagcaggaaaatcagaggagccactgatctgagtggtatttaggttgaaggaaagatttctcctctcaagtgccagggagcagccacacgtctgtctgtgtttagagagggaagagggttctccaggttcaccatttgggttgtttatatgttggtagaaattctccctgtatgcctagaaggatcagtgaatgtaagagccttggaaattaacaaaataacagccacataaccttgcggcaagtctgatggaaagaaaaagataaaccatccgtggggtagatgcaataagcccacgtatttttacactggaaacgttgattgttttaaatgacaaagacatatgtgatgttctatgtggaaacctgtgaagagtggattctgcctccatctctgcctccatggctacctttaggagacagagaagatcctgtgtgtttctctgtacccagctgacagcctgtctctatggcgcttccttgagtggaaggaaatgtctcaagaaacaaagatctcgctggtgcgtacacagtgctgaccagctagtgtggccagggcctggtggcctggtggccaggaagtttcaggttgaagggaaatgtcgaggctacctgcagatatgacaggtgccttgaacgcagcccatcttcatgtcatcaaaggtcttcctgcacttgaagctggggcgatgtttgcagtcaagaccattctttccaacctctgggttcttgcaagttgccctcaccttgtgtgtggagatgcattccaagaatgaagcctcatcttgctactgagtgtggggttcagggaagctctttaggccacctggtgaaggtgcatggggaggatggagcttctcctcagctcctctgagcagccacctatgtgatctttaaatccaaccccaatgggagaaaagggcaagaacagtctgtgccctgggactcctatcaggaagcttgacaggcagctgggcatcagtgcagctgatatcgtttgaggagggagacagatgcttggacctgggtgcctggctatggagattgaccaagcaagatcaggagctcctgatagcaggcgtctttgagcctagctggggtagaggcactgcccatctcttctccaccttctctccacagaatgtttgcagagctgggcagttgaggaaaggacagcccctggttggtgcctccaaaggaaggtggacttttttggtggagacgtttctgccctgggcaccctcctgcccccgattcatacctatggcttcttgagaaggctcacagctgtggtcttaacgtagactgcagaaagatggcatgcggcccctggcatttcgccaagggttttatagcaagtctccttcctccatagggacagcagcaccagccctgtggggcatggagtggaagcccagaagggcttctgcaagctgcacagaattggggtaagaagacgaagagtaggcaccgggagaggcttcctttgttacagctgggaaagaacagttctgtgaatgcaaacacctcctgagttttgcaattgagaaaatgatttggagaacttctcttctggtaatttttattttgaatgttcagggccttagttggccccagtaattctccttggaggacttgggagaagaatttccacaaagcaaactactaaccactagctcttattggacagcgatttctggcttataagagttctctttgatttgcactagcactacgatagtgttagatggggaaatactgcaacatgtccagttggccagatcactttccaagggagcgatactaaggcagactgagctttttaaagatgggaggtcaggaggtggaagcgagaggagatcccatctcacacaacacacttccacgtaatgcagaccacacttttccattttgtcctgccctcttgagaggtcatttctcacgtcctaagaacctgatcagaaattttggaagggttctttgaaatagcagcagttgaaacagagacactttgccacagtgtggagcagattttctcactggtatcacatggtcttgcagttttgaactcttcgaccgatttgtgggagtttatgtaattgcgtgcaatgaacctgaaattgtgtaaaggacaaaagaccagtttatagggttgggttttttttccaacttgtgaaaagcagtttagctgcatctgtctccccaccacccccaccccgggaggggcttatgttacaaggtgatcaagtgaaggaaaaacctgagcctatctggctgggatggtggaattaagcacaaggtcacattctctgtgatcacatgagagggaaggtgatgacttaaatggcagggggtggggattatcttggggagaggctgaaaagcacaaaagatagtcttccctgtacgtattggtgaagaacgtgcacaaggctggatggacttcaacttggagttgagttgaggcaagaggatttctggatattagtcacccatctgcaagaaaaatgctgaggcctcgggtcaagattttgatctgagacatgctgatgcttcaaggagaaatattttcacaatcctctcttccctcaccagaagagaacagtactctctcctagaaacctctaggtaaacacattttatcctaatatcggtagcatataatgcccccccccaaaatatctgttttccatgcaaaaaagtctcaacaagaagtctgtggagttgagtggttacttcaaagtgtcaggagagtgaagaaattggccacagaagagcaagaagctctcttaagaaaagggaattctctttaaagaaaccaccaccaacaacaaaacaaccaaaaaccatgttttatgtcaaagctctgtagcacagagaatgtggtgtcacagatacatcgccgagagaggtttctttctttcttttttttttttttggagacagagtctggttctgtttcccaggctggagtgcaggggtgggatctcagctcactgcaacatccgcctctggggttcaagtgattctcctgtctcagcctcccaagtagctggaattacagggacccgccaccacgcccggctaattttttggggtggttttagtagaggtggggtttcaccatcttggccaggctggtcttgaactcctgacctcgtgatccacccgcctaggcctcccaaagtgttgggattacaggcgtgagccactgtgcccagccaaaagagaaatttctacatgaacaaggcaatttcagtgtcttacagcggccaaaccatgacgtgaagaatgagataggagacaggagatcaccataagcgtccctgatatagcagcacacattttcacgtttccacttaaatcgttttgcacaaagtcttgcttcgctcagatgagatgagatatgatttcctagagatgtaaaaataagaatgaatgtggcgcccccttcttccagatgtaatagaaagctctgccctatcacaaggggggtgttgaagcgccccttgtgttttaactgtatttaactgagcacaagatgcacaagctgtggtgggaaaccctcagtttacctttggagtcttccctgcagatcgcagacctgtttccaggctgatgtttctggtgtgtaattgctagcgtttctgaagggttttcccaattgttttagccttgtgaagtattcttaattataacttgcctttcagcgatggtacatgacttgattcaacgtttggttctgaacttacacactgatgcgtttactcatctaacataatctgacagggcctcagcaagggagccatacatttttgtaacattttgatatgttttaatgcatctgacttagatcttactgaaataaagcacttttcaaag

SEQ ID NO: 424478 - DNA, 280 bp, Homo sapiens
ggggaggaagaaaggcgaaggcaaggcgaaggggtggagagtgatatgaagagcgagagaaaagagaggacagcggacgagcagatccggtatctggaatcccggcgcctagaacgtgtttttcgggagagcaaaggctgtgtctacggcaggctggggatatagtaagtaccttgtaaatgatgaatgaatgtatgaaccaatcagctgacaaacaacaatttgtcctggagggggacccagttcctgccacagttgatcttagtacaatgggaggaaa

SEQ ID NO: 424479 - DNA, 6048 bp, Homo sapiens
cggggctcccggggcgcgcggacccccgccaggggccgtgtaggcgcggagccccagccggcctgccttgggtccgaagaaagttgtggcttggagctagtcctccttctacgacccctgggggcgtccttccttctttttgagcccgcgatgagaaggcgctcccaccccatccccggggtctctgagacttcctggcgagctggggcggcgcggcaggtgcagggctggggagggcctgacagccctggagagtgcccgaccccaatccgccgccgtcttctaggcggattccccagaggcaggtcccagtccctggcgcggggaggcggcgcgcttcagaggggcgcagggtgcgcgggggccgttggccctccgggcacttcccctttgcggtctccccgccctccttcggagctggtgcctgaggtcgctgggacctcagcctggcgtcttctctcgccccgagcgaggcaggtgccgtgggcggccccggctacttctgcatttcgagcgcttactttgcattcagctctaagtcggagagctctggggacagccgagagtgccagtggcctcatagggagactgagggttctgtttcacctcgggcgccgtgtgggtctgggctgtccacagcacctctgcgcctcagtgataggagaagccaagcgcgaggcctctcaacgctgcgtgcactctatttcccaggtatctggaatcccggcgcctagaacgtgtttttcgggagagcaaaggctgtgtctacggcaggctggggatatagcctctccttccgatgaaaagagaaaggaagaatggactacagccaccaaacgtccctagtcccatgtggacaagataaatacatttccaaaaatgaacttctcttgcatctgaagacctacaacttgtactatgaaggccagaatttacagctccggcaccgggaggaagaagacgagttcattgtggaggggctcctgaacatctcctggggcctgcgccggcccattcgcctgcagatgcaggatgacaacgaacgcattcgaccccctccatcctcctcctcctggcactctggctgtaacctgggggctcagggaaccactctgaagcccctgactgtgcccaaagttcagatctcagaggtggatgccccgccggagggtgaccagatgccaagctccacagactccaggggcctgaagcccctgcaggaggacaccccacagctgatgcgcacacgcagtgatgttggggtgcgtcgccgtggcaatgtgaggacgcctagtgaccagcggcgaatcagacgccaccgcttctccatcaacggccatttctacaaccataagacatccgtgttcacaccagcctatggctctgtcaccaacgtccgcatcaacagcaccatgaccaccccacaggtcctgaagctgctgctcaacaaatttaagattgagaattcagcagaggagtttgccttgtacgtggtccatacgagtggtgagaaacagaagctgaaggccaccgattacccgctgattgcccgaatcctccagggcccatgtgagcagatctccaaagtgttcctaatggagaaggaccaggtggaggaagtcacctacgacgtggcccagtatataaagttcgagatgccggtacttaaaagcttcattcagaagctccaggaggaagaagatcgggaagtaaagaagctgatgcgcaagtacaccgtgctccggctaatgattcgacagaggctggaggagatagccgagaccccagcaacaatctgagccatgagaacgaggggatctgggcaccccaggaaccgccattgcccataagacccccaggaagctaggcactttctttccatggaaacatttagacacaaacctccccagctccggccaagccatcatttgctacctggagctggatgtagaagtcagcagacagctccctatccctggacccctgccctccttttttctgctcacaaggacttttgattttagttataaggagggcccaaaatgtgtgtgtgtacatgtgtgtgcacacatggtacgtgtccatgtgcctacctgatactttcacatgtaattaaattccaggcaaccagcacaagagccgtgagcttggcacatgtgctgctcgtgagcaggaaaatcagaggagccactgatctgagtggtatttaggttgaaggaaagatttctcctctcaagtgccagggagcagccacacgtctgtctgtgtttagagagggaagagggttctccaggttcaccatttgggttgtttatatgttggtagaaattctccctgtatgcctagaaggatcagtgaatgtaagagccttggaaattaacaaaataacagccacataaccttgcggcaagtctgatggaaagaaaaagataaaccatccgtggggtagatgcaataagcccacgtatttttacactggaaacgttgattgttttaaatgacaaagacatatgtgatgttctatgtggaaacctgtgaagagtggattctgcctccatctctgcctccatggctacctttaggagacagagaagatcctgtgtgtttctctgtacccagctgacagcctgtctctatggcgcttccttgagtggaaggaaatgtctcaagaaacaaagatctcgctggtgcgtacacagtgctgaccagctagtgtggccagggcctggtggcctggtggccaggaagtttcaggttgaagggaaatgtcgaggctacctgcagatatgacaggtgccttgaacgcagcccatcttcatgtcatcaaaggtcttcctgcacttgaagctggggcgatgtttgcagtcaagaccattctttccaacctctgggttcttgcaagttgccctcaccttgtgtgtggagatgcattccaagaatgaagcctcatcttgctactgagtgtggggttcagggaagctctttaggccacctggtgaaggtgcatggggaggatggagcttctcctcagctcctctgagcagccacctatgtgatctttaaatccaaccccaatgggagaaaagggcaagaacagtctgtgccctgggactcctatcaggaagcttgacaggcagctgggcatcagtgcagctgatatcgtttgaggagggagacagatgcttggacctgggtgcctggctatggagattgaccaagcaagatcaggagctcctgatagcaggcgtctttgagcctagctggggtagaggcactgcccatctcttctccaccttctctccacagaatgtttgcagagctgggcagttgaggaaaggacagcccctggttggtgcctccaaaggaaggtggacttttttggtggagacgtttctgccctgggcaccctcctgcccccgattcatacctatggcttcttgagaaggctcacagctgtggtcttaacgtagactgcagaaagatggcatgcggcccctggcatttcgccaagggttttatagcaagtctccttcctccatagggacagcagcaccagccctgtggggcatggagtggaagcccagaagggcttctgcaagctgcacagaattggggtaagaagacgaagagtaggcaccgggagaggcttcctttgttacagctgggaaagaacagttctgtgaatgcaaacacctcctgagttttgcaattgagaaaatgatttggagaacttctcttctggtaatttttattttgaatgttcagggccttagttggccccagtaattctccttggaggacttgggagaagaatttccacaaagcaaactactaaccactagctcttattggacagcgatttctggcttataagagttctctttgatttgcactagcactacgatagtgttagatggggaaatactgcaacatgtccagttggccagatcactttccaagggagcgatactaaggcagactgagctttttaaagatgggaggtcaggaggtggaagcgagaggagatcccatctcacacaacacacttccacgtaatgcagaccacacttttccattttgtcctgccctcttgagaggtcatttctcacgtcctaagaacctgatcagaaattttggaagggttctttgaaatagcagcagttgaaacagagacactttgccacagtgtggagcagattttctcactggtatcacatggtcttgcagttttgaactcttcgaccgatttgtgggagtttatgtaattgcgtgcaatgaacctgaaattgtgtaaaggacaaaagaccagtttatagggttgggttttttttccaacttgtgaaaagcagtttagctgcatctgtctccccaccacccccaccccgggaggggcttatgttacaaggtgatcaagtgaaggaaaaacctgagcctatctggctgggatggtggaattaagcacaaggtcacattctctgtgatcacatgagagggaaggtgatgacttaaatggcagggggtggggattatcttggggagaggctgaaaagcacaaaagatagtcttccctgtacgtattggtgaagaacgtgcacaaggctggatggacttcaacttggagttgagttgaggcaagaggatttctggatattagtcacccatctgcaagaaaaatgctgaggcctcgggtcaagattttgatctgagacatgctgatgcttcaaggagaaatattttcacaatcctctcttccctcaccagaagagaacagtactctctcctagaaacctctaggtaaacacattttatcctaatatcggtagcatataatgcccccccccaaaatatctgttttccatgcaaaaaagtctcaacaagaagtctgtggagttgagtggttacttcaaagtgtcaggagagtgaagaaattggccacagaagagcaagaagctctcttaagaaaagggaattctctttaaagaaaccaccaccaacaacaaaacaaccaaaaaccatgttttatgtcaaagctctgtagcacagagaatgtggtgtcacagatacatcgccgagagaggtttctttctttcttttttttttttttggagacagagtctggttctgtttcccaggctggagtgcaggggtgggatctcagctcactgcaacatccgcctctggggttcaagtgattctcctgtctcagcctcccaagtagctggaattacagggacccgccaccacgcccggctaattttttggggtggttttagtagaggtggggtttcaccatcttggccaggctggtcttgaactcctgacctcgtgatccacccgcctaggcctcccaaagtgttgggattacaggcgtgagccactgtgcccagccaaaagagaaatttctacatgaacaaggcaatttcagtgtcttacagcggccaaaccatgacgtgaagaatgagataggagacaggagatcaccataagcgtccctgatatagcagcacacattttcacgtttccacttaaatcgttttgcacaaagtcttgcttcgctcagatgagatgagatatgatttcctagagatgtaaaaataagaatgaatgtggcgcccccttcttccagatgtaatagaaagctctgccctatcacaaggggggtgttgaagcgccccttgtgttttaactgtatttaactgagcacaagatgcacaagctgtggtgggaaaccctcagtttacctttggagtcttccctgcagatcgcagacctgtttccaggctgatgtttctggtgtgtaattgctagcgtttctgaagggttttcccaattgttttagccttgtgaagtattcttaattataacttgcctttcagcgatggtacatgacttgattcaacgtttggttctgaacttacacactgatgcgtttactcatctaacataatctgacagggcctcagcaagggagccatacatttttgtaacattttgatatgttttaatgcatctgacttagatcttactgaaataaagcacttttcaaag

SEQ ID NO: 424480 - DNA, 5455 bp, Homo sapiens
ccggcccgccgatcgctggccgaggcgcagctgaagcagccccccagccgcggcgcccccactttccaactccacggttcctgcggcgcgggcgcgatgcagctggcccggggtgaaggtatctggaatcccggcgcctagaacgtgtttttcgggagagcaaaggctgtgtctacggcaggctggggatatagcctctccttccgatgaaaagagaaaggaagaatggactacagccaccaaacgtccctagtcccatgtggacaagataaatacatttccaaaaatgaacttctcttgcatctgaagacctacaacttgtactatgaaggccagaatttacagctccggcaccgggaggaagaagacgagttcattgtggaggggctcctgaacatctcctggggcctgcgccggcccattcgcctgcagatgcaggatgacaacgaacgcattcgaccccctccatcctcctcctcctggcactctggctgtaacctgggggctcagggaaccactctgaagcccctgactgtgcccaaagttcagatctcagaggtggatgccccgccggagggtgaccagatgccaagctccacagactccaggggcctgaagcccctgcaggaggacaccccacagctgatgcgcacacgcagtgatgttggggtgcgtcgccgtggcaatgtgaggacgcctagtgaccagcggcgaatcagacgccaccgcttctccatcaacggccatttctacaaccataagacatccgtgttcacaccagcctatggctctgtcaccaacgtccgcatcaacagcaccatgaccaccccacaggtcctgaagctgctgctcaacaaatttaagattgagaattcagcagaggagtttgccttgtacgtggtccatacgagtggtgagaaacagaagctgaaggccaccgattacccgctgattgcccgaatcctccagggcccatgtgagcagatctccaaagtgttcctaatggagaaggaccaggtggaggaagtcacctacgacgtggcccagtatataaagttcgagatgccggtacttaaaagcttcattcagaagctccaggaggaagaagatcgggaagtaaagaagctgatgcgcaagtacaccgtgctccggctaatgattcgacagaggctggaggagatagccgagaccccagcaacaatctgagccatgagaacgaggggatctgggcaccccaggaaccgccattgcccataagacccccaggaagctaggcactttctttccatggaaacatttagacacaaacctccccagctccggccaagccatcatttgctacctggagctggatgtagaagtcagcagacagctccctatccctggacccctgccctccttttttctgctcacaaggacttttgattttagttataaggagggcccaaaatgtgtgtgtgtacatgtgtgtgcacacatggtacgtgtccatgtgcctacctgatactttcacatgtaattaaattccaggcaaccagcacaagagccgtgagcttggcacatgtgctgctcgtgagcaggaaaatcagaggagccactgatctgagtggtatttaggttgaaggaaagatttctcctctcaagtgccagggagcagccacacgtctgtctgtgtttagagagggaagagggttctccaggttcaccatttgggttgtttatatgttggtagaaattctccctgtatgcctagaaggatcagtgaatgtaagagccttggaaattaacaaaataacagccacataaccttgcggcaagtctgatggaaagaaaaagataaaccatccgtggggtagatgcaataagcccacgtatttttacactggaaacgttgattgttttaaatgacaaagacatatgtgatgttctatgtggaaacctgtgaagagtggattctgcctccatctctgcctccatggctacctttaggagacagagaagatcctgtgtgtttctctgtacccagctgacagcctgtctctatggcgcttccttgagtggaaggaaatgtctcaagaaacaaagatctcgctggtgcgtacacagtgctgaccagctagtgtggccagggcctggtggcctggtggccaggaagtttcaggttgaagggaaatgtcgaggctacctgcagatatgacaggtgccttgaacgcagcccatcttcatgtcatcaaaggtcttcctgcacttgaagctggggcgatgtttgcagtcaagaccattctttccaacctctgggttcttgcaagttgccctcaccttgtgtgtggagatgcattccaagaatgaagcctcatcttgctactgagtgtggggttcagggaagctctttaggccacctggtgaaggtgcatggggaggatggagcttctcctcagctcctctgagcagccacctatgtgatctttaaatccaaccccaatgggagaaaagggcaagaacagtctgtgccctgggactcctatcaggaagcttgacaggcagctgggcatcagtgcagctgatatcgtttgaggagggagacagatgcttggacctgggtgcctggctatggagattgaccaagcaagatcaggagctcctgatagcaggcgtctttgagcctagctggggtagaggcactgcccatctcttctccaccttctctccacagaatgtttgcagagctgggcagttgaggaaaggacagcccctggttggtgcctccaaaggaaggtggacttttttggtggagacgtttctgccctgggcaccctcctgcccccgattcatacctatggcttcttgagaaggctcacagctgtggtcttaacgtagactgcagaaagatggcatgcggcccctggcatttcgccaagggttttatagcaagtctccttcctccatagggacagcagcaccagccctgtggggcatggagtggaagcccagaagggcttctgcaagctgcacagaattggggtaagaagacgaagagtaggcaccgggagaggcttcctttgttacagctgggaaagaacagttctgtgaatgcaaacacctcctgagttttgcaattgagaaaatgatttggagaacttctcttctggtaatttttattttgaatgttcagggccttagttggccccagtaattctccttggaggacttgggagaagaatttccacaaagcaaactactaaccactagctcttattggacagcgatttctggcttataagagttctctttgatttgcactagcactacgatagtgttagatggggaaatactgcaacatgtccagttggccagatcactttccaagggagcgatactaaggcagactgagctttttaaagatgggaggtcaggaggtggaagcgagaggagatcccatctcacacaacacacttccacgtaatgcagaccacacttttccattttgtcctgccctcttgagaggtcatttctcacgtcctaagaacctgatcagaaattttggaagggttctttgaaatagcagcagttgaaacagagacactttgccacagtgtggagcagattttctcactggtatcacatggtcttgcagttttgaactcttcgaccgatttgtgggagtttatgtaattgcgtgcaatgaacctgaaattgtgtaaaggacaaaagaccagtttatagggttgggttttttttccaacttgtgaaaagcagtttagctgcatctgtctccccaccacccccaccccgggaggggcttatgttacaaggtgatcaagtgaaggaaaaacctgagcctatctggctgggatggtggaattaagcacaaggtcacattctctgtgatcacatgagagggaaggtgatgacttaaatggcagggggtggggattatcttggggagaggctgaaaagcacaaaagatagtcttccctgtacgtattggtgaagaacgtgcacaaggctggatggacttcaacttggagttgagttgaggcaagaggatttctggatattagtcacccatctgcaagaaaaatgctgaggcctcgggtcaagattttgatctgagacatgctgatgcttcaaggagaaatattttcacaatcctctcttccctcaccagaagagaacagtactctctcctagaaacctctaggtaaacacattttatcctaatatcggtagcatataatgcccccccccaaaatatctgttttccatgcaaaaaagtctcaacaagaagtctgtggagttgagtggttacttcaaagtgtcaggagagtgaagaaattggccacagaagagcaagaagctctcttaagaaaagggaattctctttaaagaaaccaccaccaacaacaaaacaaccaaaaaccatgttttatgtcaaagctctgtagcacagagaatgtggtgtcacagatacatcgccgagagaggtttctttctttcttttttttttttttggagacagagtctggttctgtttcccaggctggagtgcaggggtgggatctcagctcactgcaacatccgcctctggggttcaagtgattctcctgtctcagcctcccaagtagctggaattacagggacccgccaccacgcccggctaattttttggggtggttttagtagaggtggggtttcaccatcttggccaggctggtcttgaactcctgacctcgtgatccacccgcctaggcctcccaaagtgttgggattacaggcgtgagccactgtgcccagccaaaagagaaatttctacatgaacaaggcaatttcagtgtcttacagcggccaaaccatgacgtgaagaatgagataggagacaggagatcaccataagcgtccctgatatagcagcacacattttcacgtttccacttaaatcgttttgcacaaagtcttgcttcgctcagatgagatgagatatgatttcctagagatgtaaaaataagaatgaatgtggcgcccccttcttccagatgtaatagaaagctctgccctatcacaaggggggtgttgaagcgccccttgtgttttaactgtatttaactgagcacaagatgcacaagctgtggtgggaaaccctcagtttacctttggagtcttccctgcagatcgcagacctgtttccaggctgatgtttctggtgtgtaattgctagcgtttctgaagggttttcccaattgttttagccttgtgaagtattcttaattataacttgcctttcagcgatggtacatgacttgattcaacgtttggttctgaacttacacactgatgcgtttactcatctaacataatctgacagggcctcagcaagggagccatacatttttgtaacattttgatatgttttaatgcatctgacttagatcttactgaaataaagcacttttcaaag

SEQ ID NO: 424481 - DNA, 5200 bp, Homo sapiens
gtggctagtgaggcccagcctgtatatttctaacagggcgccccatgccccagcaccctccccactgggaccactcctcatagaatagccccactccaaagcatttatgacttgaaccttctgaccaaagctctctgaatcttgggggaacctagaagaggaaaaggaatgtcaggctctgtcagagtcagccaagcgagatcagccaggggtctgctccctgcagaccatacggggagccagggtttgcaatgagtctaaactggaatcttaccctgcaaaacgaatggccactattagagttttccaaaaccactctgaagcccctgactgtgcccaaagttcagatctcagaggtggatgccccgccggagggtgaccagatgccaagctccacagactccaggggcctgaagcccctgcaggaggacaccccacagctgatgcgcacacgcagtgatgttggggtgcgtcgccgtggcaatgtgaggacgcctagtgaccagcggcgaatcagacgccaccgcttctccatcaacggccatttctacaaccataagacatccgtgttcacaccagcctatggctctgtcaccaacgtccgcatcaacagcaccatgaccaccccacaggtcctgaagctgctgctcaacaaatttaagattgagaattcagcagaggagtttgccttgtacgtggtccatacgagtggtgggcccatgtgagcagatctccaaagtgttcctaatggagaaggaccaggtggaggaagtcacctacgacgtggcccagtatataaagttcgagatgccggtacttaaaagcttcattcagaagctccaggaggaagaagatcgggaagtaaagaagctgatgcgcaagtacaccgtgctccggctaatgattcgacagaggctggaggagatagccgagaccccagcaacaatctgagccatgagaacgaggggatctgggcaccccaggaaccgccattgcccataagacccccaggaagctaggcactttctttccatggaaacatttagacacaaacctccccagctccggccaagccatcatttgctacctggagctggatgtagaagtcagcagacagctccctatccctggacccctgccctccttttttctgctcacaaggacttttgattttagttataaggagggcccaaaatgtgtgtgtgtacatgtgtgtgcacacatggtacgtgtccatgtgcctacctgatactttcacatgtaattaaattccaggcaaccagcacaagagccgtgagcttggcacatgtgctgctcgtgagcaggaaaatcagaggagccactgatctgagtggtatttaggttgaaggaaagatttctcctctcaagtgccagggagcagccacacgtctgtctgtgtttagagagggaagagggttctccaggttcaccatttgggttgtttatatgttggtagaaattctccctgtatgcctagaaggatcagtgaatgtaagagccttggaaattaacaaaataacagccacataaccttgcggcaagtctgatggaaagaaaaagataaaccatccgtggggtagatgcaataagcccacgtatttttacactggaaacgttgattgttttaaatgacaaagacatatgtgatgttctatgtggaaacctgtgaagagtggattctgcctccatctctgcctccatggctacctttaggagacagagaagatcctgtgtgtttctctgtacccagctgacagcctgtctctatggcgcttccttgagtggaaggaaatgtctcaagaaacaaagatctcgctggtgcgtacacagtgctgaccagctagtgtggccagggcctggtggcctggtggccaggaagtttcaggttgaagggaaatgtcgaggctacctgcagatatgacaggtgccttgaacgcagcccatcttcatgtcatcaaaggtcttcctgcacttgaagctggggcgatgtttgcagtcaagaccattctttccaacctctgggttcttgcaagttgccctcaccttgtgtgtggagatgcattccaagaatgaagcctcatcttgctactgagtgtggggttcagggaagctctttaggccacctggtgaaggtgcatggggaggatggagcttctcctcagctcctctgagcagccacctatgtgatctttaaatccaaccccaatgggagaaaagggcaagaacagtctgtgccctgggactcctatcaggaagcttgacaggcagctgggcatcagtgcagctgatatcgtttgaggagggagacagatgcttggacctgggtgcctggctatggagattgaccaagcaagatcaggagctcctgatagcaggcgtctttgagcctagctggggtagaggcactgcccatctcttctccaccttctctccacagaatgtttgcagagctgggcagttgaggaaaggacagcccctggttggtgcctccaaaggaaggtggacttttttggtggagacgtttctgccctgggcaccctcctgcccccgattcatacctatggcttcttgagaaggctcacagctgtggtcttaacgtagactgcagaaagatggcatgcggcccctggcatttcgccaagggttttatagcaagtctccttcctccatagggacagcagcaccagccctgtggggcatggagtggaagcccagaagggcttctgcaagctgcacagaattggggtaagaagacgaagagtaggcaccgggagaggcttcctttgttacagctgggaaagaacagttctgtgaatgcaaacacctcctgagttttgcaattgagaaaatgatttggagaacttctcttctggtaatttttattttgaatgttcagggccttagttggccccagtaattctccttggaggacttgggagaagaatttccacaaagcaaactactaaccactagctcttattggacagcgatttctggcttataagagttctctttgatttgcactagcactacgatagtgttagatggggaaatactgcaacatgtccagttggccagatcactttccaagggagcgatactaaggcagactgagctttttaaagatgggaggtcaggaggtggaagcgagaggagatcccatctcacacaacacacttccacgtaatgcagaccacacttttccattttgtcctgccctcttgagaggtcatttctcacgtcctaagaacctgatcagaaattttggaagggttctttgaaatagcagcagttgaaacagagacactttgccacagtgtggagcagattttctcactggtatcacatggtcttgcagttttgaactcttcgaccgatttgtgggagtttatgtaattgcgtgcaatgaacctgaaattgtgtaaaggacaaaagaccagtttatagggttgggttttttttccaacttgtgaaaagcagtttagctgcatctgtctccccaccacccccaccccgggaggggcttatgttacaaggtgatcaagtgaaggaaaaacctgagcctatctggctgggatggtggaattaagcacaaggtcacattctctgtgatcacatgagagggaaggtgatgacttaaatggcagggggtggggattatcttggggagaggctgaaaagcacaaaagatagtcttccctgtacgtattggtgaagaacgtgcacaaggctggatggacttcaacttggagttgagttgaggcaagaggatttctggatattagtcacccatctgcaagaaaaatgctgaggcctcgggtcaagattttgatctgagacatgctgatgcttcaaggagaaatattttcacaatcctctcttccctcaccagaagagaacagtactctctcctagaaacctctaggtaaacacattttatcctaatatcggtagcatataatgcccccccccaaaatatctgttttccatgcaaaaaagtctcaacaagaagtctgtggagttgagtggttacttcaaagtgtcaggagagtgaagaaattggccacagaagagcaagaagctctcttaagaaaagggaattctctttaaagaaaccaccaccaacaacaaaacaaccaaaaaccatgttttatgtcaaagctctgtagcacagagaatgtggtgtcacagatacatcgccgagagaggtttctttctttcttttttttttttttggagacagagtctggttctgtttcccaggctggagtgcaggggtgggatctcagctcactgcaacatccgcctctggggttcaagtgattctcctgtctcagcctcccaagtagctggaattacagggacccgccaccacgcccggctaattttttggggtggttttagtagaggtggggtttcaccatcttggccaggctggtcttgaactcctgacctcgtgatccacccgcctaggcctcccaaagtgttgggattacaggcgtgagccactgtgcccagccaaaagagaaatttctacatgaacaaggcaatttcagtgtcttacagcggccaaaccatgacgtgaagaatgagataggagacaggagatcaccataagcgtccctgatatagcagcacacattttcacgtttccacttaaatcgttttgcacaaagtcttgcttcgctcagatgagatgagatatgatttcctagagatgtaaaaataagaatgaatgtggcgcccccttcttccagatgtaatagaaagctctgccctatcacaaggggggtgttgaagcgccccttgtgttttaactgtatttaactgagcacaagatgcacaagctgtggtgggaaaccctcagtttacctttggagtcttccctgcagatcgcagacctgtttccaggctgatgtttctggtgtgtaattgctagcgtttctgaagggttttcccaattgttttagccttgtgaagtattcttaattataacttgcctttcagcgatggtacatgacttgattcaacgtttggttctgaacttacacactgatgcgtttactcatctaacataatctgacagggcctcagcaagggagccatacatttttgtaacattttgatatgttttaatgcatctgacttagatcttactgaaataaagcacttttcaaag

SEQ ID NO: 424482 - DNA, 5826 bp, Homo sapiens
ggggaggaagaaaggcgaaggcaaggcgaaggggtggagagtgatatgaagagcgagagaaaagagaggacagcggacgagcagatccggtatctggaatcccggcgcctagaacgtgtttttcgggagagcaaaggctgtgtctacggcaggctggggatatagcctctccttccgatgaaaagagaaaggaagaatggactacagccaccaaacgtccctagtcccatgtggacaagataaatacatttccaaaaatgaacttctcttgcatctgaagacctacaacttgtactatgaaggccagaatttacagctccggcaccgggaggaagaagacgagttcattgtggaggggctcctgaacatctcctggggcctgcgccggcccattcgcctgcagatgcaggatgacaacgaacgcattcgaccccctccatcctcctcctcctggcactctggctgtaacctgggggctcagggaaccactctgaagcccctgactgtgcccaaagttcagatctcagaggtggatgccccgccggagggtgaccagatgccaagctccacagactccaggggcctgaagcccctgcaggaggacaccccacagctgatgcgcacacgcagtgatgttggggtgcgtcgccgtggcaatgtgaggacgcctagtgaccagcggcgaatcagacgccaccgcttctccatcaacggccatttctacaaccataagacatccgtgttcacaccagcctatggctctgtcaccaacgtccgcatcaacagcaccatgaccaccccacaggtcctgaagctgctgctcaacaaatttaagattgagaattcagcagaggagtttgccttgtacgtggtccatacgagtggtgagaaacagaagctgaaggccaccgattacccgctgattgcccgaatcctccagggcccatgtgagcagatctccaaagtgttcctaatggagaaggaccaggtggaggaagtcacctacgacgtggcccagtatataaagttcgagatgccggtacttaaaagcttcattcagaagctccaggaggaagaagatcgggaagtaaagaagctgatgcgcaagtacaccgtgctccggctaatgattcgacagaggctggaggagatagccgagaccccagcaacaatctgagccatgagaacgaggggatctgggcaccccaggaaccgccattgcccataagacccccaggaagctaggcactttctttccatggaaacatttagacacaaacctccccagctccggccaagccatcatttgctacctggagctggatgtagaagtcagcagacagctccctatccctggacccctgccctccttttttctgctcacaaggacttttgattttagttataaggagggcccaaaatgtgtgtgtgtacatgtgtgtgcacacatggtacgtgtccatgtgcctacctgatactttcacatgtaattaaattccaggcaaccagcacaagagccgtgagcttggcacatgtgctgctcgtgagcaggaaaatcagaggagccactgatctgagtggtatttaggttgaaggaaagatttctcctctcaagtgccagggagcagccacacgtctgtctgtgtttagagagggaagagggttctccaggttcaccatttgggttgtttatatgttggtagaaattctccctgtatgcctagaaggatcagtgaatgtaagagccttggaaattaacaaaataacagccacataaccttgcggcaagtctgatggaaagaaaaagataaaccatccgtggggtagatgcaataagcccacgtatttttacactggaaacgttgattgttttaaatgacaaagacatatgtgatgttctatgtggaaacctgtgaagagtggattctgcctccatctctgcctccatggctacctttaggagacagagaagatcctgtgtgtttctctgtacccagctgacagcctgtctctatggcgcttccttgagtggaaggaaatgtctcaagaaacaaagatctcgctggtgcgtacacagtgctgaccagctagtgtggccagggcctggtggcctggtggccaggaagtttcaggttgaagggaaatgtcgaggctacctgcagatatgacaggtgccttgaacgcagcccatcttcatgtcatcaaaggtcttcctgcacttgaagctggggcgatgtttgcagtcaagaccattctttccaacctctgggttcttgcaagttgccctcaccttgtgtgtggagatgcattccaagaatgaagcctcatcttgctactgagtgtggggttcagggaagctctttaggccacctggtgaaggtgcatggggaggatggagcttctcctcagctcctctgagcagccacctatgtgatctttaaatccaaccccaatgggagaaaagggcaagaacagtctgtgccctgggactcctatcaggaagcttgacaggcagctgggcatcagtgcagctgatatcgtttgaggagggagacagatgcttggacctgggtgcctggctatggagattgaccaagcaagatcaggagctcctgatagcaggcgtctttgagcctagctggggtagaggcactgcccatctcttctccaccttctctccacagaatgtttgcagagctgggcagttgaggaaaggacagcccctggttggtgcctccaaaggaaggtggacttttttggtggagacgtttctgccctgggcaccctcctgcccccgattcatacctatggcttcttgagaaggctcacagctgtggtcttaacgtagactgcagaaagatggcatgcggcccctggcatttcgccaagggttttatagcaagtctccttcctccatagggacagcagcaccagccctgtggggcatggagtggaagcccagaagggcttctgcaagctgcacagaattggggtaagaagacgaagagtaggcaccgggagaggcttcctttgttacagctgggaaagaacagttctgtgaatgcaaacacctcctgagttttgcaattgagaaaatgatttggagaacttctcttctggtaatttttattttgaatgttcagggccttagttggccccagtaattctccttggaggacttgggagaagaatttccacaaagcaaactactaaccactagctcttattggacagcgatttctggcttataagagttctctttgatttgcactagcactacgatagtgttagatggggaaatactgcaacatgtccagttggccagatcactttccaagggagcgatactaaggcagactgagctttttaaagatgggaggtcaggaggtggaagcgagaggagatcccatctcacacaacacacttccacgtaatgcagaccacacttttccattttgtcctgccctcttgagaggtcatttctcacgtcctaagaacctgatcagaaattttggaagggttctttgaaatagcagcagttgaaacagagacactttgccacagtgtggagcagattttctcactggtatcacatggtcttgcagttttgaactcttcgaccgatttgtgggagtttatgtaattgcgtgcaatgaacctgaaattgtgtaaaggacaaaagaccagtttatagggttgggttttttttccaacttgtgaaaagcagtttagctgcatctgtctccccaccacccccaccccgggaggggcttatgttacaaggtgatcaagtgaaggaaaaacctgagcctatctggctgggatggtggaattaagcacaaggtcacattctctgtgatcacatgagagggaaggtgatgacttaaatggcagggggtggggattatcttggggagaggctgaaaagcacaaaagatagtcttccctgtacgtattggtgaagaacgtgcacaaggctggatggacttcaacttggagttgagttgaggcaagaggatttctggatattagtcacccatctgcaagaaaaatgctgaggcctcgggtcaagattttgatctgagacatgctgatgcttcaaggagaaatattttcacaatcctctcttccctcaccagaagagaacagtactctctcctagaaacctctaggtaaacacattttatcctaatatcggtagcatataatgcccccccccaaaatatctgttttccatgcaaaaaagtctcaacaagaagtctgtggagttgagtggttacttcaaagtgtcaggagagtgaagaaattggccacagaagagcaagaagctctcttaagaaaagggaattctctttaaagaaaccaccaccaacaacaaaacaaccaaaaaccatgttttatgtcaaagctctgtagcacagagaatgtggtgtcacagatacatcgccgagagaggtttctttctttcttttttttttttttggagacagagtctggttctgtttcccaggctggagtgcaggggtgggatctcagctcactgcaacatccgcctctggggttcaagtgattctcctgtctcagcctcccaagtagctggaattacagggacccgccaccacgcccggctaattttttggggtggttttagtagaggtggggtttcaccatcttggccaggctggtcttgaactcctgacctcgtgatccacccgcctaggcctcccaaagtgttgggattacaggcgtgagccactgtgcccagccaaaagagaaatttctacatgaacaaggcaatttcagtgtcttacagcggccaaaccatgacgtgaagaatgagataggagacaggagatcaccataagcgtccctgatatagcagcacacattttcacgtttccacttaaatcgttttgcacaaagtcttgcttcgctcagatgagatgagatatgatttcctagagatgtaaaaataagaatgaatgtggcgcccccttcttccagatgtaatagaaagctctgccctatcacaaggggggtgttgaagcgccccttgtgttttaactgtatttaactgagcacaagatgcacaagctgtggtgggaaaccctcagtttacctttggagtcttccctgcagatcgcagacctgtttccaggctgatgtttctggtgtgtaattgctagcgtttctgaagggttttcccaattgttttagccttgtgaagtattcttaattataacttgcctttcagcgatggtacatgacttgattcaacgtttggttctgaacttacacactgatgcgtttactcatctaacataatctgacagggcctcagcaagggagccatacatttttgtaacattttgatatgttttaatgcatctgacttagatcttactgaaataaagcacttttcaaagaaaaaaaaaaaaaaaaaacaaaaaaaaaaaaaaaaaaaaaaaaaaaaaaaaaaaaaaaaaaaaaaaaaaaaaaaaaaaaaaaaaaaaaaaaaaaaaaaaaaacaaaacaaaccagaaacgaagagggcgcggcggcgccggcaagtgacacgagttctcagcggcgcggcataatacacagtcagtcagcagatcgatcgcactcagatgatcggcgcgaacagaacaatgcgtcagtggcgaaaaaacaccgagacaggagaaggagatgaaacaacaagggaaggaggaaagacaaaaacgccgaactaggaatggaaccaacaccaagttgtggaggtcagacatacgcaacaaccacgacagagaaagacgagcgcacacaaccaatgttctcgaa

SEQ ID NO: 424483 - DNA, 5522 bp, Homo sapiens
  misc_feature (5436)..(5436): n is a, c, g, or t
ggggaggaagaaaggcgaaggcaaggcgaaggggtggagagtgatatgaagagcgagagaaaagagaggacagcggacgagcagatccggtatctggaatcccggcgcctagaacgtgtttttcgggagagcaaaggctgtgtctacggcaggctggggatatagcctctccttccgatgaaaagagaaaggaagaatggactacagccaccaaacgtccctagtcccatgtggacaagataaatacatttccaaaaatgaacttctcttgcatctgaagacctacaacttgtactatgaaggccagaatttacagctccggcaccgggaggaagaagacgagttcattgtggaggggctcctgaacatctcctggggcctgcgccggcccattcgcctgcagatgcaggatgacaacgaacgcattcgaccccctccatcctcctcctcctggcactctggctgtaacctgggggctcagggaaccactctgaagcccctgactgtgcccaaagttcagatctcagaggtggatgccccgccggagggtgaccagatgccaagctccacagactccaggggcctgaagcccctgcaggaggacaccccacagctgatgcgcacacgcagtgatgttggggtgcgtcgccgtggcaatgtgaggacgcctagtgaccagcggcgaatcagacgccaccgcttctccatcaacggccatttctacaaccataagacatccgtgttcacaccagcctatggctctgtcaccaacgtccgcatcaacagcaccatgaccaccccacaggtcctgaagctgctgctcaacaaatttaagattgagaattcagcagaggagtttgccttgtacgtggtccatacgagtggtgagaaacagaagctgaaggccaccgattacccgctgattgcccgaatcctccagggcccatgtgagcagatctccaaagtgttcctaatggagaaggaccaggtggaggaagtcacctacgacgtggcccagtatataaagttcgagatgccggtacttaaaagcttcattcagaagctccaggaggaagaagatcgggaagtaaagaagctgatgcgcaagtacaccgtgctccggctaatgattcgacagaggctggaggagatagccgagaccccagcaacaatctgagccatgagaacgaggggatctgggcaccccaggaaccgccattgcccataagacccccaggaagctaggcactttctttccatggaaacatttagacacaaacctccccagctccggccaagccatcatttgctacctggagctggatgtagaagtcagcagacagctccctatccctggacccctgccctccttttttctgctcacaaggacttttgattttagttataaggagggcccaaaatgtgtgtgtgtacatgtgtgtgcacacatggtacgtgtccatgtgcctacctgatactttcacatgtaattaaattccaggcaaccagcacaagagccgtgagcttggcacatgtgctgctcgtgagcaggaaaatcagaggagccactgatctgagtggtatttaggttgaaggaaagatttctcctctcaagtgccagggagcagccacacgtctgtctgtgtttagagagggaagagggttctccaggttcaccatttgggttgtttatatgttggtagaaattctccctgtatgcctagaaggatcagtgaatgtaagagccttggaaattaacaaaataacagccacataaccttgcggcaagtctgatggaaagaaaaagataaaccatccgtggggtagatgcaataagcccacgtatttttacactggaaacgttgattgttttaaatgacaaagacatatgtgatgttctatgtggaaacctgtgaagagtggattctgcctccatctctgcctccatggctacctttaggagacagagaagatcctgtgtgtttctctgtacccagctgacagcctgtctctatggcgcttccttgagtggaaggaaatgtctcaagaaacaaagatctcgctggtgcgtacacagtgctgaccagctagtgtggccagggcctggtggcctggtggccaggaagtttcaggttgaagggaaatgtcgaggctacctgcagatatgacaggtgccttgaacgcagcccatcttcatgtcatcaaaggtcttcctgcacttgaagctggggcgatgtttgcagtcaagaccattctttccaacctctgggttcttgcaagttgccctcaccttgtgtgtggagatgcattccaagaatgaagcctcatcttgctactgagtgtggggttcagggaagctctttaggccacctggtgaaggtgcatggggaggatggagcttctcctcagctcctctgagcagccacctatgtgatctttaaatccaaccccaatgggagaaaagggcaagaacagtctgtgccctgggactcctatcaggaagcttgacaggcagctgggcatcagtgcagctgatatcgtttgaggagggagacagatgcttggacctgggtgcctggctatggagattgaccaagcaagatcaggagctcctgatagcaggcgtctttgagcctagctggggtagaggcactgcccatctcttctccaccttctctccacagaatgtttgcagagctgggcagttgaggaaaggacagcccctggttggtgcctccaaaggaaggtggacttttttggtggagacgtttctgccctgggcaccctcctgcccccgattcatacctatggcttcttgagaaggctcacagctgtggtcttaacgtagactgcagaaagatggcatgcggcccctggcatttcgccaagggttttatagcaagtctccttcctccatagggacagcagcaccagccctgtggggcatggagtggaagcccagaagggcttctgcaagctgcacagaattggggtaagaagacgaagagtaggcaccgggagaggcttcctttgttacagctgggaaagaacagttctgtgaatgcaaacacctcctgagttttgcaattgagaaaatgatttggagaacttctcttctggtaatttttattttgaatgttcagggccttagttggccccagtaattctccttggaggacttgggagaagaatttccacaaagcaaactactaaccactagctcttattggacagcgatttctggcttataagagttctctttgatttgcactagcactacgatagtgttagatggggaaatactgcaacatgtccagttggccagatcactttccaagggagcgatactaaggcagactgagctttttaaagatgggaggtcaggaggtggaagcgagaggagatcccatctcacacaacacacttccacgtaatgcagaccacacttttccattttgtcctgccctcttgagaggtcatttctcacgtcctaagaacctgatcagaaattttggaagggttctttgaaatagcagcagttgaaacagagacactttgccacagtgtggagcagattttctcactggtatcacatggtcttgcagttttgaactcttcgaccgatttgtgggagtttatgtaattgcgtgcaatgaacctgaaattgtgtaaaggacaaaagaccagtttatagggttgggttttttttccaacttgtgaaaagcagtttagctgcatctgtctccccaccacccccaccccgggaggggcttatgttacaaggtgatcaagtgaaggaaaaacctgagcctatctggctgggatggtggaattaagcacaaggtcacattctctgtgatcacatgagagggaaggtgatgacttaaatggcagggggtggggattatcttggggagaggctgaaaagcacaaaagatagtcttccctgtacgtattggtgaagaacgtgcacaaggctggatggacttcaacttggagttgagttgaggcaagaggatttctggatattagtcacccatctgcaagaaaaatgctgaggcctcgggtcaagattttgatctgagacatgctgatgcttcaaggagaaatattttcacaatcctctcttccctcaccagaagagaacagtactctctcctagaaacctctaggtaaacacattttatcctaatatcggtagcatataatgcccccccccaaaatatctgttttccatgcaaaaaagtctcaacaagaagtctgtggagttgagtggttacttcaaagtgtcaggagagtgaagaaattggccacagaagagcaagaagctctcttaagaaaagggaattctctttaaagaaaccaccaccaacaacaaaacaaccaaaaaccatgttttatgtcaaagctctgtagcacagagaatgtggtgtcacagatacatcgccgagagaggtttctttctttcttttttttttttttggagacagagtctggttctgtttcccaggctggagtgcaggggtgggatctcagctcactgcaacatccgcctctggggttcaagtgattctcctgtctcagcctcccaagtagctggaattacagggacccgccaccacgcccggctaattttttggggtggttttagtagaggtggggtttcaccatcttggccaggctggtcttgaactcctgacctcgtgatccacccgcctaggcctcccaaagtgttgggattacaggcgtgagccactgtgcccagccaaaagagaaatttctacatgaacaaggcaatttcagtgtcttacagcggccaaaccatgacgtgaagaatgagataggagacaggagatcaccataagcgtccctgatatagcagcacacattttcacgtttccacttaaatcgttttgcacaaagtcttgcttcgctcagatgagatgagatatgatttcctagagatgtaaaaataagaatgaatgtggcgcccccttcttccagatgtaatagaaagctctgccctatcacaaggggggtgttgaagcgccccttgtgttttaactgtatttaactgagcacaagatgcacaagctgtggtgggaaaccctcagtttacctttggagtcttccctgcagatcgcagacctgtttccaggctgatgtttctggtgtgtaattgctagcgtttctgaagggttttcccaattgttttagccttgtgaagtattcttaattataacttgcctttcagcgatggtacatgacttgattcaacgtttggttctgaacttacacactgatgcgtttactcatctaacataatctgacagggcctcagcaagggagccatacatttttgtaacattttgatatgttttaatgcatctgacttagatcttactgaaataaagcacttttcaaagcttttttttntttttgtaagaaaaaacttgcgggccgcatttggagcctactgtgccaattcgccctattgtgagccgaatacaaataactgaaag

SEQ ID NO: 424484 - DNA, 4526 bp, Homo sapiens
tcctggtggtgctgctgaccatgccctgttctgtgcctacagtgaaggtgactggtgggaggctcggtctctcagctccggaaaaactggctgcattcccacctacgacgtggcccagtatataaagttcgagatgccggtacttaaaagcttcattcagaagctccaggaggaagaagatcgggaagtaaagaagctgatgcgcaagtacaccgtgctccggctaatgattcgacagaggctggaggagatagccgagaccccagcaacaatctgagccatgagaacgaggggatctgggcaccccaggaaccgccattgcccataagacccccaggaagctaggcactttctttccatggaaacatttagacacaaacctccccagctccggccaagccatcatttgctacctggagctggatgtagaagtcagcagacagctccctatccctggacccctgccctccttttttctgctcacaaggacttttgattttagttataaggagggcccaaaatgtgtgtgtgtacatgtgtgtgcacacatggtacgtgtccatgtgcctacctgatactttcacatgtaattaaattccaggcaaccagcacaagagccgtgagcttggcacatgtgctgctcgtgagcaggaaaatcagaggagccactgatctgagtggtatttaggttgaaggaaagatttctcctctcaagtgccagggagcagccacacgtctgtctgtgtttagagagggaagagggttctccaggttcaccatttgggttgtttatatgttggtagaaattctccctgtatgcctagaaggatcagtgaatgtaagagccttggaaattaacaaaataacagccacataaccttgcggcaagtctgatggaaagaaaaagataaaccatccgtggggtagatgcaataagcccacgtatttttacactggaaacgttgattgttttaaatgacaaagacatatgtgatgttctatgtggaaacctgtgaagagtggattctgcctccatctctgcctccatggctacctttaggagacagagaagatcctgtgtgtttctctgtacccagctgacagcctgtctctatggcgcttccttgagtggaaggaaatgtctcaagaaacaaagatctcgctggtgcgtacacagtgctgaccagctagtgtggccagggcctggtggcctggtggccaggaagtttcaggttgaagggaaatgtcgaggctacctgcagatatgacaggtgccttgaacgcagcccatcttcatgtcatcaaaggtcttcctgcacttgaagctggggcgatgtttgcagtcaagaccattctttccaacctctgggttcttgcaagttgccctcaccttgtgtgtggagatgcattccaagaatgaagcctcatcttgctactgagtgtggggttcagggaagctctttaggccacctggtgaaggtgcatggggaggatggagcttctcctcagctcctctgagcagccacctatgtgatctttaaatccaaccccaatgggagaaaagggcaagaacagtctgtgccctgggactcctatcaggaagcttgacaggcagctgggcatcagtgcagctgatatcgtttgaggagggagacagatgcttggacctgggtgcctggctatggagattgaccaagcaagatcaggagctcctgatagcaggcgtctttgagcctagctggggtagaggcactgcccatctcttctccaccttctctccacagaatgtttgcagagctgggcagttgaggaaaggacagcccctggttggtgcctccaaaggaaggtggacttttttggtggagacgtttctgccctgggcaccctcctgcccccgattcatacctatggcttcttgagaaggctcacagctgtggtcttaacgtagactgcagaaagatggcatgcggcccctggcatttcgccaagggttttatagcaagtctccttcctccatagggacagcagcaccagccctgtggggcatggagtggaagcccagaagggcttctgcaagctgcacagaattggggtaagaagacgaagagtaggcaccgggagaggcttcctttgttacagctgggaaagaacagttctgtgaatgcaaacacctcctgagttttgcaattgagaaaatgatttggagaacttctcttctggtaatttttattttgaatgttcagggccttagttggccccagtaattctccttggaggacttgggagaagaatttccacaaagcaaactactaaccactagctcttattggacagcgatttctggcttataagagttctctttgatttgcactagcactacgatagtgttagatggggaaatactgcaacatgtccagttggccagatcactttccaagggagcgatactaaggcagactgagctttttaaagatgggaggtcaggaggtggaagcgagaggagatcccatctcacacaacacacttccacgtaatgcagaccacacttttccattttgtcctgccctcttgagaggtcatttctcacgtcctaagaacctgatcagaaattttggaagggttctttgaaatagcagcagttgaaacagagacactttgccacagtgtggagcagattttctcactggtatcacatggtcttgcagttttgaactcttcgaccgatttgtgggagtttatgtaattgcgtgcaatgaacctgaaattgtgtaaaggacaaaagaccagtttatagggttgggttttttttccaacttgtgaaaagcagtttagctgcatctgtctccccaccacccccaccccgggaggggcttatgttacaaggtgatcaagtgaaggaaaaacctgagcctatctggctgggatggtggaattaagcacaaggtcacattctctgtgatcacatgagagggaaggtgatgacttaaatggcagggggtggggattatcttggggagaggctgaaaagcacaaaagatagtcttccctgtacgtattggtgaagaacgtgcacaaggctggatggacttcaacttggagttgagttgaggcaagaggatttctggatattagtcacccatctgcaagaaaaatgctgaggcctcgggtcaagattttgatctgagacatgctgatgcttcaaggagaaatattttcacaatcctctcttccctcaccagaagagaacagtactctctcctagaaacctctaggtaaacacattttatcctaatatcggtagcatataatgcccccccccaaaatatctgttttccatgcaaaaaagtctcaacaagaagtctgtggagttgagtggttacttcaaagtgtcaggagagtgaagaaattggccacagaagagcaagaagctctcttaagaaaagggaattctctttaaagaaaccaccaccaacaacaaaacaaccaaaaaccatgttttatgtcaaagctctgtagcacagagaatgtggtgtcacagatacatcgccgagagaggtttctttctttcttttttttttttttggagacagagtctggttctgtttcccaggctggagtgcaggggtgggatctcagctcactgcaacatccgcctctggggttcaagtgattctcctgtctcagcctcccaagtagctggaattacagggacccgccaccacgcccggctaattttttggggtggttttagtagaggtggggtttcaccatcttggccaggctggtcttgaactcctgacctcgtgatccacccgcctaggcctcccaaagtgttgggattacaggcgtgagccactgtgcccagccaaaagagaaatttctacatgaacaaggcaatttcagtgtcttacagcggccaaaccatgacgtgaagaatgagataggagacaggagatcaccataagcgtccctgatatagcagcacacattttcacgtttccacttaaatcgttttgcacaaagtcttgcttcgctcagatgagatgagatatgatttcctagagatgtaaaaataagaatgaatgtggcgcccccttcttccagatgtaatagaaagctctgccctatcacaaggggggtgttgaagcgccccttgtgttttaactgtatttaactgagcacaagatgcacaagctgtggtgggaaaccctcagtttacctttggagtcttccctgcagatcgcagacctgtttccaggctgatgtttctggtgtgtaattgctagcgtttctgaagggttttcccaattgttttagccttgtgaagtattcttaattataacttgcctttcagcgatggtacatgacttgattcaacgtttggttctgaacttacacactgatgcgtttactcatctaacataatctgacagggcctcagcaagggagccatacatttttgtaacattttgatatgttttaatgcatctgacttagatcttactgaaataaagcacttttcaaag

SEQ ID NO: 424485 - DNA, 5641 bp, Homo sapiens
  misc_feature (5340)..(5340): n is a, c, g, or t
  misc_feature (5344)..(5344): n is a, c, g, or t
  misc_feature (5348)..(5348): n is a, c, g, or t
  misc_feature (5375)..(5375): n is a, c, g, or t
  misc_feature (5383)..(5383): n is a, c, g, or t
  misc_feature (5391)..(5391): n is a, c, g, or t
  misc_feature (5417)..(5417): n is a, c, g, or t
  misc_feature (5462)..(5462): n is a, c, g, or t
ggggaggaagaaaggcgaaggcaaggcgaaggggtggagagtgatatgaagagcgagagaaaagagaggacagcggacgagcagatccggtatctggaatcccggcgcctagaacgtgtttttcgggagagcaaaggctgtgtctacggcaggctggggatatagcctctccttccgatgaaaagagaaaggaagaatggactacagccaccaaacgtccctagtcccatgtggacaagataaatacatttccaaaaatgaacttctcttgcatctgaagacctacaacttgtactatgaaggccagaatttacagctccggcaccgggaggaagaagacgagttcattgtggaggggctcctgaacatctcctggggcctgcgccggcccattcgcctgcagatgcaggatgacaacgaacgcattcgaccccctccatcctcctcctcctggcactctggctgtaacctgggggctcagggaaccactctgaagcccctgactgtgcccaaagttcagatctcagaggtggatgccccgccggagggtgaccagatgccaagctccacagactccaggggcctgaagcccctgcaggaggacaccccacagctgatgcgcacacgcagtgatgttggggtgcgtcgccgtggcaatgtgaggacgcctagtgaccagcggcgaatcagacgccaccgcttctccatcaacggccatttctacaaccataagacatccgtgttcacaccagcctatggctctgtcaccaacgtccgcatcaacagcaccatgaccaccccacaggtcctgaagctgctgctcaacaaatttaagattgagaattcagcagaggagtttgccttgtacgtggtccatacgagtggtgagaaacagaagctgaaggccaccgattacccgctgattgcccgaatcctccagggcccatgtgagcagatctccaaagtgttcctaatggagaaggaccaggtggaggaagtcacctacgacgtggcccagtatataaagttcgagatgccggtacttaaaagcttcattcagaagctccaggaggaagaagatcgggaagtaaagaagctgatgcgcaagtacaccgtgctccggctaatgattcgacagaggctggaggagatagccgagaccccagcaacaatctgagccatgagaacgaggggatctgggcaccccaggaaccgccattgcccataagacccccaggaagctaggcactttctttccatggaaacatttagacacaaacctccccagctccggccaagccatcatttgctacctggagctggatgtagaagtcagcagacagctccctatccctggacccctgccctccttttttctgctcacaaggacttttgattttagttataaggagggcccaaaatgtgtgtgtgtacatgtgtgtgcacacatggtacgtgtccatgtgcctacctgatactttcacatgtaattaaattccaggcaaccagcacaagagccgtgagcttggcacatgtgctgctcgtgagcaggaaaatcagaggagccactgatctgagtggtatttaggttgaaggaaagatttctcctctcaagtgccagggagcagccacacgtctgtctgtgtttagagagggaagagggttctccaggttcaccatttgggttgtttatatgttggtagaaattctccctgtatgcctagaaggatcagtgaatgtaagagccttggaaattaacaaaataacagccacataaccttgcggcaagtctgatggaaagaaaaagataaaccatccgtggggtagatgcaataagcccacgtatttttacactggaaacgttgattgttttaaatgacaaagacatatgtgatgttctatgtggaaacctgtgaagagtggattctgcctccatctctgcctccatggctacctttaggagacagagaagatcctgtgtgtttctctgtacccagctgacagcctgtctctatggcgcttccttgagtggaaggaaatgtctcaagaaacaaagatctcgctggtgcgtacacagtgctgaccagctagtgtggccagggcctggtggcctggtggccaggaagtttcaggttgaagggaaatgtcgaggctacctgcagatatgacaggtgccttgaacgcagcccatcttcatgtcatcaaaggtcttcctgcacttgaagctggggcgatgtttgcagtcaagaccattctttccaacctctgggttcttgcaagttgccctcaccttgtgtgtggagatgcattccaagaatgaagcctcatcttgctactgagtgtggggttcagggaagctctttaggccacctggtgaaggtgcatggggaggatggagcttctcctcagctcctctgagcagccacctatgtgatctttaaatccaaccccaatgggagaaaagggcaagaacagtctgtgccctgggactcctatcaggaagcttgacaggcagctgggcatcagtgcagctgatatcgtttgaggagggagacagatgcttggacctgggtgcctggctatggagattgaccaagcaagatcaggagctcctgatagcaggcgtctttgagcctagctggggtagaggcactgcccatctcttctccaccttctctccacagaatgtttgcagagctgggcagttgaggaaaggacagcccctggttggtgcctccaaaggaaggtggacttttttggtggagacgtttctgccctgggcaccctcctgcccccgattcatacctatggcttcttgagaaggctcacagctgtggtcttaacgtagactgcagaaagatggcatgcggcccctggcatttcgccaagggttttatagcaagtctccttcctccatagggacagcagcaccagccctgtggggcatggagtggaagcccagaagggcttctgcaagctgcacagaattggggtaagaagacgaagagtaggcaccgggagaggcttcctttgttacagctgggaaagaacagttctgtgaatgcaaacacctcctgagttttgcaattgagaaaatgatttggagaacttctcttctggtaatttttattttgaatgttcagggccttagttggccccagtaattctccttggaggacttgggagaagaatttccacaaagcaaactactaaccactagctcttattggacagcgatttctggcttataagagttctctttgatttgcactagcactacgatagtgttagatggggaaatactgcaacatgtccagttggccagatcactttccaagggagcgatactaaggcagactgagctttttaaagatgggaggtcaggaggtggaagcgagaggagatcccatctcacacaacacacttccacgtaatgcagaccacacttttccattttgtcctgccctcttgagaggtcatttctcacgtcctaagaacctgatcagaaattttggaagggttctttgaaatagcagcagttgaaacagagacactttgccacagtgtggagcagattttctcactggtatcacatggtcttgcagttttgaactcttcgaccgatttgtgggagtttatgtaattgcgtgcaatgaacctgaaattgtgtaaaggacaaaagaccagtttatagggttgggttttttttccaacttgtgaaaagcagtttagctgcatctgtctccccaccacccccaccccgggaggggcttatgttacaaggtgatcaagtgaaggaaaaacctgagcctatctggctgggatggtggaattaagcacaaggtcacattctctgtgatcacatgagagggaaggtgatgacttaaatggcagggggtggggattatcttggggagaggctgaaaagcacaaaagatagtcttccctgtacgtattggtgaagaacgtgcacaaggctggatggacttcaacttggagttgagttgaggcaagaggatttctggatattagtcacccatctgcaagaaaaatgctgaggcctcgggtcaagattttgatctgagacatgctgatgcttcaaggagaaatattttcacaatcctctcttccctcaccagaagagaacagtactctctcctagaaacctctaggtaaacacattttatcctaatatcggtagcatataatgcccccccccaaaatatctgttttccatgcaaaaaagtctcaacaagaagtctgtggagttgagtggttacttcaaagtgtcaggagagtgaagaaattggccacagaagagcaagaagctctcttaagaaaagggaattctctttaaagaaaccaccaccaacaacaaaacaaccaaaaaccatgttttatgtcaaagctctgtagcacagagaatgtggtgtcacagatacatcgccgagagaggtttctttctttcttttttttttttttggagacagagtctggttctgtttcccaggctggagtgcaggggtgggatctcagctcactgcaacatccgcctctggggttcaagtgattctcctgtctcagcctcccaagtagctggaattacagggacccgccaccacgcccggctaattttttggggtggttttagtagaggtggggtttcaccatcttggccaggctggtcttgaactcctgacctcgtgatccacccgcctaggcctcccaaagtgttgggattacaggcgtgagccactgtgcccagccaaaagagaaatttctacatgaacaaggcaatttcagtgtcttacagcggccaaaccatgacgtgaagaatgagataggagacaggagatcaccataagcgtccctgatatagcagcacacattttcacgtttccacttaaatcgttttgcacaaagtcttgcttcgctcagatgagatgagatatgatttcctagagatgtaaaaataagaatgaatgtggcgcccccttcttccagatgtaatagaaagctctgccctatcacaaggggggtgttgaagcgccccttgtgttttaactgtatttaactgagcacaagatgcacaagctgtggtgggaaaccctcagtttacctttggagtcttccctgcagatcgcagacctgtttccaggctgatgtttctggtgtgtaattgctagcgtttctgaagggttttcccaattgttttagccttgtgaagtattcttaattataacttgcctttcagcgatggtacatgacttgattcaacgtttggttctgaacttacacactgatgcgtttactcatctaacataatctgacagggcctcngcantgancccaccgggaggcgccaaaccagagcncggagccntggctccnagcatgagcagcacagggccgtgggncagtccggggcctccagagcacaggccacacgcggctacaagctnggggagtgccaggggcagtttcctttcagcgttaaacaccgtgccacaccaggacccgagatcccacactgtggtgcacagaaggaaccaaatgaggccgggcccggtggctcacgcctgtcatcccagcattctgggagccgagccgtgatcatgaggtcaggagattgagaccatcc

SEQ ID NO: 424486 - DNA, 4128 bp, Homo sapiens
ggggaggaagaaaggcgaaggcaaggcgaaggggtggagagtgatatgaagagcgagagaaaagagaggacagcggacgagcagatccggtatctggaatcccggcgcctagaacgtgtttttcgggagagcaaaggctgtgtctacggcaggctggggatatagcctctccttccgatgaaaagagaaaggaagaatggactacagccaccaaacgtccctagtcccatgtggacaagataaatacatttccaaaaatgaacttctcttgcatctgaagacctacaacttgtactatgaaggccagaatttacagctccggcaccgggaggaagaagacgagttcattgtggaggggctcctgaacatctcctggggcctgcgccggcccattcgcctgcagatgcaggatgacaacgaacgcattcgaccccctccatcctcctcctcctggcactctggctgtaacctgggggctcagggaaccactctgaagcccctgactgtgcccaaagttcagatctcagaggtggatgccccgccggagggtgaccagatgccaagctccacagactccaggggcctgaagcccctgcaggaggacaccccacagctgatgcgcacacgcagtgatgttggggtgcgtcgccgtggcaatgtgaggacgcctagtgaccagcggcgaatcagacgccaccgcttctccatcaacggccatttctacaaccataagacatccgtgttcacaccagcctatggctctgtcaccaacgtccgcatcaacagcaccatgaccaccccacaggtcctgaagctgctgctcaacaaatttaagattgagaattcagcagaggagtttgccttgtacgtggtccatacgagtggtgagaaacagaagctgaaggccaccgattacccgctgattgcccgaatcctccagggcccatgtgagcagatctccaaagtgttcctaatggagaaggaccaggtggaggaagtcacctacgacgtggcccagtatataaagttcgagatgccggtacttaaaagcttcattcagaagctccaggaggaagaagatcgggaagtaaagaagctgatgcgcaagtacaccgtgctccggctaatgattcgacagaggctggaggagatagccgagaccccagcaacaatctgagccatgagaacgaggggatctgggcaccccaggaaccgccattgcccataagacccccaggaagctaggcactttctttccatggaaacatttagacacaaacctccccagctccggccaagccatcatttgctacctggagctggatgtagaagtcagcagacagctccctatccctggacccctgccctccttttttctgctcacaaggacttttgattttagttataaggagggcccaaaatgtgtgtgtgtacatgtgtgtgcacacatggtacgtgtccatgtgcctacctgatactttcacatgtaattaaattccaggcaaccagcacaagagccgtgagcttggcacatgtgctgctcgtgagcaggaaaatcagaggagccactgatctgagtggtatttaggttgaaggaaagatttctcctctcaagtgccagggagcagccacacgtctgtctgtgtttagagagggaagagggttctccaggttcaccatttgggttgtttatatgttggtagaaattctccctgtatgcctagaaggatcagtgaatgtaagagccttggaaattaacaaaataacagccacataaccttgcggcaagtctgatggaaagaaaaagataaaccatccgtggggtagatgcaataagcccacgtatttttacactggaaacgttgattgttttaaatgacaaagacatatgtgatgttctatgtggaaacctgtgaagagtggattctgcctccatctctgcctccatggctacctttaggagacagagaagatcctgtgtgtttctctgtacccagctgacagcctgtctctatggcgcttccttgagtggaaggaaatgtctcaagaaacaaagatctcgctggtgcgtacacagtgctgaccagctagtgtggccagggcctggtggcctggtggccaggaagtttcaggttgaagggaaatgtcgaggctacctgcagatatgacaggtgccttgaacgcagcccatcttcatgtcatcaaaggtcttcctgcacttgaagctggggcgatgtttgcagtcaagaccattctttccaacctctgggttcttgcaagttgccctcaccttgtgtgtggagatgcattccaagaatgaagcctcatcttgctactgagtgtggggttcagggaagctctttaggccacctggtgaaggtgcatggggaggatggagcttctcctcagctcctctgagcagccacctatgtgatctttaaatccaaccccaatgggagaaaagggcaagaacagtctgtgccctgggactcctatcaggaagcttgacaggcagctgggcatcagtgcagctgatatcgtttgaggagggagacagatgcttggacctgggtgcctggctatggagattgaccaagcaagatcaggagctcctgatagcaggcgtctttgagcctagctggggtagaggcactgcccatctcttctccaccttctctccacagaatgtttgcagagctgggcagttgaggaaaggacagcccctggttggtgcctccaaaggaaggtggacttttttggtggagacgtttctgccctgggcaccctcctgcccccgattcatacctatggcttcttgagaaggctcacagctgtggtcttaacgtagactgcagaaagatggcatgcggcccctggcatttcgccaagggttttatagcaagtctccttcctccatagggacagcagcaccagccctgtggggcatggagtggaagcccagaagggcttctgcaagctgcacagaattggggtaagaagacgaagagtaggcaccgggagaggcttcctttgttacagctgggaaagaacagttctgtgaatgcaaacacctcctgagttttgcaattgagaaaatgatttggagaacttctcttctggtaatttttattttgaatgttcagggccttagttggccccagtaattctccttggaggacttgggagaagaatttccacaaagcaaactactaaccactagctcttattggacagcgatttctggcttataagagttctctttgatttgcactagcactacgatagtgttagatggggaaatactgcaacatgtccagttggccagatcactttccaagggagcgatactaaggcagactgagctttttaaagatgggaggtcaggaggtggaagcgagaggagatcccatctcacacaacacacttccacgtaatgcagaccacacttttccattttgtcctgccctcttgagaggtcatttctcacgtcctaagaacctgatcagaaattttggaagggttctttgaaatagcagcagttgaaacagagacactttgccacagtgtggagcagattttctcactggtatcacatggtcttgcagttttgaactcttcgaccgatttgtgggagtttatgtaattgcgtgcaatgaacctgaaattgtgtaaaggacaaaagaccagtttatagggttgggttttttttccaacttgtgaaaagcagtttagctgcatctgtctccccaccacccccaccccgggaggggcttatgttacaaggtgatcaagtgaaggaaaaacctgagcctatctggctgggatggtggaattaagcacaaggtcacattctctgtgatcacatgagagggaaggtgatgacttaaatggcagggggtggggattatcttggggagaggctgaaaagcacaaaagatagtcttccctgtacgtattggtgaagaacgtgcacaaggctggatggacttcaacttggagttgagttgaggcaagaggatttctggatattagtcacccctcagcaagggagccatacatttttgtaacattttgatatgttttaatgcatctgacttagatcttactgaaataaagcacttttcaaag

SEQ ID NO: 424487 - DNA, 3963 bp, Homo sapiens
ggggaggaagaaaggcgaaggcaaggcgaaggggtggagagtgatatgaagagcgagagaaaagagaggacagcggacgagcagatccggtatctggaatcccggcgcctagaacgtgtttttcgggagagcaaaggctgtgtctacggcaggctggggatatagcctctccttccgatgaaaagagaaaggaagaatggactacagccaccaaacgtccctagtcccatgtggacaagataaatacatttccaaaaatgaacttctcttgcatctgaagacctacaacttgtactatgaaggccagaatttacagctccggcaccgggaggaagaagacgagttcattgtggaggggctcctgaacatctcctggggcctgcgccggcccattcgcctgcagatgcaggatgacaacgaacgcattcgaccccctccatcctcctcctcctggcactctggctgtaacctgggggctcagggaaccactctgaagcccctgactgtgcccaaagttcagatctcagaggtggatgccccgccggagggtgaccagatgccaagctccacagactccaggggcctgaagcccctgcaggaggacaccccacagctgatgcgcacacgcagtgatgttggggtgcgtcgccgtggcaatgtgaggacgcctagtgaccagcggcgaatcagacgccaccgcttctccatcaacggccatttctacaaccataagacatccgtgttcacaccagcctatggctctgtcaccaacgtccgcatcaacagcaccatgaccaccccacaggtcctgaagctgctgctcaacaaatttaagattgagaattcagcagaggagtttgccttgtacgtggtccatacgagtggtgagaaacagaagctgaaggccaccgattacccgctgattgcccgaatcctccagggcccatgtgagcagatctccaaagtgttcctaatggagaaggaccaggtggaggaagtcacctacgacgtggcccagtatataaagttcgagatgccggtacttaaaagcttcattcagaagctccaggaggaagaagatcgggaagtaaagaagctgatgcgcaagtacaccgtgctccggctaatgattcgacagaggctggaggagatagccgagaccccagcaacaatctgagccatgagaacgaggggatctgggcaccccaggaaccgccattgcccataagacccccaggaagctaggcactttctttccatggaaacatttagacacaaacctccccagctccggccaagccatcatttgctacctggagctggatgtagaagtcagcagacagctccctatccctggacccctgccctccttttttctgctcacaaggacttttgattttagttataaggagggcccaaaatgtgtgtgtgtacatgtgtgtgcacacatggtacgtgtccatgtgcctacctgatactttcacatgtaattaaattccaggcaaccagcacaagagccgtgagcttggcacatgtgctgctcgtgagcaggaaaatcagaggagccactgatctgagtggtatttaggttgaaggaaagatttctcctctcaagtgccagggagcagccacacgtctgtctgtgtttagagagggaagagggttctccaggttcaccatttgggttgtttatatgttggtagaaattctccctgtatgcctagaaggatcagtgaatgtaagagccttggaaattaacaaaataacagccacataaccttgcggcaagtctgatggaaagaaaaagataaaccatccgtggggtagatgcaataagcccacgtatttttacactggaaacgttgattgttttaaatgacaaagacatatgtgatgttctatgtggaaacctgtgaagagtggattctgcctccatctctgcctccatggctacctttaggagacagagaagatcctgtgtgtttctctgtacccagctgacagcctgtctctatggcgcttccttgagtggaaggaaatgtctcaagaaacaaagatctcgctggtgcgtacacagtgctgaccagctagtgtggccagggcctggtggcctggtggccaggaagtttcaggttgaagggaaatgtcgaggctacctgcagatatgacaggtgccttgaacgcagcccatcttcatgtcatcaaaggtcttcctgcacttgaagctggggcgatgtttgcagtcaagaccattctttccaacctctgggttcttgcaagttgccctcaccttgtgtgtggagatgcattccaagaatgaagcctcatcttgctactgagtgtggggttcagggaagctctttaggccacctggtgaaggtgcatggggaggatggagcttctcctcagctcctctgagcagccacctatgtgatctttaaatccaaccccaatgggagaaaagggcaagaacagtctgtgccctgggactcctatcaggaagcttgacaggcagctgggcatcagtgcagctgatatcgtttgaggagggagacagatgcttggacctgggtgcctggctatggagattgaccaagcaagatcaggagctcctgatagcaggcgtctttgagcctagctggggtagaggcactgcccatctcttctccaccttctctccacagaatgtttgcagagctgggcagttgaggaaaggacagcccctggttggtgcctccaaaggaaggtggacttttttggtggagacgtttctgccctgggcaccctcctgcccccgattcatacctatggcttcttgagaaggctcacagctgtggtcttaacgtagactgcagaaagatggcatgcggcccctggcatttcgccaagggttttatagcaagtctccttcctccatagggacagcagcaccagccctgtggggcatggagtggaagcccagaagggcttctgcaagctgcacagaattggggtaagaagacgaagagtaggcaccgggagaggcttcctttgttacagctgggaaagaacagttctgtgaatgcaaacacctcctgagttttgcaattgagaaaatgatttggagaacttctcttctggtaatttttattttgaatgttcagggccttagttggccccagtaattctccttggaggacttgggagaagaatttccacaaagcaaactactaaccactagctcttattggacagcgatttctggcttataagagttctctttgatttgcactagcactacgatagtgttagatggggaaatactgcaacatgtccagttggccagatcactttccaagggagcgatactaaggcagactgagctttttaaagatgggaggtcaggaggtggaagcgagaggagatcccatctcacacaacacacttccacgtaatgcagaccacacttttccattttgtcctgccctcttgagaggtcatttctcacgtcctaagaacctgatcagaaattttggaagggttctttgaaatagcagcagttgaaacagagacactttgccacagtgtggagcagattttctcactggtatcacatggtcttgcagttttgaactcttcgaccgatttgtgggagtttatgtaattgcgtgcaatgaacctgaaattgtgtaaaggacaaaagaccagtttatagggttgggttttttttccaacttgtgaaaagcagtttagctgcatctgtctccccaccacccccaccccgggaggggcttatgttacaaggtgatcaagtgaaggaaaaacctgagcctatctggctgggatggtggaattaagcacaaggtcacattctctgtgatcacatgagagggaaggtgatgacttaaatggcagggggagactaatatccagaaatcctcttacctcgagtctacgcgcaacgtgaagcccactccagcctag

SEQ ID NO: 424488 - DNA, 3169 bp, Homo sapiens
acatgattttcttctcgggctgcaaacaaagggaagcctgcaacaagttaagctgaagaccgaagcaagagctggttcagagcctgccagtggagacactgggcccggcatccaggatggacccagaatctgagagagccctgcaggcccctcacagcccctccaagacagatgggaaagaattagctgggaccatggatggagaagggacgctcttccagactgaaagccctcagtctggcagcattctaacagaggagactgaggtcaagggcaccctggaaggtgatgtttgtggtgtggagcctcctggcccaggagacacagtagtccagggagacctgcaggagaccaccgtggtgacaggcctgggaccagacacacaggacctggaaggccagagccctccacagagcctgccttcaacccccaaagcagcttggatcagggaggagggccgctgctccagcagtgacgatgacaccgacgtggacatggagggtctgcggagacggcggggccgggaggccggcccacctcagcccatggtgcccctggctgtggagaaccaggctgggggtgagggtgcaggcggggagctgggcatctccctcaacatgtgcctccttggggccctggttctgcttggcctgggggtcctcctcttctcaggtggcctctcagagtctgagactgggcccatggaggaagtggagcggcaggtcctcccagaccccgaggtgctggaagctgtgggggacaggcaggatgggctaagggaacagctgcaggccccagtgcctcctgacagtgtccccagcctgcaaaacatgggtcttctgctggacaagctggccaaggagaaccaggacatccggctgctgcaggcccagctgcaggcccaaaaggaagagcttcagagcctgatgcaccagcccaaagggctagaggaggagaatgcccagctccggggggctctgcagcagggcgaagccttccagcgggctctggagtcagagctgcagcagctgcgggcccggctccaggggctggaggccgactgtgtccggggcccagatggggtgtgcctcagtggggatagaggcccacagggtgacaaggccatcagggagcaaggccccagggagcaggagccagaactcagcttcctgaagcagaaggaacagctggaggctgaggcacaggcattaaggcaagagttagagaggcagcgacggctgctggggtctgtacagcaggatctggagaggagcttgcaggatgccagccgcggggacccagctcatgctggcttggctgagctgggccacagattggcccagaaactgcagggcctggagaactggggccaggaccctggggtctctgccaatgcctcaaaggcctggcaccagaagtcccacttccagaattctagggagtggagtggaaaggaaaagtggtgggatgggcagagagaccggaaggctgagcactggaaacataagaaggaagaatctggccgggaaaggaagaagaactggggaggtcaggaggacagggagccagcaggaaggtggaaggagggcaggccaagggtggaggagtcggggagcaagaaggagggcaagcgacagggcccgaaggaacccccaaggaaaagtggtagcttccactcctctggagaaaagcagaagcaacctcggtggagggaagggactaaggacagccatgaccccctgccatcctgggcagagctgttgaggcccaagtaccgggcaccccagggctgctcaggtgtggacgagtgtgcccggcaggagggcctgactttctttggcacagagctagccccagtgcggcaacaggagctggcctctctgctaagaacatacttggcacggctgccctgggctgggcagctgaccaaggagctacccctctcacctgctttctttggtgaggatggcatcttccgtcatgaccgcctccgcttccgggattttgtggatgccctggaggacagcttggaggaggtggctgtgcaacagacaggtgatgatgatgaagtagatgactttgaggacttcatcttcagccacttctttggagacaaagcactgaagaagaggtcagggaagaaggacaagcactcacagagcccaagagctgcggggcccagggaggggcacagccatagccaccaccaccaccaccggggctgacaccctgccccacagggaatggccttggcctggcccagcccaagatcccagcgttatctaactcctggagggtggactctgtcctggcttgtttggtgtcctcagatatctttcacacagtagagcaaaatcaccagccctgcactgatgtcactttatgtagaaaaaggccttagctggacctgtgttgccgtctatgcaaatgcatgcaaatactccaggccctgggatgtgggcttgtgttttgtcactgtgaagggggagatgggagaggagcctgttttggggtggggtctggggaaggcaatctgattctgaagctaaagagctttcatcctcttgagtgtatgtccccatagtgggccccttgacccacatgctgaccggtgccttgggatttgactagagttgctggctcgaggcccagcacgaggacttaccctggggttttgttaggtttggaagcagctgtccctagggggtgaagtccccccccttttttttttttacccctgcttctcccacggcttcacctccctatgtgaactgtagactcagatcccaataaagtgctgttgcagctatgatgctaggtggtttctaagcacaggggacaccccacaccccctgcctgaatggatgggtccatcccaggcactggtacttgcccccttgttctgtatccccctttgcccttgccttgcccttccaacaaaccctaggcccttgagaagctgatacttctccttttgctcacagctgccttggccccacccctgggagatgtagcaaattgagtgtgggttttggagtctgagcctcaggctcaaatccaggccaagtgatcttgggcaagttaatctctgggaactttgggtttcttatcctcaaaaaaggcgatggaagggctggggaagtgattaaataaaagcaacgcaagaaaa

SEQ ID NO: 424489 - DNA, 341 bp, Homo sapiens
tggatctgagctggttggtcatgctgctgctctgcatgtctcactactcaatccctccccgagggcctcatcagactcctctgtctctgtccttaggtggcctctcagagtctgagactggtgagtagggaggagcctgtcttgtgctggggagttgtatgtattctctggttctgtgggtcaggagtaggggtgctgggggctcacatttatttctcagttagtggccttgtcagctgttcagggtgccccttggccctttatctcaccaaaccgctcagccacagggtgggtcctgagcaggagtggtggctgtgtgaatgggaaggtgtggggagaat

SEQ ID NO: 424490 - DNA, 3256 bp, Homo sapiens
acatgattttcttctcgggctgcaaacaaagggaagcctgcaacaagttaagctgaagaccgaagcaagagctggttcaggtggcagccacagcagcctcagggacctcagcaactatggcctcctgcccagactctgataatagctgggtgcttgctggctccgagagcctgccagtggagacactgggcccggcatccaggatggacccagaatctgagagagccctgcaggcccctcacagcccctccaagacagatgggaaagaattagctgggaccatggatggagaagggacgctcttccagactgaaagccctcagtctggcagcattctaacagaggagactgaggtcaagggcaccctggaaggtgatgtttgtggtgtggagcctcctggcccaggagacacagtagtccagggagacctgcaggagaccaccgtggtgacaggcctgggaccagacacacaggacctggaaggccagagccctccacagagcctgccttcaacccccaaagcagcttggatcagggaggagggccgctgctccagcagtgacgatgacaccgacgtggacatggagggtctgcggagacggcggggccgggaggccggcccacctcagcccatggtgcccctggctgtggagaaccaggctgggggtgagggtgcaggcggggagctgggcatctccctcaacatgtgcctccttggggccctggttctgcttggcctgggggtcctcctcttctcaggtggcctctcagagtctgagactgggcccatggaggaagtggagcggcaggtcctcccagaccccgaggtgctggaagctgtgggggacaggcaggatgggctaagggaacagctgcaggccccagtgcctcctgacagtgtccccagcctgcaaaacatgggtcttctgctggacaagctggccaaggagaaccaggacatccggctgctgcaggcccagctgcaggcccaaaaggaagagcttcagagcctgatgcaccagcccaaagggctagaggaggagaatgcccagctccggggggctctgcagcagggcgaagccttccagcgggctctggagtcagagctgcagcagctgcgggcccggctccaggggctggaggccgactgtgtccggggcccagatggggtgtgcctcagtggggatagaggcccacagggtgacaaggccatcagggagcaaggccccagggagcaggagccagaactcagcttcctgaagcagaaggaacagctggaggctgaggcacaggcattaaggcaagagttagagaggcagcgacggctgctggggtctgtacagcaggatctggagaggagcttgcaggatgccagccgcggggacccagctcatgctggcttggctgagctgggccacagattggcccagaaactgcagggcctggagaactggggccaggaccctggggtctctgccaatgcctcaaaggcctggcaccagaagtcccacttccagaattctagggagtggagtggaaaggaaaagtggtgggatgggcagagagaccggaaggctgagcactggaaacataagaaggaagaatctggccgggaaaggaagaagaactggggaggtcaggaggacagggagccagcaggaaggtggaaggagggcaggccaagggtggaggagtcggggagcaagaaggagggcaagcgacagggcccgaaggaacccccaaggaaaagtggtagcttccactcctctggagaaaagcagaagcaacctcggtggagggaagggactaaggacagccatgaccccctgccatcctgggcagagctgttgaggcccaagtaccgggcaccccagggctgctcaggtgtggacgagtgtgcccggcaggagggcctgactttctttggcacagagctagccccagtgcggcaacaggagctggcctctctgctaagaacatacttggcacggctgccctgggctgggcagctgaccaaggagctacccctctcacctgctttctttggtgaggatggcatcttccgtcatgaccgcctccgcttccgggattttgtggatgccctggaggacagcttggaggaggtggctgtgcaacagacaggtgatgatgatgaagtagatgactttgaggacttcatcttcagccacttctttggagacaaagcactgaagaagaggtcagggaagaaggacaagcactcacagagcccaagagctgcggggcccagggaggggcacagccatagccaccaccaccaccaccggggctgacaccctgccccacagggaatggccttggcctggcccagcccaagatcccagcgttatctaactcctggagggtggactctgtcctggcttgtttggtgtcctcagatatctttcacacagtagagcaaaatcaccagccctgcactgatgtcactttatgtagaaaaaggccttagctggacctgtgttgccgtctatgcaaatgcatgcaaatactccaggccctgggatgtgggcttgtgttttgtcactgtgaagggggagatgggagaggagcctgttttggggtggggtctggggaaggcaatctgattctgaagctaaagagctttcatcctcttgagtgtatgtccccatagtgggccccttgacccacatgctgaccggtgccttgggatttgactagagttgctggctcgaggcccagcacgaggacttaccctggggttttgttaggtttggaagcagctgtccctagggggtgaagtccccccccttttttttttttacccctgcttctcccacggcttcacctccctatgtgaactgtagactcagatcccaataaagtgctgttgcagctatgatgctaggtggtttctaagcacaggggacaccccacaccccctgcctgaatggatgggtccatcccaggcactggtacttgcccccttgttctgtatccccctttgcccttgccttgcccttccaacaaaccctaggcccttgagaagctgatacttctccttttgctcacagctgccttggccccacccctgggagatgtagcaaattgagtgtgggttttggagtctgagcctcaggctcaaatccaggccaagtgatcttgggcaagttaatctctgggaactttgggtttcttatcctcaaaaaaggcgatggaagggctggggaagtgattaaataaaagcaacgcaagaaaa

SEQ ID NO: 424491 - DNA, 3679 bp, Homo sapiens
acatgattttcttctcgggctgcaaacaaagggaagcctgcaacaagttaagctgaagaccgaagcaagagctggttcaggtggcagccacagcagcctcagggacctcagcaactatggcctcctgcccagactctgataatagctgggtgcttgctggctccgagagcctgccagtggagacactgggcccggcatccaggatggacccagaatctgagagagccctgcaggcccctcacagcccctccaagacagatgggaaagaattagctgggaccatggatggagaagggacgctcttccagactgaaagccctcagtctggcagcattctaacagaggagactgaggtcaagggcaccctggaaggtgatgtttgtggtgtggagcctcctggcccaggagacacagtagtccagggagacctgcaggagaccaccgtggtgacaggcctgggaccagacacacaggacctggaaggccagagccctccacagagcctgccttcaacccccaaagcagcttggatcagggaggagggccgctgctccagcagtgacgatgacaccgacgtggacatggagggtctgcggagacggcggggccgggaggccggcccacctcagcccatggtgcccctggctgtggagaaccaggctgggggtgagggtgcaggcggggagctgggcatctccctcaacatgtgcctccttggggccctggttctgcttggcctgggggtcctcctcttctcaggtggcctctcagagtctgagactgggcccatggaggaagtggagcggcaggtcctcccagaccccgaggtgctggaagctgtgggggacaggcaggatgggctaagggaacagctgcaggccccagtgcctcctgacagtgtccccagcctgcaaaacatgggtcttctgctggacaagctggccaaggagaaccaggacatccggctgctgcaggcccagctgcaggcccaaaaggaagagcttcagagcctgatgcaccagcccaaagggctagaggaggagaatgcccagctccggggggctctgcagcagggcgaagccttccagcgggctctggagtcagagctgcagcagctgcgggcccggctccaggggctggaggccgactgtgtccggggcccagatggggtgtgcctcagtggggatagaggcccacagggtgacaaggccatcagggagcaaggccccagggagcaggagccagaactcagcttcctgaagcagaaggaacagctggaggctgaggcacaggcattaaggcaagagttagagaggcagcgacggctgctggggtctgtacagcaggatctggagaggagcttgcaggatgccagccgcggggacccagctcatgctggcttggctgagctgggccacagattggcccagaaactgcagggcctggagaactggggccaggaccctggggtctctgccaatgcctcaaaggcctggcaccagaagtcccacttccagaattctagggagtggagtggaaaggaaaagtggtgggatgggcagagagaccggaaggctgagcactggaaacataagaaggaagaatctggccgggaaaggaagaagaactggggaggtcaggaggacagggagccagcaggaaggtggaaggagggcaggccaagggtggaggagtcggggagcaagaaggagggcaagcgacagggcccgaaggaacccccaaggaaaagtggtagcttccactcctctggagaaaagcagaagcaacctcggtggagggaagggactaaggacagccatgaccccctgccatcctgggcagagctgttgaggcccaagtaccgggcaccccagggctgctcaggtgtggacgagtgtgcccggcaggagggcctgactttctttggcacagagctagccccagtgcggcaacaggagctggcctctctgctaagaacatacttggcacggctgccctgggctgggcagctgaccaaggagctacccctctcacctgctttctttggtgaggatggcatcttccgtcatgaccgcctccgcttccgggattttgtggatgccctggaggacagcttggaggaggtggctgtgcaacagacaggtgatgatgatgaagtagatgactttgaggacttcatcttcagccacttctttggagacaaagcactgaagaagaggtcagggaagaaggacaagcactcacagagcccaagagctgcggggcccagggaggggcacagccatagccaccaccaccaccaccggggctgacaccctgccccacagggaatggccttggcctggcccagcccaagatcccagcgttatctaactcctggagggtggactctgtcctggcttgtttggtgtcctcagatatctttcacacagtagagcaaaatcaccagccctgcactgatgtcactttatgtagaaaaaggccttagctggacctgtgttgccgtctatgcaaatgcatgcaaatactccaggccctgggatgtgggcttgtgttttgtcactgtgaagggggagatgggagaggagcctgttttggggtggggtctggggaaggcaatctgattctgaagctaaagagctttcatcctcttgagtgtatgtccccatagtgggccccttgacccacatgctgaccggtgccttgggatttgactagagttgctggctcgaggcccagcacgaggacttaccctggggttttgttaggtttggaagcagctgtccctagggggtgaagtccccccccttttttttttttacccctgcttctcccacggcttcacctccctatgtgaactgtagactcagatcccaataaagtgctgttgcagctatgatgctaggtggtttctaagcacaggggacaccccacaccccctgcctgaatggatgggtccatcccaggcactggtacttgcccccttgttctgtatccccctttgcccttgccttgcccttccaacaaaccctaggcccttgagaagctgatacttctccttttgctcacagctgccttggccccacccctgggagatgtagcaaattgagtgtgggttttggagtctgagcctcaggctcaaatccaggccaagtgatcttgggcaagttaatctctgggaactttgggtttcttatcctcaaaaaaggcgatggaagggctggggaagtgattaaataaaagcaacgcaagaaaaaaaaaaaaaaaaaaaaaaaaaaaaaaaaaaaaaaaaaaaaaaaaaaaaaaaccaaataaaaaaaaaaaaacaataaaaataaaatattataatatatatattaaacaattatatcacttttaaaaactttaatcatcttccacttataaactctcttaccataactaaactttccctcatatctctttatccccatatttctctattaacactttaattacttcattcaaattctatattcttttcttacacttttcgcatatcactttatattattatatcttacttcttataatatcttcatactatctttatatattacctttccaatccataaacttctctctatcttttctaccattcttccttctatttccacataatcacactcttttatcttttcatttcttacctccacttcat

SEQ ID NO: 424492 - DNA, 3515 bp, Homo sapiens
acatgattttcttctcgggctgcaaacaaagggaagcctgcaacaagttaagctgaagaccgaagcaagagctggttcaggtggcagccacagcagcctcagggacctcagcaactatggcctcctgcccagactctgataatagctgggtgcttgctggctccgagagcctgccagtggagacactgggcccggcatccaggatggacccagaatctgagagagccctgcaggcccctcacagcccctccaagacagatgggaaagaattagctgggaccatggatggagaaggtactgggccctgcttaggacatagcttaccggacaaagctattctccatattttggggtttctcagtttcctcagagaaagggaggctggttcgttttagttcctccattaatctcagttgacaaactccttttctcattccatcctggctttttcctgcctcttccaacctggtaggggcccgtgggatggacagagggctgcaaaggaaattcagctggggcagtgggtttttctgcgccttttctcctaccgcagggacgctcttccagactgaaagccctcagtctggcagcattctaacagaggagactgaggtcaagggcaccctggaaggtgatgtttgtggtgtggagcctcctggcccaggagacacagtagtccagggagacctgcaggagaccaccgtggtgacaggcctgggaccagacacacaggacctggaaggccagagccctccacagagcctgccttcaacccccaaagcagcttggatcagggaggagggccgctgctccagcagtgacgatgacaccgacgtggacatggagggtctgcggagacggcggggccgggaggccggcccacctcagcccatggtgcccctggctgtggagaaccaggctgggggtgagggtgcaggcggggagctgggcatctccctcaacatgtgcctccttggggccctggttctgcttggcctgggggtcctcctcttctcaggtggcctctcagagtctgagactgggcccatggaggaagtggagcggcaggtcctcccagaccccgaggtgctggaagctgtgggggacaggcaggatgggctaagggaacagctgcaggccccagtgcctcctgacagtgtccccagcctgcaaaacatgggtcttctgctggacaagctggccaaggagaaccaggacatccggctgctgcaggcccagctgcaggcccaaaaggaagagcttcagagcctgatgcaccagcccaaagggctagaggaggagaatgcccagctccggggggctctgcagcagggcgaagccttccagcgggctctggagtcagagctgcagcagctgcgggcccggctccaggggctggaggccgactgtgtccggggcccagatggggtgtgcctcagtggggatagaggcccacagggtgacaaggccatcagggagcaaggccccagggagcaggagccagaactcagcttcctgaagcagaaggaacagctggaggctgaggcacaggcattaaggcaagagttagagaggcagcgacggctgctggggtctgtacagcaggatctggagaggagcttgcaggatgccagccgcggggacccagctcatgctggcttggctgagctgggccacagattggcccagaaactgcagggcctggagaactggggccaggaccctggggtctctgccaatgcctcaaaggcctggcaccagaagtcccacttccagaattctagggagtggagtggaaaggaaaagtggtgggatgggcagagagaccggaaggctgagcactggaaacataagaaggaagaatctggccgggaaaggaagaagaactggggaggtcaggaggacagggagccagcaggaaggtggaaggagggcaggccaagggtggaggagtcggggagcaagaaggagggcaagcgacagggcccgaaggaacccccaaggaaaagtggtagcttccactcctctggagaaaagcagaagcaacctcggtggagggaagggactaaggacagccatgaccccctgccatcctgggcagagctgttgaggcccaagtaccgggcaccccagggctgctcaggtgtggacgagtgtgcccggcaggagggcctgactttctttggcacagagctagccccagtgcggcaacaggagctggcctctctgctaagaacatacttggcacggctgccctgggctgggcagctgaccaaggagctacccctctcacctgctttctttggtgaggatggcatcttccgtcatgaccgcctccgcttccgggattttgtggatgccctggaggacagcttggaggaggtggctgtgcaacagacaggtgatgatgatgaagtagatgactttgaggacttcatcttcagccacttctttggagacaaagcactgaagaagaggtcagggaagaaggacaagcactcacagagcccaagagctgcggggcccagggaggggcacagccatagccaccaccaccaccaccggggctgacaccctgccccacagggaatggccttggcctggcccagcccaagatcccagcgttatctaactcctggagggtggactctgtcctggcttgtttggtgtcctcagatatctttcacacagtagagcaaaatcaccagccctgcactgatgtcactttatgtagaaaaaggccttagctggacctgtgttgccgtctatgcaaatgcatgcaaatactccaggccctgggatgtgggcttgtgttttgtcactgtgaagggggagatgggagaggagcctgttttggggtggggtctggggaaggcaatctgattctgaagctaaagagctttcatcctcttgagtgtatgtccccatagtgggccccttgacccacatgctgaccggtgccttgggatttgactagagttgctggctcgaggcccagcacgaggacttaccctggggttttgttaggtttggaagcagctgtccctagggggtgaagtccccccccttttttttttttacccctgcttctcccacggcttcacctccctatgtgaactgtagactcagatcccaataaagtgctgttgcagctatgatgctaggtggtttctaagcacaggggacaccccacaccccctgcctgaatggatgggtccatcccaggcactggtacttgcccccttgttctgtatccccctttgcccttgccttgcccttccaacaaaccctaggcccttgagaagctgatacttctccttttgctcacagctgccttggccccacccctgggagatgtagcaaattgagtgtgggttttggagtctgagcctcaggctcaaatccaggccaagtgatcttgggcaagttaatctctgggaactttgggtttcttatcctcaaaaaaggcgatggaagggctggggaagtgattaaataaaagcaacgcaagaaaa

SEQ ID NO: 424493 - DNA, 3292 bp, Homo sapiens
acatgattttcttctcgggctgcaaacaaagggaagcctgcaacaagttaagctgaagaccgaagcaagagctggttcaggtggcagccacagcagcctcagggacctcagcaactatggcctcctgcccagactctgataatagctgggtgcttgctggctccgagagcctgccagtggagacactgggcccggcatccaggatggacccagaatctgagagagccctgcaggcccctcacagcccctccaagacagatgggaaagaattagctgggaccatggatggagaagggacgctcttccagactgaaagccctcagtctggcagcattctaacagaggagactgaggtcaagggcaccctggaaggtgatgtttgtggtgtggagcctcctggcccaggagacacagtagtccagggagacctgcaggagaccaccgtggtgacaggcctgggaccagacacacaggacctggaaggccagagccctccacagagcctgccttcaacccccaaagcagtcacctcactgccctgtccctgtcctttcccctagcttggatcagggaggagggccgctgctccagcagtgacgatgacaccgacgtggacatggagggtctgcggagacggcggggccgggaggccggcccacctcagcccatggtgcccctggctgtggagaaccaggctgggggtgagggtgcaggcggggagctgggcatctccctcaacatgtgcctccttggggccctggttctgcttggcctgggggtcctcctcttctcaggttagtgcgtactctgaggctggggggcccatggaggaagtggagcggcaggtcctcccagaccccgaggtgctggaagctgtgggggacaggcaggatgggctaagggaacagctgcaggccccagtgcctcctgacagtgtccccagcctgcaaaacatgggtcttctgctggacaagctggccaaggagaaccaggacatccggctgctgcaggcccagctgcaggcccaaaaggaagagcttcagagcctgatgcaccagcccaaagggctagaggaggagaatgcccagctccggggggctctgcagcagggcgaagccttccagcgggctctggagtcagagctgcagcagctgcgggcccggctccaggggctggaggccgactgtgtccggggcccagatggggtgtgcctcagtggggatagaggcccacagggtgacaaggccatcagggagcaaggccccagggagcaggagccagaactcagcttcctgaagcagaaggaacagctggaggctgaggcacaggcattaaggcaagagttagagaggcagcgacggctgctggggtctgtacagcaggatctggagaggagcttgcaggatgccagccgcggggacccagctcatgctggcttggctgagctgggccacagattggcccagaaactgcagggcctggagaactggggccaggaccctggggtctctgccaatgcctcaaaggcctggcaccagaagtcccacttccagaattctagggagtggagtggaaaggaaaagtggtgggatgggcagagagaccggaaggctgagcactggaaacataagaaggaagaatctggccgggaaaggaagaagaactggggaggtcaggaggacagggagccagcaggaaggtggaaggagggcaggccaagggtggaggagtcggggagcaagaaggagggcaagcgacagggcccgaaggaacccccaaggaaaagtggtagcttccactcctctggagaaaagcagaagcaacctcggtggagggaagggactaaggacagccatgaccccctgccatcctgggcagagctgttgaggcccaagtaccgggcaccccagggctgctcaggtgtggacgagtgtgcccggcaggagggcctgactttctttggcacagagctagccccagtgcggcaacaggagctggcctctctgctaagaacatacttggcacggctgccctgggctgggcagctgaccaaggagctacccctctcacctgctttctttggtgaggatggcatcttccgtcatgaccgcctccgcttccgggattttgtggatgccctggaggacagcttggaggaggtggctgtgcaacagacaggtgatgatgatgaagtagatgactttgaggacttcatcttcagccacttctttggagacaaagcactgaagaagaggtcagggaagaaggacaagcactcacagagcccaagagctgcggggcccagggaggggcacagccatagccaccaccaccaccaccggggctgacaccctgccccacagggaatggccttggcctggcccagcccaagatcccagcgttatctaactcctggagggtggactctgtcctggcttgtttggtgtcctcagatatctttcacacagtagagcaaaatcaccagccctgcactgatgtcactttatgtagaaaaaggccttagctggacctgtgttgccgtctatgcaaatgcatgcaaatactccaggccctgggatgtgggcttgtgttttgtcactgtgaagggggagatgggagaggagcctgttttggggtggggtctggggaaggcaatctgattctgaagctaaagagctttcatcctcttgagtgtatgtccccatagtgggccccttgacccacatgctgaccggtgccttgggatttgactagagttgctggctcgaggcccagcacgaggacttaccctggggttttgttaggtttggaagcagctgtccctagggggtgaagtccccccccttttttttttttacccctgcttctcccacggcttcacctccctatgtgaactgtagactcagatcccaataaagtgctgttgcagctatgatgctaggtggtttctaagcacaggggacaccccacaccccctgcctgaatggatgggtccatcccaggcactggtacttgcccccttgttctgtatccccctttgcccttgccttgcccttccaacaaaccctaggcccttgagaagctgatacttctccttttgctcacagctgccttggccccacccctgggagatgtagcaaattgagtgtgggttttggagtctgagcctcaggctcaaatccaggccaagtgatcttgggcaagttaatctctgggaactttgggtttcttatcctcaaaaaaggcgatggaagggctggggaagtgattaaataaaagcaacgcaagaaaa

SEQ ID NO: 424494 - DNA, 2824 bp, Homo sapiens
acatgattttcttctcgggctgcaaacaaagggaagcctgcaacaagttaagctgaagaccgaagcaagagctggttcaggtggcagccacagcagcctcagggacctcagcaactatggcctcctgcccagactctgataatagctgggtgcttgctggctccgagagcctgccagtggagacactgggcccggcatccaggatggacccagaatctgagagagccctgcaggcccctcacagcccctccaagacagatgggaaagaattagctgggaccatggatggagaagggacgctcttccagactgaaagccctcagtctggcagcattctaacagaggagactgaggtcaagggcaccctggaaggtgatgtttgtggtgtggagcctcctggcccaggagacacagtagtccagggagacctgcaggagaccaccgtggtgacaggcctgggaccagacacacaggacctggaaggccagagccctccacagagcctgccttcaacccccaaagcagcttggatcagggaggagggccgctgctccagcagtgacgatgacaccgacgtggacatggagggtctgcggagacggcggggccgggaggccggcccacctcagcccatggtgcccctggctgtggagaaccaggctgggggtgagggtgcaggcggggagctgggcatctccctcaacatgtgcctccttggggccctggttctgcttggcctgggggtcctcctcttctcaggtggcctctcagagtctgagactgggcccatggaggaagtggagcggcaggtcctcccagaccccgaggtgctggaagctgtgggggacaggcaggatgggctaagggaacagctgcaggccccagtgcctcctgacagtgtccccagcctgcaaaacatgggtcttctgctggacaagctggccaaggagaaccaggacatccggctgctgcaggcccagctgcaggcccaaaaggaagagcttcagagcctgatgcaccagcccaaagggctagaggaggagaatgcccagctccggggggctctgcagcagggcgaagccttccagcgggctctggagtcagagctgcagcagctgcgggcccggctccaggggctggaggccgactgtgtccggggcccagatggggtgtgcctcagtggggatagaggcccacagggtgacaaggccatcagggagcaaggccccagggagcaggagccagaactcagcttcctgaagcagaaggaacagctggaggctgaggcacaggcattaaggcaagagttagagaggcagcgacggctgctggggtctgtacagcaggatctggagaggagcttgcaggatgccagccgcggggacccagctcatgctggcttggctgagctgggccacagattggcccagaaactgcagggcctggagaactggggccaggaccctggggtctctgccaatgcctcaaaggcctggcaccagaagtcccacttccagaattctagggagtggagtggaaaggaaaagtggtgggatgggcagagagaccggaaggctgagcactggaaacataagaaggaagaatctggccgggaaaggaagaagaactggggaggtcaggaggacagggagccagcaggaaggtggaaggagggcaggccaagggtggaggagtcggggagcaagaaggagggcaagcgacagggcccgaaggaacccccaaggaaaagtggtagcttccactcctctggagaaaagcagaagcaacctcggtggagggaagggactaaggacagccatgaccccctgccatcctgggcagagctgttgaggcccaagtaccgggcaccccagggctgctcaggtgtggacgagtgtgcccggcaggagggcctgactttctttggcacagagctagccccagtgcggcaacaggagctggcctctctgctaagaacatacttggcacggctgccctgggctgggcagctgaccaaggagctacccctctcacctgctttctttggtgaggatggcatcttccgtcatgaccgcctccgcttccgggattttgtggatgccctggaggacagcttggaggaggtggctgtgcaacagacaggtgatgatgatgaagtagatgactttgaggacttcatcttcagccacttctttggagacaaagcactgaagaagaggtcagggaagaaggacaagcactcacagagcccaagagctgcggggcccagggaggggcacagccatagccaccaccaccaccaccggggctgacaccctgccccacagggaatggccttggcctggcccagcccaagatcccagcgttatctaactcctggagggtggactctgtcctggcttgtttggtgtcctcagatatctttcacacagtagagcaaaatcaccagccctgcactgatgtcactttatgtagaaaaaggccttagctggacctgtgttgccgtctatgcaaatgcatgcaaatactccctggggaaggcaatctgattctgaagctaaagagctttcatcccttgccttgcccttccaacaaaccctaggcccttgagaagctgatacttctccttttgctcacagctgccttggccccacccctgggagatgtagcaaattgagtgtgggttttggagtctgagcctcaggctcaaatccaggccaagtgatcttgggcaagttaatctctgggaactttgggtttcttatcctcaaaaaaggcgatggaagggctggggaagtgattaaataaaagcaacgcaagaaaa

SEQ ID NO: 424495 - DNA, 951 bp, Homo sapiens
acatgattttcttctcgggctgcaaacaaagggaagcctgcaacaagttaagctgaagaccgaagcaagagctggttcaggtggcagccacagcagcctcagggacctcagcaactatggcctcctgcccagactctgataatagctgggtgcttgctggctccgagggacgctcttccagactgaaagccctcagtctggcagcattctaacagaggagactgaggtcaagggcaccctggaaggtgatgtttgtggtgtggagcctcctggcccaggagacacagtagtccagggagacctgcaggagaccaccgtggtgacaggcctgggaccagacacacaggacctggaaggccagagccctccacagagcctgccttcaacccccaaagcagcttggatcagggaggagggccgctgctccagcagtgacgatgacaccgacgtggacatggagggtctgcggagacggcggggccgggaggccggcccacctcagcccatggtgcccctggctgtggagaaccaggctgggggtgagggtgcaggcggggagctgggcatctccctcaacatgtgcctccttggggccctggttctgcttggcctgggggtcctcctcttctcaggtggccatctcagagtctgagactgggcccatggaggaacgtggagcggacagagtcctaccagaacccgaggtgcttggaagactgtggagtggacacgcaggatgcggctacgggaacagctgcaaggcccagattgctccttaccagtgtgcccaagacttgcaataaccatgggtcattcatgagtggaccaaggctgggcaaagaagaaaccaggagactccggttgctgccggccactagctgccagacccagaaacgaagaagtcagaagccgtatgaccagacccatgggctagacggcggcaactgccag

SEQ ID NO: 424496 - DNA, 182 bp, Homo sapiens
tggaaccaggcttggttctggaggctgctgcccagcacttgaaccttggaacccagccaaggctgctttctgcattctgcccctcctgaagggagctcccatccttaagagagctttcttctgcaggtggcagccacagcagcctcagggacctcagcaactatggcctcctgcccagactc

SEQ ID NO: 424497 - DNA, 320 bp, Homo sapiens
cccaggcactggtacttgcccccttgttctgtatccccctttgcccttgccttgcccttccaacaaaccctaggcccttgagaagctgatacttctccttttgctcacagctgccttggccccacccctgggagatgtagcaaattgagtgtgggttttggagtctgagcctcaggctcaaatccaggccaagtgatcttgggcaagttaatctctgggaactttgggtttcttatcctcaaaaaaggcgatggaagggctggggaagtgattaaataaaagcaacgcaagaaaaatgcctctcctgttttgggcactca

SEQ ID NO: 424498 - DNA, 2689 bp, Homo sapiens
acatgattttcttctcgggctgcaaacaaagggaagcctgcaacaagttaagctgaagaccgaagcaagagctggttcaggtggcagccacagcagcctcagggacctcagcaactatggcctcctgcccagactctgataatagctgggtgcttgctggctccgagagcctgccagtggagacactgggcccggcatccaggatggacccagaatctgagagagccctgcaggcccctcacagcccctccaagacagatgggaaagaattagctgggaccatggatggagaagggacgctcttccagactgaaagccctcagtctggcagcattctaacagaggagactgaggtcaagggcaccctggaaggtgatgtttgtggtgtggagcctcctggcccaggagacacagtagtccagggagacctgcaggagaccaccgtggtgacaggcctgggaccagacacacaggacctggaaggccagagccctccacagagcctgccttcaacccccaaagcagcttggatcagggaggagggccgctgctccagcagtgacgatgacaccgacgtggacatggagggtctgcggagacggcggggccgggaggccggcccacctcagcccatggtgcccctggctgtggagaaccaggctgggggtgagggtgcaggcggggagctgggcatctccctcaacatgtgcctccttggggccctggttctgcttggcctgggggtcctcctcttctcaggtggcctctcagagtctgagactgggcccatggaggaagtggagcggcaggtcctcccagaccccgaggtgctggaagctgtgggggacaggcaggatgggctaagggaacagctgcaggccccagtgcctcctgacagtgtccccagcctgcaaaacatgggtcttctgctggacaagctggccaaggagaaccaggacatccggctgctgcaggcccagctgcaggcccaaaaggaagagcttcagagcctgatgcaccagcccaaagggctagaggaggagaatgcccagctccggggggctctgcagcagggcgaagccttccagcgggctctggagtcagagctgcagcagctgcgggcccggctccaggggctggaggccgactgtgtccggggcccagatggggtgtgcctcagtggggatagaggcccacagggtgacaaggccatcagggagcaaggccccagggagcaggagccagaactcagcttcctgaagcagaaggaacagctggaggctgaggcacaggcattaaggcaagagttagagaggcagcgacggctgctggggtctgtacagcaggatctggagaggagcttgcaggatgccagccgcggggacccagctcatgctggcttggctgagctgggccacagattggcccagaaactgcagggcctggagaactggggccaggaccctggggtctctgccaatgcctcaaaggcctggcaccagaagtcccacttccagaattctagggagtggagtggaaaggaaaagtggtgggatgggcagagagaccggaaggctgagcactggaaacataagaaggaagaatctggccgggaaaggaagaagaactggggaggtcaggaggacagggagccagcaggaaggtggaaggagggcaggccaagggtggaggagtcggggagcaagaaggagggcaagcgacagggcccgaaggaacccccaaggaaaagtggtagcttccactcctctggagaaaagcagaagcaacctcggtggagggaagggaccaaggagctacccctctcacctgctttctttggtgaggatggcatcttccgtcatgaccgcctccgcttccgggattttgtggatgccctggaggacagcttggaggaggtggctgtgcaacagacaggtgatgatgatgaagtagatgactttgaggacttcatcttcagccacttctttggagacaaagcactgaagaagaggtcagggaagaaggacaagcactcacagagcccaagagctgcggggcccagggaggggcacagccatagccaccaccaccaccaccggggctgacaccctgccccacagggaatggccttggcctggcccagcccaagatcccagcgttatctaactcctggagggtggactctgtcctggcttgtttggtgtcctcagatatctttcacacagtagagcaaaatcaccagccctgcactgatgtcactttatgtagaaaaaggccttagctggacctgtgttgccgtctatgcaaatgcatgcaaatactccaggccctgggatgtgggcttgtgttttgtcactgtgaagggggagatgggagaggagcctgttttggggtggggtctggggaaggcaatctgattctgaagctaaagagctttcatcctcttgagtgtatgtccccatagtgggccccttgacccacatgctgaccggtgccttgggatttgactagagttgctggctcgaggcccagcacgaggacttaccctggggttttgttaggtttggaagcagctgtccctagggggtgaagtccccccccttttttttttttacccctgcttctcccacggcttcacctccctatgtgaactgtagactcagatcccaataaagtgctgttgcagcta

SEQ ID NO: 424499 - DNA, 3201 bp, Homo sapiens
acatgattttcttctcgggctgcaaacaaagggaagcctgcaacaagttaagctgaagaccgaagcaagagctggttcaggtggcagccacagcagcctcagggacctcagcaactatggcctcctgcccagactctgataatagctgggtgcttgctggctccgagagcctgccagtggagacactgggcccggcatccaggatggacccagaatctgagagagccctgcaggcccctcacagcccctccaagacagatgggaaagaattagctgggaccatggatggagaagggacgctcttccagactgaaagccctcagtctggcagcattctaacagaggagactgaggtcaagggcaccctggaaggtgatgtttgtggtgtggagcctcctggcccaggagacacagtagtccagggagacctgcaggagaccaccgtggtgacaggcctgggaccagacacacaggacctggaaggccagagccctccacagagcctgccttcaacccccaaagcagcttggatcagggaggagggccgctgctccagcagtgacgatgacaccgacgtggacatggagggtctgcggagacggcggggccgggaggccggcccacctcagcccatggtgcccctggctgtggagaaccaggctgggggtgagggtgcaggcggggagctgggcatctccctcaacatgtgcctccttggggccctggttctgcttggcctgggggtcctcctcttctcaggtggcctctcagagtctgagactgggcccatggaggaagtggagcggcaggtcctcccagaccccgaggtgctggaagctgtgggggacaggcaggatgggctaagggaacagctgcaggccccagtgcctcctgacagtgtccccagcctgcaaaacatgggtcttctgctggacaagctggccaaggagaaccaggacatccggctgctgcaggcccagctgcaggcccaaaaggaagagcttcagagcctgatgcaccagcccaaagggctagaggaggagaatgcccagctccggggggctctgcagcagggcgaagccttccagcgggctctggagtcagagctgcagcagctgcgggcccggctccaggggctggaggccgactgtgtccggggcccagatggggtgtgcctcagtggggatagaggcccacagggtgacaaggccatcagggagcaaggccccagggagcaggagccagaactcagcttcctgaagcagaaggaacagctggaggctgaggcacaggcattaaggcaagagttagagaggcagcgacggctgctggggtctgtacagcaggatctggagaggagcttgcaggatgccagccgcggggacccagctcatgctggcttggctgagctgggccacagattggcccagaaactgcagggcctggagaactggggccaggaccctggggtctctgccaatgcctcaaaggcctggcaccagaagtcccacttccagaattctagggagtggagtggaaaggaaaagtggtgggatgggcagagagaccggaaggctgagcactggaaacataagaaggaagaatctggccgggaaaggaagaagaactggggaggtcaggaggacagggagccagcaggaaggtggaaggagggcaggccaagggtggaggagtcggggagcaagaaggagggcaagcgacagggcccgaaggaacccccaaggaaaagtggtagcttccactcctctggagaaaagcagaagcaacctcggtggagggaagggactaaggacagccatgaccccctgccatcctgggcagagctgttgaggcccaagtaccgggcaccccagggctgctcaggtgtggacgagtgtgcccggcaggagggcctgactttctttggcacagagctagccccagtgcggcaacaggagctggcctctctgctaagaacatacttggcacggctgccctgggctgggcagctgaccaaggagctacccctctcacctgctttctttggtgaggatggcatcttccgtcatgaccgcctccgcttccgggattttgtggatgccctggaggacagcttggaggaggtggctgtgcaacagacaggtgatgatgatgaagtagatgactttgaggacttcatcttcagccacttctttggagacaaagcactgaagaagaggtcagggaagaaggacaagcactcacagagcccaagagctgcggggcccagggaggggcacagccatagccaccaccaccaccaccggggctgacaccctgccccacagggaatggccttggcctggcccagcccaagatcccagcgttatctaactcctggagggtggactctgtcctggcttgtttggtgtcctcagatatctttcacacagtagagcaaaatcaccagccctgcactgatgtcactttatgtagaaggccctgggatgtgggcttgtgttttgtcactgtgaagggggagatgggagaggagcctgttttggggtggggtctggggaaggcaatctgattctgaagctaaagagctttcatcctcttgagtgtatgtccccatagtgggccccttgacccacatgctgaccggtgccttgggatttgactagagttgctggctcgaggcccagcacgaggacttaccctggggttttgttaggtttggaagcagctgtccctagggggtgaagtccccccccttttttttttttacccctgcttctcccacggcttcacctccctatgtgaactgtagactcagatcccaataaagtgctgttgcagctatgatgctaggtggtttctaagcacaggggacaccccacaccccctgcctgaatggatgggtccatcccaggcactggtacttgcccccttgttctgtatccccctttgcccttgccttgcccttccaacaaaccctaggcccttgagaagctgatacttctccttttgctcacagctgccttggccccacccctgggagatgtagcaaattgagtgtgggttttggagtctgagcctcaggctcaaatccaggccaagtgatcttgggcaagttaatctctgggaactttgggtttcttatcctcaaaaaaggcgatggaagggctggggaagtgattaaataaaagcaacgcaagaaaa

SEQ ID NO: 424500 - DNA, 3360 bp, Homo sapiens
acatgattttcttctcgggctgcaaacaaagggaagcctgcaacaagttaagctgaagaccgaagcaagagctggttcaggtggcagccacagcagcctcagggacctcagcaactatggcctcctgcccagactctgataatagctgggtgcttgctggctccgagagcctgccagtggagacactgggcccggcatccaggatggacccagaatctgagagagccctgcaggcccctcacagcccctccaagacagatgggaaagaattagctgggaccatggatggagaagggacgctcttccagactgaaagccctcagtctggcagcattctaacagaggagactgaggtcaagggcaccctggaaggtgatgtttgtggtgtggagcctcctggcccaggagacacagtagtccagggagacctgcaggagaccaccgtggtgacaggcctgggaccagacacacaggacctggaaggccagagccctccacagagcctgccttcaacccccaaagcagcttggatcagggaggagggccgctgctccagcagtgacgatgacaccgacgtggacatggagggtctgcggagacggcggggccgggaggccggcccacctcagcccatggtgcccctggctgtggagaaccaggctgggggtgagggtgcaggcggggagctgggcatctccctcaacatgtgcctccttggggccctggttctgcttggcctgggggtcctcctcttctcaggtggcctctcagagtctgagactgggcccatggaggaagtggagcggcaggtcctcccagaccccgaggtgctggaagctgtgggggacaggcaggatgggctaagggaacagctgcaggccccagtgcctcctgacagtgtccccagcctgcaaaacatgggtcttctgctggacaagctggccaaggagaaccaggacatccggctgctgcaggcccagctgcaggcccaaaaggaagagcttcagagcctgatgcaccagcccaaagggctagaggaggagaatgcccagctccggggggctctgcagcagggcgaagccttccagcgggctctggagtcagagctgcagcagctgcgggcccggctccaggggctggaggccgactgtgtccggggcccagatggggtgtgcctcagtggggatagaggcccacagggtgacaaggccatcagggagcaaggccccagggagcaggagccagaactcagcttcctgaagcagaaggaacagctggaggctgaggcacaggcattaaggcaagagttagagaggcagcgacggctgctggggtctgtacagcaggatctggagaggagcttgcaggatgccagccgcggggacccagctcatgctggcttggctgagctgggccacagattggcccagaaactgcagggcctggagaactggggccaggaccctggggtctctgccaatgcctcaaaggcctggcaccagaagtcccacttccagaattctagggagtggagtggaaaggaaaagtggtgggatgggcagagagaccggaaggctgagcactggaaacataagaaggaagaatctggccgggaaaggaagaagaactggggaggtcaggaggacagggagccagcaggaaggtggaaggagggcaggccaagggtggaggagtcggggagcaagaaggagggcaagcgacagggcccgaaggaacccccaaggaaaagtggtagcttccactcctctggagaaaagcagaagcaacctcggtggagggaagggactaaggacagccatgaccccctgccatcctgggcagagctgttgaggcccaagtaccgggcaccccagggctgctcaggtgtggacgagtgtgcccggcaggagggcctgactttctttggcacagagctagccccagtgcggcaacaggagctggcctctctgctaagaacatacttggcacggctgccctgggctgggcagctgaccaaggagctacccctctcacctgctttctttggtgaggatggcatcttccgtcatgaccgcctccgcttccgggattttgtggatgccctggaggacagcttggaggaggtggctgtgcaacagacaggtgatgatgatgaagtagatgactttgaggacttcatcttcagccacttctttggagacaaagcactgaagaagaggtcagggaagaaggacaagcactcacagagcccaagagctgcggggcccagggaggggcacagccatagccaccaccaccaccaccggggctgacaccctgccccacagggaatggccttggcctggcccagcccaagatcccagcgttatctaactcctggagggtggactctgtcctggcttgtttggtgtcctcagatatctttcacacagtagagcaaaatcaccagccctgcactgatgtcactttatgtagaaaaaggccttagctggacctgtgttgccgtctatgcaaatgcatgcaaatactccaggccctgggatgtgggcttgtgttttgtcactgtgaagggggagatgggagaggagcctgttttggggtggggtctggggaaggcaatctgattctgaagctaaagagctttcatcctcttgagtgtatgtccccatagtgggccccttgacccacatgctgaccggtgccttgggatttgactagagttgctggctcgaggcccagcacgaggacttaccctggggttttgttaggtttggaagcagctgtccctagggggtgaagtccccccccttttttttttttacccctgcttctcccacggcttcacctccctatgtgaactgtagactcagatcccaataaagtgctgttgcagctatgatgctaggtggtttctaagcacaggggacaccccacaccccctgcctgaatggatgggtccatcccaggcactggtacttgcccccttgttctgtatccccctttgcccttgccttgcccttccaacaaaccctaggcccttgagaagctgatacttctccttttgctcacagtgctaggccactcggggattgtgccaatgaggtggttggagtctgagcccagcaatcaggcaggatctggcagtacccggactgggtctaccaaaggaggagggggaggtcaaacgcgcgaaattgaaaaaaggggggcaaatcagcggcatccaattaggcaagtaaagcggcagggttctgtcgttctattttgtgtgttattagaccatcagcacccaccatcctcaacacatataccgactacatacactaaaaaccaacacacaacatcaacaacacaacaaga

SEQ ID NO: 424501 - DNA, 2896 bp, Homo sapiens
acatgattttcttctcgggctgcaaacaaagggaagcctgcaacaagttaagctgaagaccgaagcaagagctggttcaggtggcagccacagcagcctcagggacctcagcaactatggcctcctgcccagactctgataatagctgggtgcttgctggctccgagagcctgccagtggagacactgggcccggcatccaggatggacccagaatctgagagagccctgcaggcccctcacagcccctccaagacagatgggaaagaattagctgggaccatggatggagaagggacgctcttccagactgaaagccctcagtctggcagcattctaacagaggagactgaggtcaagggcaccctggaaggtgatgtttgtggtgtggagcctcctggcccaggagacacagtagtccagggagacctgcaggagaccaccgtggtgacaggcctgggaccagacacacaggacctggaaggccagagccctccacagagcctgccttcaacccccaaagcagcttggatcagggaggagggccgctgctccagcagtgacgatgacaccgacgtggacatggagggtctgcggagacggcggggccgggaggccggcccacctcagcccatggtgcccctggctgtggagaaccaggctgggggtgagggtgcaggcggggagctgggcatctccctcaacatgtgcctccttggggccctggttctgcttggcctgggggtcctcctcttctcaggtggcctctcagagtctgagactgggcccatggaggaagtggagcggcaggtcctcccagaccccgaggtgctggaagctgtgggggacaggcaggatgggctaagggaacagctgcaggccccagtgcctcctgacagtgtccccagcctgcaaaacatgggtcttctgctggacaagctggccaaggagaaccaggacatccggctgctgcaggcccagctgcaggcccaaaaggaagagcttcagagcctgatgcaccagcccaaagggctagaggaggagaatgcccagctccggggggctctgcagcagggcgaagccttccagcgggctctggagtcagagctgcagcagctgcgggcccggctccaggggctggaggccgactgtgtccggggcccagatggggtgtgcctcagtggggatagaggcccacagggtgacaaggccatcagggagcaaggccccagggagcaggagccagaactcagcttcctgaagcagaaggaacagctggaggctgaggcacaggcattaaggcaagagttagagaggcagcgacggctgctggggtctgtacagcaggatctggagaggagcttgcaggatgccagccgcggggacccagctcatgctggcttggctgagctgggccacagattggcccagaaactgcagggcctggagaactggggccaggaccctggggtctctgccaatgcctcaaaggcctggcaccagaagtcccacttccagaattctagggagtggagtggaaaggaaaagtggtgggatgggcagagagaccggaaggctgagcactggaaacataagaaggaagaatctggccgggaaaggaagaagaactggggaggtcaggaggacagggagccagcaggaaggtggaaggagggcaggccaagggtggaggagtcggggagcaagaaggagggcaagcgacagggcccgaaggaacccccaaggaaaagtggtagcttccactcctctggagaaaagcagaagcaacctcggtggagggaagggactaaggacagccatgaccccctgccatcctgggcagagctgttgaggcccaagtaccgggcaccccagggctgctcaggtgtggacgagtgtgcccggcaggagggcctgactttctttggcacagagctagccccagtgcggcaacaggagctggcctctctgctaagaacatacttggcacggctgccctgggctgggcagctgaccaaggagctacccctctcacctgctttctttggtgaggatggcatcttccgtcatgaccgcctccgcttccgggattttgtggatgccctggaggacagcttggaggaggtggctgtgcaacagacaggtgatgatgatgaagtagatgactttgaggacttcatcttcagccacttctttggagacaaagcactgaagaagaggtcagggaagaaggacaagcactcacagagcccaagagctgcggggcccagggaggggcacagccatagccaccaccaccaccaccggggctgacaccctgccccacagggaatggccttggcctggcccagcccaagatcccagcgttatctaactcctggagggtggactctgtcctggcttgtttggtgtcctcagatatctttcacacagtagagcaaaatcaccagccctgcactgatgtcactttatgtagaaaaaggccttagctggacctgtgttgccgtctatgcaaatgcatgcaaatactccaggccctgggatgtgggcttgtgttttgtcactgtgaagggggagatgggagaggagcctgttttggggtggggtctggggaaggcaatctgattctgaagctaaagagctttcatcctcttgagtgtatgtccccatagtgggccccttgacccacatgctgaccggtgccttgggatttgactagagttgctggctcgaggcccagcacgaggacttaccctggggttttgttaggtttggaagcagctgtccctagggggtgaagtccccccccttttttttttttacccctgcttctcccacggcttcacctccctatgtgaactgtagactcagatcccaataaagtgctgttgcagcta

SEQ ID NO: 424502 - DNA, 1130 bp, Homo sapiens
acatgattttcttctcgggctgcaaacaaagggaagcctgcaacaagttaagctgaagaccgaagcaagagctggttcaggtggcagccacagcagcctcagggacctcagcaactatggcctcctgcccagactctgataatagctgggtgcttgctggctccgagagcctgccagtggagacactgggcccggcatccaggatggacccagaatctgagagagccctgcaggcccctcacagcccctccaagacagatgggaaagaattagctgggaccatggatggagaagggacgctcttccagactgaaagccctcagtctggcagcattctaacagaggagactgaggtcaagggcaccctggaaggtgatgtttgtggtgtggagcctcctggcccaggagacacagtagtccagggagacctgcaggagaccaccgtggtgacaggcctgggaccagacacacaggacctggaaggccagagccctccacagagcctgccttcaacccccaaagcagcttggatcagggaggagggccgctgctccagcagtgacgatgacaccgacgtggacatggagggtctgcggagacggcggggccgggaggccggcccacctcagcccatggtgcccctggctgtggagaaccaggctgggggtgagggtgcaggcggggagctgggcatctccctcaacatgtgcctccttggggccctggttctgcttggcctgggggtcctcctcttctcaggttagtgcgtactctgaggctggggctttgggcttccatgctgcctgccttcctgccatgttctcaccttacctcacatcacccctccccgagggcctcatcagactcctctgtctctgtccttaggtggcctctcagagtctgagactggtgagtagggaggagcctgtcttgtgctggggagttgtatgtattctctggttctgtgggtcaggagtaggggtgctgggggctcacatttatttctcagttagtggccttgtcagctgttcagggtgccccttggccctttatctcaccaaaccgctcagccacagggtgggtcctgagcaggagtggtggctgtgtgaatgggaaggtgtggggagaat

SEQ ID NO: 424503 - DNA, 1957 bp, Homo sapiens
ttaatttttcctagttctttaatgagatccctagaaaccgggtttaagacaattgatttttttttttgctttctcggtcagataatttcagaaactccctccctgtgcacctgtgggcattcccacttccacacaccaacaagacaaggttagacagatcttctaaggcagcttctaaggcctttcagcatgtcaaaatgcatctttggggtatccgtttctgagtaccaacaagggaacggaatgggttaagatttcattctctcagtagaggaaaatctagggattcattctacatttgaagccaaaaacagttatctgactccttccagagcctttaaatgttgatcccttcccctcttctcccatcaaacatacacttggaagtttaagaagaatggagggatctcaaggtgtaaagttttctttctgtgcgatgaccagtgctggtcctcggatgtcaactgccaaccagggtagctcatggttacaacctcccgtacagctctcacttatccagaactactgaggctccaagctcagtatcaaactgttcacttgcactatgtcctctatgatgtcactgtcatcatcattttacagacacactgcgactccaagtggtcgttactagttcacaatcaagtagctctcgttcatcttctcgttcatcttcaactctatgattaactgcaaaatgttctgctcattttgactagagtcttgaaagatctgcaaaccgacacggcaggactgatgctcagttctctgaccagggatatccagtctcttatgtggggaaactcacgcccaggtctaacctcacacttttaagacagatgagaaggaagggggaaatgttgctacattaggaggaattaattacaaagagaggaagtaactagcttgatagtctcatggagtcaggattaaacgccatgtctgtcctggcgtacgctaagggatggggaaacgtctgggtcccaggctgggtaaatggcaggcccaagccgaattagttcggctcttggtttgactccctcttccctcctgttccaagcgctcgcatgaacctgggtgccagggggattatcagcgtctgcgcaaggccgatggtggcagcgcggcgttaggaatcaggccccctatccctgagcccaacagcctaccgctacagcacccaacgaaaatgggaacaacatgttgagacgctgcagcaacagcaggcgcttcccaccagctacagtcggagatttggagcgcttgtgtctgaggctcaatcccgtcaggtgccgcgcaactcagcggcgcattctctttggacccgaggcaccaccatactttccattgcttacttccgttaaaccccgagcgctgccatggcaagccggaaatagggatgaagcaatttagccagaagagggcggaagtggctactcagggcgccgccatgacgagccggtccggaagaagaggcaggcggccctagaggtcaccgctcgctactgtggccgggagctggagcagtatggccagtgtgtggcggccaagccggaatcctggcagcgggactgtcactaccttaagatgagcattgcccagtgcacatcctcccacccaatcatccgccagatccgccaggcctgtgctcagccttttgaggccttcgaggagtgtcttcgacagaacgaggcagctgtgggcaactgtgcagagcatatgcgccgcttcctgcagtgcgctgagcaggtgcagccgccacgctcacctgcaactgtggaggcacagccacttcctgcctcctgaggactcctctgacggcaggaaaactggacatgaatgactgcccccccgcccctcccctgcagagtggccagatggagtcctgagccctggacatgggcccggctttcctggatatcaggacttccaataaataaagactctgtatactggg

SEQ ID NO: 424504 - DNA, 2728 bp, Homo sapiens
  misc_feature (1821)..(1821): n is a, c, g, or t
  misc_feature (1937)..(1937): n is a, c, g, or t
  misc_feature (2354)..(2354): n is a, c, g, or t
  misc_feature (2564)..(2564): n is a, c, g, or t
  misc_feature (2631)..(2631): n is a, c, g, or t
ttaatttttcctagttctttaatgagatccctagaaaccgggtttaagacaattgatttttttttttgctttctcggtcagataatttcagaaactccctccctgtgcacctgtgggcattcccacttccacacaccaacaagacaaggttagacagatcttctaaggcagcttctaaggcctttcagcatgtcaaaatgcatctttggggtatccgtttctgagtaccaacaagggaacggaatgggttaagatttcattctctcagtagaggaaaatctagggattcattctacatttgaagccaaaaacagttatctgactccttccagagcctttaaatgttgatcccttcccctcttctcccatcaaacatacacttggaagtttaagaagaatggagggatctcaaggtgtaaagttttctttctgtgcgatgaccagtgctggtcctcggatgtcaactgccaaccagggtagctcatggttacaacctcccgtacagctctcacttatccagaactactgaggctccaagctcagtatcaaactgttcacttgcactatgtcctctatgatgtcactgtcatcatcattttacagacacactgcgactccaagtggtcgttactagttcacaatcaagtagctctcgttcatcttctcgttcatcttcaactctatgattaactgcaaaatgttctgctcattttgactagagtcttgaaagatctgcaaaccgacacggcaggactgatgctcagttctctgaccagggatatccagtctcttatgtggggaaactcacgcccaggtctaacctcacacttttaagacagatgagaaggaagggggaaatgttgctacattaggaggaattaattacaaagagaggaagtaactagcttgatagtctcatggagtcaggattaaacgccatgtctgtcctggcgtacgctaagggatggggaaacgtctgggtcccaggctgggtaaatggcaggcccaagccgaattagttcggctcttggtttgactccctcttccctcctgttccaagcgctcgcatgaacctgggtgccagggggattatcagcgtctgcgcaaggccgatggtggcagcgcggcgttaggaatcaggccccctatccctgagcccaacagcctaccgctacagcacccaacgaaaatgggaacaacatgttgagacgctgcagcaacagcaggcgcttcccaccagctacagtcggagatttggagcgcttgtgtctgaggctcaatcccgtcaggtgccgcgcaactcagcggcgcattctctttggacccgaggcaccaccatactttccattgcttacttccgttaaaccccgagcgctgccatggcaagccggaaatagggatgaagcaatttagccagaagagggcggaagtggctactcagggcgccgccatgacgagccggtccggaagaagaggtagggcgccgccgtgacagattagtccccatacgtgctgccgctccccttcttttacccagtgatctagacctagtctaggacctcgggaactaggaccagcctccctccttcttggagatctgaccctcaggattcagcgccttcgctcacgagctccaaccctccgcatgcccaagccccgccctctaagcgtttaggcctcgccccctctcgcgctgcttaggacttcggtccagtcactcttcacccaatctctgcccccagtaccccaggtccggccttcacactgaaatcctaagactacagacttatttagggacctctatgactcctacacccatcntcagagctccaggttcctcccccttgatcaccaaactttaccttttgaaccttccagatctgcctgggaccccagtcctcacctatagggtccacagacttgttcctagaccactntgaccttgcccaggattcccagagcaccaacctcatccagggcttccagacttcacgcccctgggaccttgagtcccgcaccagggccttaggtttcatcttgaagactctttggctaagacactcttccccaggacctgagaccccacctcttggagctctaaacctcacttttagaacccccaaacccattaagggctctcaagctctccctggaattctagatctttcttctaaggccccaagtcttctgtgcatgatccccaggcctactgggggatgcctggatttcaaggcctgtcttctaggaccctgaaggcctaccttacattaatcagactttgttttagaacctccactctctccccagaagctcccctcctgctttacaagccccagggctgggcctcacctctncacttctttggcaccatctcaggatccttcagattcccacatctgccctgaactcctagtcctacttcagacccagaccagaactccctttctttgcggagcaccatagcttatgcctgtaatcctagcactttgggaggtctaagcagggggatcgcttgagcccaggggttcaataccagcctcggcaacatagcaagaccctgtctntacaaaacataaaaaattagctgggcatggtggctcatgcctgtggtcccagctacttaggaggttngggcaggaagatcacttgaatccaggagttggtggctacagtgagctatgatcgtgccactgcactccagcctgggccacagtgagaccctgtctct

SEQ ID NO: 424505 - DNA, 2120 bp, Homo sapiens
ttaatttttcctagttctttaatgagatccctagaaaccgggtttaagacaattgatttttttttttgctttctcggtcagataatttcagaaactccctccctgtgcacctgtgggcattcccacttccacacaccaacaagacaaggttagacagatcttctaaggcagcttctaaggcctttcagcatgtcaaaatgcatctttggggtatccgtttctgagtaccaacaagggaacggaatgggttaagatttcattctctcagtagaggaaaatctagggattcattctacatttgaagccaaaaacagttatctgactccttccagagcctttaaatgttgatcccttcccctcttctcccatcaaacatacacttggaagtttaagaagaatggagggatctcaaggtgtaaagttttctttctgtgcgatgaccagtgctggtcctcggatgtcaactgccaaccagggtagctcatggttacaacctcccgtacagctctcacttatccagaactactgaggctccaagctcagtatcaaactgttcacttgcactatgtcctctatgatgtcactgtcatcatcattttacagacacactgcgactccaagtggtcgttactagttcacaatcaagtagctctcgttcatcttctcgttcatcttcaactctatgattaactgcaaaatgttctgctcattttgactagagtcttgaaagatctgcaaaccgacacggcaggactgatgctcagttctctgaccagggatatccagtctcttatgtggggaaactcacgcccaggtctaacctcacacttttaagacagatgagaaggaagggggaaatgttgctacattaggaggaattaattacaaagagaggaagtaactagcttgatagtctcatggagtcaggattaaacgccatgtctgtcctggcgtacgctaagggatggggaaacgtctgggtcccaggctgggtaaatggcaggcccaagccgaattagttcggctcttggtttgactccctcttccctcctgttccaagcgctcgcatgaacctgggtgccagggggattatcagcgtctgcgcaaggccgatggtggcagcgcggcgttaggaatcaggccccctatccctgagcccaacagcctaccgctacagcacccaacgaaaatgggaacaacatgttgagacgctgcagcaacagcaggcgcttcccaccagctacagtcggagatttggagcgcttgtgtctgaggctcaatcccgtcaggtgccgcgcaactcagcggcgcattctctttggacccgaggcaccaccatactttccattgcttacttccgttaaaccccgagcgctgccatggcaagccggaaatagggatgaagcaatttagccagaagagggcggaagtggctactcagggcgccgccatgacgagccggtccggaagaagaggtagggcgccgccgtgacagattagtcctaaagggaacggggttgttagttcaattggctaccggaaaaaaccaggctgggctgggcgccgccatgacaaccgataccggaaaaggcgggtcgttccccccggacagccctacgccggcaaaggtctcgagatgcaggcggccctagaggtcaccgctcgctactgtggccgggagctggagcagtatggccagtgtgtggcggccaagccggaatcctggcagcgggactgtcactaccttaagatgagcattgcccagtgcacatcctcccacccaatcatccgccagatccgccaggcctgtgctcagccttttgaggccttcgaggagtgtcttcgacagaacgaggcagctgtgggcaactgtgcagagcatatgcgccgcttcctgcagtgcgctgagcaggtgcagccgccacgctcacctgcaactgtggaggcacagccacttcctgcctcctgaggactcctctgacggcaggaaaactggacatgaatgactgcccccccgcccctcccctgcagagtggccagatggagtcctgagccctggacatgggcccggctttcctggatatcaggacttccaataaataaagactctgtatactggg

SEQ ID NO: 424506 - DNA, 2885 bp, Homo sapiens
  misc_feature (1978)..(1978): n is a, c, g, or t
  misc_feature (2094)..(2094): n is a, c, g, or t
  misc_feature (2511)..(2511): n is a, c, g, or t
  misc_feature (2721)..(2721): n is a, c, g, or t
  misc_feature (2788)..(2788): n is a, c, g, or t
ttaatttttcctagttctttaatgagatccctagaaaccgggtttaagacaattgatttttttttttgctttctcggtcagataatttcagaaactccctccctgtgcacctgtgggcattcccacttccacacaccaacaagacaaggttagacagatcttctaaggcagcttctaaggcctttcagcatgtcaaaatgcatctttggggtatccgtttctgagtaccaacaagggaacggaatgggttaagatttcattctctcagtagaggaaaatctagggattcattctacatttgaagccaaaaacagttatctgactccttccagagcctttaaatgttgatcccttcccctcttctcccatcaaacatacacttggaagtttaagaagaatggagggatctcaaggtgtaaagttttctttctgtgcgatgaccagtgctggtcctcggatgtcaactgccaaccagggtagctcatggttacaacctcccgtacagctctcacttatccagaactactgaggctccaagctcagtatcaaactgttcacttgcactatgtcctctatgatgtcactgtcatcatcattttacagacacactgcgactccaagtggtcgttactagttcacaatcaagtagctctcgttcatcttctcgttcatcttcaactctatgattaactgcaaaatgttctgctcattttgactagagtcttgaaagatctgcaaaccgacacggcaggactgatgctcagttctctgaccagggatatccagtctcttatgtggggaaactcacgcccaggtctaacctcacacttttaagacagatgagaaggaagggggaaatgttgctacattaggaggaattaattacaaagagaggaagtaactagcttgatagtctcatggagtcaggattaaacgccatgtctgtcctggcgtacgctaagggatggggaaacgtctgggtcccaggctgggtaaatggcaggcccaagccgaattagttcggctcttggtttgactccctcttccctcctgttccaagcgctcgcatgaacctgggtgccagggggattatcagcgtctgcgcaaggccgatggtggcagcgcggcgttaggaatcaggccccctatccctgagcccaacagcctaccgctacagcacccaacgaaaatgggaacaacatgttgagacgctgcagcaacagcaggcgcttcccaccagctacagtcggagatttggagcgcttgtgtctgaggctcaatcccgtcaggtgccgcgcaactcagcggcgcattctctttggacccgaggcaccaccatactttccattgcttacttccgttaaaccccgagcgctgccatggcaagccggaaatagggatgaagcaatttagccagaagagggcggaagtggctactcagggcgccgccatgacgagccggtccggaagaagaggtagggcgccgccgtgacagattagtcctaaagggaacggggttgttagttcaattggctaccggaaaaaaccaggctgggctgggcgccgccatgacaaccgataccggaaaaggcgggtcgttccccccggacagccctacgccggcaaaggtctcgagatgtgagtagtgagagcgcctaccccatacgtgctgccgctccccttcttttacccagtgatctagacctagtctaggacctcgggaactaggaccagcctccctccttcttggagatctgaccctcaggattcagcgccttcgctcacgagctccaaccctccgcatgcccaagccccgccctctaagcgtttaggcctcgccccctctcgcgctgcttaggacttcggtccagtcactcttcacccaatctctgcccccagtaccccaggtccggccttcacactgaaatcctaagactacagacttatttagggacctctatgactcctacacccatcntcagagctccaggttcctcccccttgatcaccaaactttaccttttgaaccttccagatctgcctgggaccccagtcctcacctatagggtccacagacttgttcctagaccactntgaccttgcccaggattcccagagcaccaacctcatccagggcttccagacttcacgcccctgggaccttgagtcccgcaccagggccttaggtttcatcttgaagactctttggctaagacactcttccccaggacctgagaccccacctcttggagctctaaacctcacttttagaacccccaaacccattaagggctctcaagctctccctggaattctagatctttcttctaaggccccaagtcttctgtgcatgatccccaggcctactgggggatgcctggatttcaaggcctgtcttctaggaccctgaaggcctaccttacattaatcagactttgttttagaacctccactctctccccagaagctcccctcctgctttacaagccccagggctgggcctcacctctncacttctttggcaccatctcaggatccttcagattcccacatctgccctgaactcctagtcctacttcagacccagaccagaactccctttctttgcggagcaccatagcttatgcctgtaatcctagcactttgggaggtctaagcagggggatcgcttgagcccaggggttcaataccagcctcggcaacatagcaagaccctgtctntacaaaacataaaaaattagctgggcatggtggctcatgcctgtggtcccagctacttaggaggttngggcaggaagatcacttgaatccaggagttggtggctacagtgagctatgatcgtgccactgcactccagcctgggccacagtgagaccctgtctct

SEQ ID NO: 424507 - DNA, 2313 bp, Homo sapiens
  misc_feature (2187)..(2187): n is a, c, g, or t
  misc_feature (2215)..(2215): n is a, c, g, or t
ttaatttttcctagttctttaatgagatccctagaaaccgggtttaagacaattgatttttttttttgctttctcggtcagataatttcagaaactccctccctgtgcacctgtgggcattcccacttccacacaccaacaagacaaggttagacagatcttctaaggcagcttctaaggcctttcagcatgtcaaaatgcatctttggggtatccgtttctgagtaccaacaagggaacggaatgggttaagatttcattctctcagtagaggaaaatctagggattcattctacatttgaagccaaaaacagttatctgactccttccagagcctttaaatgttgatcccttcccctcttctcccatcaaacatacacttggaagtttaagaagaatggagggatctcaaggtgtaaagttttctttctgtgcgatgaccagtgctggtcctcggatgtcaactgccaaccagggtagctcatggttacaacctcccgtacagctctcacttatccagaactactgaggctccaagctcagtatcaaactgttcacttgcactatgtcctctatgatgtcactgtcatcatcattttacagacacactgcgactccaagtggtcgttactagttcacaatcaagtagctctcgttcatcttctcgttcatcttcaactctatgattaactgcaaaatgttctgctcattttgactagagtcttgaaagatctgcaaaccgacacggcaggactgatgctcagttctctgaccagggatatccagtctcttatgtggggaaactcacgcccaggtctaacctcacacttttaagacagatgagaaggaagggggaaatgttgctacattaggaggaattaattacaaagagaggaagtaactagcttgatagtctcatggagtcaggattaaacgccatgtctgtcctggcgtacgctaagggatggggaaacgtctgggtcccaggctgggtaaatggcaggcccaagccgaattagttcggctcttggtttgactccctcttccctcctgttccaagcgctcgcatgaacctgggtgccagggggattatcagcgtctgcgcaaggccgatggtggcagcgcggcgttaggaatcaggccccctatccctgagcccaacagcctaccgctacagcacccaacgaaaatgggaacaacatgttgagacgctgcagcaacagcaggcgcttcccaccagctacagtcggagatttggagcgcttgtgtctgaggctcaatcccgtcaggtgccgcgcaactcagcggcgcattctctttggacccgaggcaccaccatactttccattgcttacttccgttaaaccccgagcgctgccatggcaagccggaaatagggatgaagcaatttagccagaagagggcggaagtggctactcagggcgccgccatgacgagccggtccggaagaagaggtagggcgccgccgtgacagattagtcctaaagggaacggggttgttagttcaattggctaccggaaaaaaccaggctgggctgggcgccgccatgacaaccgataccggaaaaggcgggtcgttccccccggacagccctacgccggcaaaggtctcgagatgcaggcggccctagaggtcaccgctcgctactgtggccgggagctggagcagtatggccagtgtgtggcggccaagccggaatcctggcagcgggactgtcactaccttaagatgagcattgcccagtgcacatcctcccacccaatcatccgccagatccgccaggcctgtgctcagccttttgaggccttcgaggagtgtcttcgacagaacgaggcagctgtgggcaactgtgcagagcatatgcgccgcttcctgcagtgcgctgagcaggtgcagccgccacgctcacctgcaactgtggaggcccctctgctgccagtctgctggtgtttgctggaggtcccctcctgaccctgttttcctgggtatcaccagtggaggctgcaaagcagcaaagattgctgcttgttctttcctctggaagcttcgacccagcagggaacctgccagatgccagccagagctcttctgtatgaggtgtctgtcagccccaactgggaggtgtctcccagtcagtatacacaggggtcagggatccacttgangaggcagtctggccttagcaggctcgcntgctgtgtgggagatccgctgctgtcttcagagccatcaggcagggacgtttaagtctgctacaagcctgactggggctgctgcctttttttacagag

SEQ ID NO: 424508 - DNA, 651 bp, Homo sapiens
cggcattgacagcggcgaaagagtagcgcgcatgacagatatctaagggaacggtgtagtcatggctacggaaaaaaccaggctgggctgggcgccgccatgacaaccgataccggaaaaggcgggtcgttccccccggacagccctacgccggcaaaggtctcgagatgcaggcggccctagaggtcaccgctcgctactgtggccgggagctggagcagtatggccagtgtgtggcggccaagccggaatcctggcagcgggactgtcactaccttaagatgagcattgcccagtgcacatcctcccacccaatcatccgccagatccgccaggcctgtgctcagccttttgaggccttcgaggagtgtcttcgacagaacgaggcagctgtgggcaactgtgcagagcatatgcgccgcttcctgcagtgcgctgagcaggtgcagccgccacgctcacctgcaactgtggaggcacagccacttcctgcctcctgaggactcctctgacggcaggaaaactggacatgaatgactgcccccccgcccctcccctgcagagtggccagatggagtcctgagccctggacatgggcccggctttcctggatatcaggacttccaataaataaagactctgtatactggg

SEQ ID NO: 424509 - DNA, 510 bp, Homo sapiens
atgatcctcagcccatcctgtcccacaggcaggcggccctagaggtcaccgctcgctactgtggccgggagctggagcagtatggccagtgtgtggcggccaagccggaatcctggcagcgggactgtcactaccttaagatgagcattgcccagtgcacatcctcccacccaatcatccgccagatccgccaggcctgtgctcagccttttgaggccttcgaggagtgtcttcgacagaacgaggcagctgtgggcaactgtgcagagcatatgcgccgcttcctgcagtgcgctgagcaggtgcagccgccacgctcacctgcaactgtggaggcacagccacttcctgcctcctgaggactcctctgacggcaggaaaactggacatgaatgactgcccccccgcccctcccctgcagagtggccagatggagtcctgagccctggacatgggcccggctttcctggatatcaggacttccaataaataaagactctgtatactggg

SEQ ID NO: 424510 - DNA, 2205 bp, Homo sapiens
ttaatttttcctagttctttaatgagatccctagaaaccgggtttaagacaattgatttttttttttgctttctcggtcagataatttcagaaactccctccctgtgcacctgtgggcattcccacttccacacaccaacaagacaaggttagacagatcttctaaggcagcttctaaggcctttcagcatgtcaaaatgcatctttggggtatccgtttctgagtaccaacaagggaacggaatgggttaagatttcattctctcagtagaggaaaatctagggattcattctacatttgaagccaaaaacagttatctgactccttccagagcctttaaatgttgatcccttcccctcttctcccatcaaacatacacttggaagtttaagaagaatggagggatctcaaggtgtaaagttttctttctgtgcgatgaccagtgctggtcctcggatgtcaactgccaaccagggtagctcatggttacaacctcccgtacagctctcacttatccagaactactgaggctccaagctcagtatcaaactgttcacttgcactatgtcctctatgatgtcactgtcatcatcattttacagacacactgcgactccaagtggtcgttactagttcacaatcaagtagctctcgttcatcttctcgttcatcttcaactctatgattaactgcaaaatgttctgctcattttgactagagtcttgaaagatctgcaaaccgacacggcaggactgatgctcagttctctgaccagggatatccagtctcttatgtggggaaactcacgcccaggtctaacctcacacttttaagacagatgagaaggaagggggaaatgttgctacattaggaggaattaattacaaagagaggaagtaactagcttgatagtctcatggagtcaggattaaacgccatgtctgtcctggcgtacgctaagggatggggaaacgtctgggtcccaggctgggtaaatggcaggcccaagccgaattagttcggctcttggtttgactccctcttccctcctgttccaagcgctcgcatgaacctgggtgccagggggattatcagcgtctgcgcaaggccgatggtggcagcgcggcgttaggaatcaggccccctatccctgagcccaacagcctaccgctacagcacccaacgaaaatgggaacaacatgttgagacgctgcagcaacagcaggcgcttcccaccagctacagtcggagatttggagcgcttgtgtctgaggctcaatcccgtcaggtgccgcgcaactcagcggcgcattctctttggacccgaggcaccaccatactttccattgcttacttccgttaaaccccgagcgctgccatggcaagccggaaatagggatgaagcaatttagccagaagagggcggaagtggctactcagggcgccgccatgacgagccggtccggaagaagaggtagggcgccgccgtgacagattagtcctaaagggaacggggttgttagttcaattggctaccggaaaaaaccaggctgggctgggcgccgccatgacaaccgataccggaaaaggcgggtcgttccccccggacagccctacgccggcaaaggtctcgagatgcaggcggccctagaggtcaccgctcgctactgtggccgggagctggagcagtatggccagtgtgtggcggccaagccggaatcctggcagcgggactgtcactaccttaagatgagcattgcccagtgcacatcctcccagtgagtgcgggcaagtatgagacagtgtggggggtgggcagtggggtgggaatctcccaggggctgaactgccctacccccacagcccaatcatccgccagatccgccaggcctgtgctcagccttttgaggccttcgaggagtgtcttcgacagaacgaggcagctgtgggcaactgtgcagagcatatgcgccgcttcctgcagtgcgctgagcaggtgcagccgccacgctcacctgcaactgtggaggcacagccacttcctgcctcctgaggactcctctgacggcaggaaaactggacatgaatgactgcccccccgcccctcccctgcagagtggccagatggagtcctgagccctggacatgggcccggctttcctggatatcaggacttccaataaataaagactctgtatactggg

SEQ ID NO: 424511 - DNA, 2492 bp, Homo sapiens
ttaatttttcctagttctttaatgagatccctagaaaccgggtttaagacaattgatttttttttttgctttctcggtcagataatttcagaaactccctccctgtgcacctgtgggcattcccacttccacacaccaacaagacaaggttagacagatcttctaaggcagcttctaaggcctttcagcatgtcaaaatgcatctttggggtatccgtttctgagtaccaacaagggaacggaatgggttaagatttcattctctcagtagaggaaaatctagggattcattctacatttgaagccaaaaacagttatctgactccttccagagcctttaaatgttgatcccttcccctcttctcccatcaaacatacacttggaagtttaagaagaatggagggatctcaaggtgtaaagttttctttctgtgcgatgaccagtgctggtcctcggatgtcaactgccaaccagggtagctcatggttacaacctcccgtacagctctcacttatccagaactactgaggctccaagctcagtatcaaactgttcacttgcactatgtcctctatgatgtcactgtcatcatcattttacagacacactgcgactccaagtggtcgttactagttcacaatcaagtagctctcgttcatcttctcgttcatcttcaactctatgattaactgcaaaatgttctgctcattttgactagagtcttgaaagatctgcaaaccgacacggcaggactgatgctcagttctctgaccagggatatccagtctcttatgtggggaaactcacgcccaggtctaacctcacacttttaagacagatgagaaggaagggggaaatgttgctacattaggaggaattaattacaaagagaggaagtaactagcttgatagtctcatggagtcaggattaaacgccatgtctgtcctggcgtacgctaagggatggggaaacgtctgggtcccaggctgggtaaatggcaggcccaagccgaattagttcggctcttggtttgactccctcttccctcctgttccaagcgctcgcatgaacctgggtgccagggggattatcagcgtctgcgcaaggccgatggtggcagcgcggcgttaggaatcaggccccctatccctgagcccaacagcctaccgctacagcacccaacgaaaatgggaacaacatgttgagacgctgcagcaacagcaggcgcttcccaccagctacagtcggagatttggagcgcttgtgtctgaggctcaatcccgtcaggtgccgcgcaactcagcggcgcattctctttggacccgaggcaccaccatactttccattgcttacttccgttaaaccccgagcgctgccatggcaagccggaaatagggatgaagcaatttagccagaagagggcggaagtggctactcagggcgccgccatgacgagccggtccggaagaagaggtagggcgccgccgtgacagattagtcctaaagggaacggggttgttagttcaattggctaccggaaaaaaccaggctgggctgggcgccgccatgacaaccgataccggaaaaggcgggtcgttccccccggacagccctacgccggcaaaggtctcgagatgcaggcggccctagaggtcaccgctcgctactgtggccgggagctggagcagtatggccagtgtgtggcggccaagccggaatcctggcagcgggactgtcactaccttaagatgagcattgcccagtgcacatcctcccacccaatcatccgccagatccgccaggcctgtgctcagccttttgaggccttcgaggagtgtcttcgacagaacgaggcagctgtgggcaactgtgcagagcatatgcgccgcttcctgcagtgcgctgagcaggtgcagccgccacgctcacctgcaactgtggaggcacagccacttcctgcctcctgaggactcctctgacggcaggaaaactggacatgaatgactgcccccccgcccctcccctgcagagtggccagatggagtcctgagccctggacatgggcccggctttcctggatatcaggacttccaataaataaagactctgtatactgggaaaaaaaaaaaaacaaaaaaaaaaaaaaaaaaaaaaaaaaacgggggttttttggggggggggaaaaaaggtaagggcggtgtaaagcgtgtgcccagacccccagtttttttgcacagcggggagactggggggccccccaaaggggaggcgaataaattcggaacagcgggtaccttgtaagagttctcctagcaccccccggatatacacggccatcaaaccgggtttttcgggacagacaagctttctgcaacactttgcgagagtctctttcgtacaccgacaacctgctcaccgcggtgggccacagtcaaaggagccattcttccaggtctctgtttctcagtgtccattttgttttcgttcgca

SEQ ID NO: 424512 - DNA, 2162 bp, Homo sapiens
ttaatttttcctagttctttaatgagatccctagaaaccgggtttaagacaattgatttttttttttgctttctcggtcagataatttcagaaactccctccctgtgcacctgtgggcattcccacttccacacaccaacaagacaaggttagacagatcttctaaggcagcttctaaggcctttcagcatgtcaaaatgcatctttggggtatccgtttctgagtaccaacaagggaacggaatgggttaagatttcattctctcagtagaggaaaatctagggattcattctacatttgaagccaaaaacagttatctgactccttccagagcctttaaatgttgatcccttcccctcttctcccatcaaacatacacttggaagtttaagaagaatggagggatctcaaggtgtaaagttttctttctgtgcgatgaccagtgctggtcctcggatgtcaactgccaaccagggtagctcatggttacaacctcccgtacagctctcacttatccagaactactgaggctccaagctcagtatcaaactgttcacttgcactatgtcctctatgatgtcactgtcatcatcattttacagacacactgcgactccaagtggtcgttactagttcacaatcaagtagctctcgttcatcttctcgttcatcttcaactctatgattaactgcaaaatgttctgctcattttgactagagtcttgaaagatctgcaaaccgacacggcaggactgatgctcagttctctgaccagggatatccagtctcttatgtggggaaactcacgcccaggtctaacctcacacttttaagacagatgagaaggaagggggaaatgttgctacattaggaggaattaattacaaagagaggaagtaactagcttgatagtctcatggagtcaggattaaacgccatgtctgtcctggcgtacgctaagggatggggaaacgtctgggtcccaggctgggtaaatggcaggcccaagccgaattagttcggctcttggtttgactccctcttccctcctgttccaagcgctcgcatgaacctgggtgccagggggattatcagcgtctgcgcaaggccgatggtggcagcgcggcgttaggaatcaggccccctatccctgagcccaacagcctaccgctacagcacccaacgaaaatgggaacaacatgttgagacgctgcagcaacagcaggcgcttcccaccagctacagtcggagatttggagcgcttgtgtctgaggctcaatcccgtcaggtgccgcgcaactcagcggcgcattctctttggacccgaggcaccaccatactttccattgcttacttccgttaaaccccgagcgctgccatggcaagccggaaatagggatgaagcaatttagccagaagagggcggaagtggctactcagggcgccgccatgacgagccggtccggaagaagaggtagggcgccgccgtgacagattagtcctaaagggaacggggttgttagttcaattggctaccggaaaaaaccaggctgggctgggcgccgccatgacaaccgataccggaaaaggcgggtcgttccccccggacagccctacgccggcaaaggtctcgagatgcaggcggccctagaggtcaccgctcgctactgtggccgggagctggagcagtatggccagtgtgtggcggccaagccggaatcctggcagcgggactgtcactaccttaagatgagcattgcccagtgcacatcctcccacccaatcatccgccagatccgccaggcctgtgctcagccttttgaggccttcgaggagtgtcttcgacagaacgaggcagctgtgggcaactgtgcagagcatatgcgccgcttcctgcagtgcgctgagcaggtgcagccgccacgctcacctgcaactgtggaggcacagccacttcctgcctcctgaggactcctctgacggcaggaaggccctcgacatgaatcatatccagtgccttcatgcccctctgctttcctctggccacccttccccttctttcacgtgttccctcgcgttaacagccaccgaatgctaagtgcaagaaagaggccccctatgcattggtcaaatgcgtggggatgaaagccctcgacatgaa

SEQ ID NO: 424513 - DNA, 346 bp, Homo sapiens
cttccctacaaggaaataactctaatgcaaatcaggacgcagatagaggaaactttggttttcttttctttttttcaatttcttactttctttttaaactcatctaagtgggctcaaaagtcttaccaaaatcctgctctacaaggtgttaatgaggtatagtgtgtggtatatggtatgtgaaagagcagttttttttttcttttttgtctgtggggtctttgtccacgtttcacactgtttttaaagagttctgaaatgaattaaagttaactatttttgtggcataagttttgataccagcccttttctttaaagaaagcattatgagataaagtcttgcttt

SEQ ID NO: 424514 - DNA, 590 bp, Homo sapiens
gctagcaccatgagcttcaataccctgtgcctgctactaaatgaattgcggtgggtgaggtggcagctggggacccctctgtcctgtgtcccctgccatgtccctgtctgacccaggcctggggtaccaccccacgtgctggacccgtcgcacccactgcctcttcccttctcgcttgggaactctagtctcgcctcgggttgcaatggaccccaactgctcctgtgccgctgcaggtgtctcctgcacctgcgccagctcctgcaagtgcaaagagtgcaaatgcacctcctgcaagaagagctgctgctcctgctgccctgtgggctgtgccaagtgtgcccagggctgcatctgcaaaggggcatcggagaagtgcagctgctgcgcctgatgtcgggacagccctgctcccaagtacaaatagagtgacccgtaaaatccaggattttttgttttttgctacaatcttgacccctttgctacattcctttttttctgtgaaatatgtgaataataattaaacacttagacttgaaaaaaaaaaagtcgacgcggccgcgaatttagtagtagtaggaggcggccgc

SEQ ID NO: 424515 - DNA, 426 bp, Homo sapiens
agcggccgcctactactactaaattcgcggccgcgtcgcacccactgcctcttcccttctcgcttgggaactctagtctcgcctcgggttgcaatggaccccaactgctcctgtgccgctgcaggtgtctcctgcacctgcgccagctcctgcaagtgcaaagagtgcaaatgcacctcctgcaagaagagctgctgctcctgctgccctgtgggctgtgccaagtgtgcccagggctgcatctgcaaaggggcatcggagaagtgcagctgctgcgcctgatgtcgggacagccctgctcccaagtacaaatagagtgacccgtaaaatccaggattttttgttttttgctacaatcttgacccctttgctacattcctttttttctgtgaaatatgtgaataataattaaacacttagacttga

SEQ ID NO: 424516 - DNA, 478 bp, Homo sapiens
agcggccgcctactactactaaattcgcggccgcgtcgcacccactgcctcttcccttctcgcttgggaactctagtctcgcctcgggttgcaatggaccccaactgctcctgtgccgctgcaggtgtctcctgcacctgcgccagctcctgcaagtgcaaagagtgcaaatgcacctcctgcaagaagagctgctgctcctgctgccctgtgggctgtgccaagtgtgcccagggctgcatctgcaaaggggcatcggagaagtgcagctgctgcgcctgatgtcgggacagccctgctcccaagtacaaatagagtgacccgtaaaatccaggattttttgttttttgctacaatcttgacccctttgctacattcctttttttctgtgaaatatgtgaataataattaaacacttagacttgaaaaaaaaaaagtcgacgcggccgcgaatttagtagtagtaggaggcggccgc

SEQ ID NO: 424517 - DNA, 379 bp, Homo sapiens
agcggccgcctactactactaaattcgcggccgcgtcgacgttgcaatggaccccaactgctcctgtgccgctgcaggtgtctcctgcacctgcgccagctcctgcaagtgcaaagagtgcaaatgcacctcctgcaagaagagctgctgctcctgctgccctgtgggctgtgccaagtgtgcccagggctgcatctgcaaaggggcatcggagaagtgcagctgctgcgcctgatgtcgggacagccctgctcccaagtacaaatagagtgacccgtaaaatccaggattttttgttttttgctacaatcttgacccctttgctacattcctttttttctgtgaaatatgtgaataataattaaacacttagacttga

SEQ ID NO: 424518 - DNA, 538 bp, Homo sapiens
gctagcaccatgagcttcaataccctgtgcctgctactaaatgaattgcggtgggtgaggtggcagctggggacccctctgtcctgtgtcccctgccatgtccctgtctgacccaggcctggggtaccaccccacgtgctggacccgtcgcacccactgcctcttcccttctcgcttgggaactctagtctcgcctcgggttgcaatggaccccaactgctcctgtgccgctgcaggtgtctcctgcacctgcgccagctcctgcaagtgcaaagagtgcaaatgcacctcctgcaagaagagctgctgctcctgctgccctgtgggctgtgccaagtgtgcccagggctgcatctgcaaaggggcatcggagaagtgcagctgctgcgcctgatgtcgggacagccctgctcccaagtacaaatagagtgacccgtaaaatccaggattttttgttttttgctacaatcttgacccctttgctacattcctttttttctgtgaaatatgtgaataataattaaacacttagacttga

SEQ ID NO: 424519 - DNA, 1352 bp, Homo sapiens
agcggccgcctactactactaaattcgcggccgcgtcgcacccactgcctcttcccttctcgcttgggaactctagtctcgcctcgggttgcaatggaccccaactgctcctgtgccgctggtaagggacgcccgggttctgtgccttgggatgccaaattcccagacaccatagagagtgtccctgggtttgaggaggtcgtattttgctatcagaggtaaaggggactcctttattggtccagtgctttcctgttggccaagctcctgagggcattttcctcctccctgttcctctatgtcagagttgagggtcctgaggctcaaggctgtcctgctccacgtcacctggttggtcacagggctgctggctgagccccaattctctaacctgactctgagctaccggattggataggagacattggataggaggggacattgcctcttccaggttcaggacagaaagtcgaagtcttcctgggccatgtctgcagcctgggactttcctttggagtagaaataggagggtgcttggttttcccagcatgaatggagaggacatggggcttctcttcctctgctctgagtgggaaaggagctctgagggctggctctgcacagagaagggggaagtggacactcattgacccactgctgtaccttctgcatctcactcaccgttcactggctttttctcttctagcaggtgtctcctgcacctgcgccagctcctgcaagtgcaaagagtgcaaatgcacctcctgcaagaagagtgagtgcggggccatctccaggaatctggggctgtggctaaggttgggagggaacccaaggctgtccctgagtgcgtgcttctggggaaccggccttcctttgtccctgtaggttgtcactgcctgtctagtcttctgcactttccagggcttatgtgaggtggggcagctttctcaaaggaagacccattccaatgtccaccagttgtctcctgacaaaaaccatgccatcatgaactaagggtcctctggggctggagggatggagacaggcctctgttggggcagggagttctctgatcgagtctgctctgacctctcaatctcctttcctccccaggctgctgctcctgctgccctgtgggctgtgccaagtgtgcccagggctgcatctgcaaaggggcatcggagaagtgcagctgctgcgcctgatgtcgggacagccctgctcccaagtacaaatagagtgacccgtaaaatccaggattttttgttttttgctacaatcttgacccctttgctacattcctttttttctgtgaaatatgtgaataataattaaacacttagacttga

SEQ ID NO: 424520 - DNA, 1403 bp, Homo sapiens
  misc_feature (339)..(339): n is a, c, g, or t
aaggctgtacgcgtcggatacgggatgtgtgcccgtcgcacccactgcctcttcccttctcgcttgggaactctagtctcgcctcgggttgcaatggaccccaactgctcctgtgccgctggtaagggacgcccgggttctgtgccttgggatgccaaattcccagacaccatagagagtgtccctgggtttgaggaggtcgtattttgctatcagaggtaaaggggactcctttattggtccagtgctttccgtgtagggcgaagacatctcgtgtagggctgttgtatccttccgtccacatggtatccctctaatgtctagtaggtggtagagganacatgtagcgactcaaagtgactgttacatgagtactctacagtcgactctggatggtgatcatcatgggcatgcttggctgatcctcctgtgcttcataatcatgagtctgagctaccggattggataggagacattggataggaggggacattgcctcttccaggttcaggacagaaagtcgaagtcttcctgggccatgtctgcagcctgggactttcctttggagtagaaataggagggtgcttggttttcccagcatgaatggagaggacatggggcttctcttcctctgctctgagtgggaaaggagctctgagggctggctctgcacagagaagggggaagtggacactcattgacccactgctgtaccttctgcatctcactcaccgttcactggctttttctcttctagcaggtgtctcctgcacctgcgccagctcctgcaagtgcaaagagtgcaaatgcacctcctgcaagaagagtgagtgcggggccatctccaggaatctggggctgtggctaaggttgggagggaacccaaggctgtccctgagtgcgtgcttctggggaaccggccttcctttgtccctgtaggttgtcactgcctgtctagtcttctgcactttccagggcttatgtgaggtggggcagctttctcaaaggaagacccattccaatgtccaccagttgtctcctgacaaaaaccatgccatcatgaactaagggtcctctggggctggagggatggagacaggcctctgttggggcagggagttctctgatcgagtctgctctgacctctcaatctcctttcctccccaggctgctgctcctgctgccctgtgggctgtgccaagtgtgcccagggctgcatctgcaaaggggcatcggagaagtgcagctgctgcgcctgatgtcgggacagccctgctcccaagtacaaatagagtgacccgtaaaatccaggattttttgttttttgctacaatcttgacccctttgctacattcctttttttctgtgaaatatgtgaataataattaaacacttagacttga

SEQ ID NO: 424521 - DNA, 827 bp, Homo sapiens
cgctggctgttgggctccactccgccttccagtcgcacccactgcctcttcccttctcgcttgggaactctagtctcgcctcgggttgcaatggaccccaactgctcctgtgccgctggtaagggacgcccgggttctgtgccttgggatgccaaattcccagacaccatagagagtgtccctgggtttgaggaggtcgtattttgctatcagaggtaaaggggactcctttattggtccagtgctttcctgttggccaagctcctgagggcattttcctcctccctgttcctctatgtcagagttgagggtcctgaggctcaaggctgtcctgctccacgtcacctggttggtcacagggctgctggctgagccccaattctctaacctgactctgagctaccggattggataggagacattggataggaggggacattgcctcttccaggttcaggacagaaagtcgaagtcttcctgggccatgtctgcagcctgggactttcctttggagtagaaataggagggtgcttggttttcccagcatgaatggagaggacatggggcttctcttcctctgctctgagtgggaaaggagctctgagggctggctctgcacagagaagggggaagtggacactcattgacccactgctgtaccttctgcatctcactcaccgttcactggctttttctcttctagcaggtgtctcctgcacctgcgccagctcctgcaagtgcaaagagtgcaaatgcacctcctgcaagaagagtgagtgcggggccatctccaggaatctggggctgtggctaaggttgggagggaa

SEQ ID NO: 424522 - DNA, 292 bp, Homo sapiens
gctgccaggaattcggcacgagaaaactatcagctgacaaccagctcttacacctgctctaccacacaatattattaatagtttttatgatgatcctcttcaaccctgaggtcttaattgtgagatggattcttgaacctccttcctccaccaggatttgaagtaatgagagatatcatcagaaaaatgttttacggtggctgcttgtactttatgtgtgtatattgtatgttgagacataagtcaaataaaatccacagatattaaacgaacacctactatgtgcaaaaaa

SEQ ID NO: 424523 - DNA, 1624 bp, Homo sapiens
  misc_feature (4)..(4): n is a, c, g, or t
  misc_feature (6)..(6): n is a, c, g, or t
  misc_feature (8)..(8): n is a, c, g, or t
ggcncngncacaaagagcggggcggagaggcagctgcggggggagccggcggccgctgctgccgcccagggctctggggccccgccggccaggcccgccgtccgcggccagtgcccttcctcctcctcctcctctgccgccgcctcctcagtcgccgccgcctcctcagtcgccgccgcccgcgccgcccgcgccctccgcgcgcctctgagcccgcgccgggccgcgccggccccttcccatgcgggcggcgcgggccctgggaggggcgcccggagccagccgcgcagcatgcactggggggttggctttgcttcgtccaggccgtgcgtggtggatctgagctggaaccagagcatctccttcttcggctggtgggccgggtccgaggagcccttctccttttatggggacatcatcgctttccctttgcaggattacggtgggatcatggcagggctgggctccgatccctggtggaagaaaaccctttacttgaccgggggagctttgctggccgcagctgcgtatctgctccacgaactcctggtcattaggaaacagcaagagattgactctaaagatgctattattttgcatcagtttgcaagacctaacaatggtgttccaagtttatctcctttctgtttaaagatggaaacttatttaaggatggctgacttaccgtatcaggtgataagaagtacatcatggggcccaagctttccactcttgacgccactgtctttggacacttggcacaggcaatgtggaccttaccagggacaagacccgaacggctgatcaaaggtgagctgatcaaccttgccatgtactgtgagaggataaggaggaaattttggccagagtggcaccacgatgatgacaataccatctatgagtctgaggagagcagcgaaggcagcaaaacccacaccccgctgctggattttagcttttactcaaggacagagacctttgaagatgagggagcagaaaacagtttttccagaaccccagacacagattttactggacactcactctttgattcggatgtggacatggatgactatacagaccacgaacagtgcaagtgacgtccagcctcactgaccctcttccttgggacctgccactccctgggtcggtccattttcccaggtagcaatccatccgagctgggaggagatcttcgtgcttggcagagttttcacatgctaactggactatagcagccttatttcttttttgtacaaacaaaacacagaaccattcagatgactccattgaaaacaaacaggcaaaaaataatgtcagcatggttcctgaaatccatttttgttttcattagaaaactattaataatattgtgtggtagagcaggtgtaagagctggttgtcagctgatagtttttatgatgatcctcttcaaccctgaggtcttaattgtgagatggattcttgaacctccttcctccaccaggatttgaagtaatgagagatatcatcagaaaaatgttttacggtggctgcttgtactttatgtgtgtatattgtatgttgagacataagtcaaataaaatccacagatattaaacgaacacctactatgtgcaaaaaa

SEQ ID NO: 424524 - DNA, 1657 bp, Homo sapiens
gcccccgcctggtggcgtctcctgcccgcagctccgcgccgccccaggattacggtgggatcatggcagggctgggctccgatccctggtggaagaaaaccctttacttgaccgggggagctttgctggccgcagctgcgtatctgctccacgaactcctggtcattaggaaacagcaagagattgactctaaagatgctattattttgcatcagtttgcaagacctaacaatggtgttccaagtttatctcctttctgtttaaagatggaaacttatttaaggatggctgacttaccgtatcagaactattttggtggaaaactctctgctcaagggaaaatgccttggattgaatataatcatgaaaaagtttctggcacagaattcataattgactttctggaagagaagcttggagtgaatttaaacaaaaaccttggccctcatgaaagagccatctccagagcggtgaccaagatggtggaggagcacttctactggacgttagcttattgccagtgggtggacaatctcaatgagacccggaagatgctctctcttagtggtggtggtcccttcagcaacctgctgaggtgggttgtgtgccacataacgaaaggaattgtgaaacgcgagatgcacggccacggcattggccgcttctccgaggaagagatttacatgctgatggagaaggacatgcggtctttagcagggcttttgggtgataagaagtacatcatggggcccaagctttccactcttgacgccactgtctttggacacttggcacaggcaatgtggaccttaccagggacaagacccgaacggctgatcaaaggtgagctgatcaaccttgccatgtactgtgagaggataaggaggaaattttggccagagtggcaccacgatgatgacaataccatctatgagtctgaggagagcagcgaaggcagcaaaacccacaccccgctgctggattttagcttttactcaaggacagagacctttgaagatgagggagcagaaaacagtttttccagaaccccagacacagattttactggacactcactctttgattcggatgtggacatggatgactatacagaccacgaacagtgcaagtgacgtccagcctcactgaccctcttccttgggacctgccactccctgggtcggtccattttcccaggtagcaatccatccgagctgggaggagatcttcgtgcttggcagagttttcacatgctaactggactatagcagccttatttcttttttgtacaaacaaaacacagaaccattcagatgactccattgaaaacaaacaggcaaaaaataatgtcagcatggttcctgaaatccatttttgttttcattagaaaactattaataatattgtgtggtagagcaggtgtaagagctggttgtcagctgatagtttttatgatgatcctcttcaaccctgaggtcttaattgtgagatggattcttgaacctccttcctccaccaggatttgaagtaatgagagatatcatcagaaaaatgttttacggtggctgcttgtactttatgtgtgtatattgtatgttgagacataagtcaaataaaatccacagatattaaacgaacacctactatgtgcaaaaaa

SEQ ID NO: 424525 - DNA, 1537 bp, Homo sapiens
ggcggaggcggccggaccgcggagatgcggggagggggcagggcgcggggaaacagcaagagattgactctaaagatgctattattttgcatcagtttgcaagacctaacaatggtgttccaagtttatctcctttctgtttaaagatggaaacttatttaaggatggctgacttaccgtatcagaactattttggtggaaaactctctgctcaagggaaaatgccttggattgaatataatcatgaaaaagtttctggcacagaattcataattgactttctggaagagaagcttggagtgaatttaaacaaaaaccttggccctcatgaaagagccatctccagagcggtgaccaagatggtggaggagcacttctactggacgttagcttattgccagtgggtggacaatctcaatgagacccggaagatgctctctcttagtggtggtggtcccttcagcaacctgctgaggtgggttgtgtgccacataacgaaaggaattgtgaaacgcgagatgcacggccacggcattggccgcttctccgaggaagagatttacatgctgatggagaaggacatgcggtctttagcagggcttttgggtgataagaagtacatcatggggcccaagctttccactcttgacgccactgtctttggacacttggcacaggcaatgtggaccttaccagggacaagacccgaacggctgatcaaaggtgagctgatcaaccttgccatgtactgtgagaggataaggaggaaattttggccagagtggcaccacgatgatgacaataccatctatgagtctgaggagagcagcgaaggcagcaaaacccacaccccgctgctggattttagcttttactcaaggacagagacctttgaagatgagggagcagaaaacagtttttccagaaccccagacacagattttactggacactcactctttgattcggatgtggacatggatgactatacagaccacgaacagtgcaagtgacgtccagcctcactgaccctcttccttgggacctgccactccctgggtcggtccattttcccaggtagcaatccatccgagctgggaggagatcttcgtgcttggcagagttttcacatgctaactggactatagcagccttatttcttttttgtacaaacaaaacacagaaccattcagatgactccattgaaaacaaacaggcaaaaaataatgtcagcatggttcctgaaatccatttttgttttcattagaaaactattaataatattgtgtggtagagcaggtgtaagagctggttgtcagctgatagtttttatgatgatcctcttcaaccctgaggtcttaattgtgagatggattcttgaacctccttcctccaccaggatttgaagtaatgagagatatcatcagaaaaatgttttacggtggctgcttgtactttatgtgtgtatattgtatgttgagacataagtcaaataaaatccacagatattaaacgaacacctactatgtgcaaaaaa

SEQ ID NO: 424526 - DNA, 266 bp, Homo sapiens
tcacattgggagtcaggatttcaacattggagttttggggcaacacagaccatagaagtggtagactgctgcctttgagaactaatccttgctttccttaccacactgcaggtgagctgatcaaccttgccatgtactgtgagaggataaggaggaaattttggccagagtggcaccacgatgatgacaataccatctatgagtctgaggagagcagcgaaggcagcaaaacccacaccccgctgctggattttagcttttactca

SEQ ID NO: 424527 - DNA, 2045 bp, Homo sapiens
  misc_feature (4)..(4): n is a, c, g, or t
  misc_feature (6)..(6): n is a, c, g, or t
  misc_feature (8)..(8): n is a, c, g, or t
ggcncngncacaaagagcggggcggagaggcagctgcggggggagccggcggccgctgctgccgcccagggctctggggccccgccggccaggcccgccgtccgcggccagtgcccttcctcctcctcctcctctgccgccgcctcctcagtcgccgccgcctcctcagtcgccgccgcccgcgccgcccgcgccctccgcgcgcctctgagcccgcgccgggccgcgccggccccttcccatgcgggcggcgcgggccctgggaggggcgcccggagccagccgcgcagcatgcactggggggttggctttgcttcgtccaggccgtgcgtggtggatctgagctggaaccagagcatctccttcttcggctggtgggccgggtccgaggagcccttctccttttatggggacatcatcgctttccctttgcaggattacggtgggatcatggcagggctgggctccgatccctggtggaagaaaaccctttacttgaccgggggagctttgctggccgcagctgcgtatctgctccacgaactcctggtcattaggaaacagcaagagattgactctaaagatgctattattttgcatcagtttgcaagacctaacaatggtgttccaagtttatctcctttctgtttaaagatggaaacttatttaaggatggctgacttaccgtatcagaactattttggtggaaaactctctgctcaagggaaaatgccttggattgaatataatcatgaaaaagtttctggcacagaattcataattgactttctggaagagaagcttggagtgaatttaaacaaaaaccttggccctcatgaaagagccatctccagagcggtgaccaagatggtggaggagcacttctactggacgttagcttattgccagtgggtggacaatctcaatgagacccggaagatgctctctcttagtggtggtggtcccttcagcaacctgctgaggtgggttgtgtgccacataacgaaaggaattgtgaaacgcgagatgcacggccacggcattggccgcttctccgaggaagagatttacatgctgatggagaaggacatgcggtctttagcagggcttttgggtgataagaagtacatcatggggcccaagctttccactcttgacgccactgtctttggacacttggcacaggcaatgtggaccttaccagggacaagacccgaacggctgatcaaaggtgagctgatcaaccttgccatgtactgtgagaggataaggaggaaattttggccagagtggcaccacgatgatgacaataccatctatgagtctgaggagagcagcgaaggcagcaaaacccacaccccgctgctggattttagcttttactcaaggacagagacctttgaagatgagggagcagaaaacagtttttccagaaccccagacacagattttactggacactcactctttgattcggatgtggacatggatgactatacagaccacgaacagtgcaagtgacgtccagcctcactgaccctcttccttgggacctgccactccctgggtcggtccattttcccaggtagcaatccatccgagctgggaggagatcttcgtgcttggcagagttttcacatgctaactggactatagcagccttatttcttttttgtacaaacaaaacacagaaccattcagatgactccattgaaaacaaacaggcaaaaaataatgtcagcatggttcctgaaatccatttttgttttcattagaaaactattaataatattgtgtggtagagcaggtgtaagagctggttgtcagctgatagtttttatgatgatcctcttcaaccctgaggtcttaattgtgagatggattcttgaacctccttcctccaccaggatttgaagtaatgagagatatcatcagaaaaatgttttacggtggctgcttgtactttatgtgtgtatattgtatgttgagacataagtcaaataaaatccacagatattaaacgaacacctactatgtgcaaaaaa

SEQ ID NO: 424528 - DNA, 925 bp, Homo sapiens
gacaggtagtgcaatactattaattcccaggccatgctgtcagctcatcagtagagagttgagtggaggtgaagggcatgaggactaacgaggttaatatgaattcaacaggtgagctgatcaaccttgccatgtactgtgagaggataaggaggaaattttggccagagtggcaccacgatgatgacaataccatctatgagtctgaggagagcagcgaaggcagcaaaacccacaccccgctgctggattttagcttttactcaaggacagagacctttgaagatgagggagcagaaaacagtttttccagaaccccagacacagattttactggacactcactctttgattcggatgtggacatggatgactatacagaccacgaacagtgcaagtgacgtccagcctcactgaccctcttccttgggacctgccactccctgggtcggtccattttcccaggtagcaatccatccgagctgggaggagatcttcgtgcttggcagagttttcacatgctaactggactatagcagccttatttcttttttgtacaaacaaaacacagaaccattcagatgactccattgaaaacaaacaggcaaaaaataatgtcagcatggttcctgaaatccatttttgttttcattagaaaactattaataatattgtgtggtagagcaggtgtaagagctggttgtcagctgatagtttttatgatgatcctcttcaaccctgaggtcttaattgtgagatggattcttgaacctccttcctccaccaggatttgaagtaatgagagatatcatcagaaaaatgttttacggtggctgcttgtactttatgtgtgtatattgtatgttgagacataagtcaaataaaatccacagatattaaacgaacacctactatgtgcaaaaaa

SEQ ID NO: 424529 - DNA, 860 bp, Homo sapiens
agaacaattgctgatattgtggtatgtatgtaatcttttatcaaatgtgagctgatcaaccttgccatgtactgtgagaggataaggaggaaattttggccagagtggcaccacgatgatgacaataccatctatgagtctgaggagagcagcgaaggcagcaaaacccacaccccgctgctggattttagcttttactcaaggacagagacctttgaagatgagggagcagaaaacagtttttccagaaccccagacacagattttactggacactcactctttgattcggatgtggacatggatgactatacagaccacgaacagtgcaagtgacgtccagcctcactgaccctcttccttgggacctgccactccctgggtcggtccattttcccaggtagcaatccatccgagctgggaggagatcttcgtgcttggcagagttttcacatgctaactggactatagcagccttatttcttttttgtacaaacaaaacacagaaccattcagatgactccattgaaaacaaacaggcaaaaaataatgtcagcatggttcctgaaatccatttttgttttcattagaaaactattaataatattgtgtggtagagcaggtgtaagagctggttgtcagctgatagtttttatgatgatcctcttcaaccctgaggtcttaattgtgagatggattcttgaacctccttcctccaccaggatttgaagtaatgagagatatcatcagaaaaatgttttacggtggctgcttgtactttatgtgtgtatattgtatgttgagacataagtcaaataaaatccacagatattaaacgaacacctactatgtgcaaaaaa

SEQ ID NO: 424530 - DNA, 289 bp, Homo sapiens
tagatgtcattcaagcagttaatacagaatcagcaatctaagtccagaagaagagcagggactgtggaaacagagccataaatcctctgcaacaattcagaatgaaactccaaagaaaaagcccaaattggaatctaagccatctaatggagataggtaaaaatgaattcttttagtgttatgaaaattcaacttagttgaatagttatggttgaatgccagttattactagataaaaaaatagaaacatgtattttctacattgacttgagtctgtattaactgctta

SEQ ID NO: 424531 - DNA, 4860 bp, Homo sapiens
atgggaaagggagcggaaggaagcggatccacggccgcacagctaaacagcaaccccctacccgcttcgtctccctccgccgctatcggggcctaagcgggagcggctggcacggcgtcactgggtgggctggggcggaagtggaggcggagggagacggtggcgtcgtccgcggggccctgggctctcgcggcgaggccctggtgggcgcgaggcagggggagggggaggaggaggagcccgcggcccgggcggcggcggctctcgggttctccgtagggccccgcctcggagcgggcggcggcggaggaggagactgaggagcaggatggcggcctcggccctgtacgcctgcaccaagtgtacccagcgttatcctttcgaggagctctcccagggccagcagctctgcaaggtccgtgggctccgggaggcgggcgggatgggtgtcctcggccgtagccggagggggccgggtagccgctgcactgcagcccctcttcgccggcgcctcaggggtttgggagtctggagccctcgcctccccactcggggacccctttttctgggggcttgaacattagctgggaacggaccctgaaagggaggcagaatcgtgcccttttccaggcggcccaggagggtgccgggccccgtcagcgtctgggggtctcaggagtggggttgagtgaggcagccacctgtctatgccgcagagacccaggggtggagatgttttcatctcggttttctgcctggtctgtcctcttcttccaccaggaggcaggggacggtttttgcactttcttgctaggaacccgaagccgcaaagctgatggcatccttcttccctgtccaggaaagcgaagcgactggtttgggaacagaatgctctgatttggagctcctcccatcccattaaagcctggatgctgtctgtgagcaacggtgcaaaataataagtagtttcacatttaaccaatccttgaaataggccctgacagctttcttaatttgtctgtaatatacccccacgtctactaaagacaaagacacctgtgccttccctaaggaattatattgtgattggccacttatatgataaagcatccagttctttacgttggggccaggttttataaatgttttagactttcactaggttgggtaaacagttttctaccagaaaagtgagatttgggactttcagaaagatactgactaatgtattgtcttattacaggaatgtcggattgcacatcctattgtaaaatgtacttactgcagatcagaatttcaacaagagagcaaaactaacacaatttgtaagaagtgtgctcaaaatgtgaagcaatttgggacgcccaagccttgtcagtactgtaacataattgcagcatttattggtaccaagtgtcagcgttgcacaaattcagaaaaaaagtatggaccacctcagacctgtgaacagtgcaaacagcaatgtgcttttgatcggaaggaggaaggaagaagaaaggttgatggaaagttattatgctggctctgtactttatcgtacaaaagagttttacagaagacgaaagaacaaaggaagagcctgggatcttcacattcaaattcatcttcttcatctcttactgagaaagaccagcatcatccaaaacatcatcaccaccatcatcaccatcaccatcgtcacagcagtagccatcacaaaatcagcaatctaagtccagaagaagagcagggactgtggaaacagagccataaatcctctgcaacaattcagaatgaaactccaaagaaaaagcccaaattggaatctaagccatctaatggagataggtgtatgtaatgtgtgccattagtaaggtaatttgccagttgcatccatttctgtcagtagctctataaatcagtcagcagatagtgggggaacagacaattttgtccttataagtcaattgaaagaagaagtgatgtcacttaagcgtctcttacagcagagagaccagaccattttagaaaaagataaaaagttaactgaactaaaggcagactttcagtaccaagagtcaaatttgagaacaaaaatgaacagtatggaaaaagcccacaaagaaactgtggaacaacttcaggccaaaaacagagaactactcaaacaggtcgcagcattatcaaagggtaaaaaatttgacaaaagtggaagcatactaacatctccttgagaaagtcatttgtttagcatttcttcttacaatgtaaatttggggaaaaaaaattctgtgaagcccttaaattctgtgtagtagaaaaatatttttgcacaccaaatgaattggtgtgtttcctgttcacttttgtaattgatatacagcattttttaagttgtaaaacattcaaataaaacttcaactggtttgaagtaactttttaattatttgatatccaggaacttttttgccagcaatagtattaaacagttgtaaaggagtgcatgagtagtgctctttatgaaacgcaacatgcaataatagagtaggtatggtttcagaagtcagagcagcagggtttttttgtttgtttttgttttacactatgctaatttcagacaaacagttttcaatttagaaatacaaaaacttttaaactcgaaaaatggcgaacactggttttttgggaattgtgtttttactttgcatcaagatgaatttaggagaaaatcacggtgcttttattaaatgaacttcagatatatgtaaatttgttttttaaagttacatcattaacattagtaacctagcattttcattattggtataggaattaatgtttattgtacagtatctaaggtaaaatgtgtttctgttttgtaaaaactactgtagatttttacttacaagtgcctttttgccacctaatgtttttatttataggaatgctgatcttttgtacatacattttgttttaaaatcatgtttaataaatgtttgtatataaatgcatatgtacagaagcctatttcaaaaggaaatcaaagttgctagtaaaatgtttgagattacatttagaactaactgataatgcatatagattgtagaaaattttgtgatttgtttctgtgtgataagggaagctgttggtctttgaattcatttaattatgtcaaaatagttccccaaagatttaattttaagttgcttcttaaagagtaattttattttttatgtcatgtggcttcatattagtattgtgtgagttacatgttttgctttatattttataaaattttttaaaaattttaatgtttctgcaatgatccatgtatctgctttccctatgtgtggttatctaagttaatatttatgtacaatgtaatttgtaaatttaaagcaaatctgaaaaaaattaaatgatctttttaatccaatctgtgataatctttgaataaattggaatctactataagattcaggcattataagaaattgtcctaaagtctttaaaattgtctataaaaggttaaggtagggtgggataggttatatgaagttattgactatattctgatccagcggttttcagcctgaaatagaatttatctcctagttattatcagttcagagttttagtttgattttaaagtattgctagatacactgtatagagtgagttgcttctcttaataatttatgggcaaagataaatttgcttcatgtaaaactgttactaaatttataagttttaaaggttttgttttatacaagcattgattgtgaatgtcatatcaaagattggctttcttaagaacacatgattgaaacaatttttttttaacatgacgtgtttcaatagactgttctcatagttcattataaagtgaataccaaataattctttgtccattttgaaagcataatatagggtaattttcaagtgatacaaaaagattcagttagaatcttgtaaactaaaccagtttatttttatgggatcttcatgtaataattttcttaaatttagtactctcaaccatgatagataatgccttaacatggattttaacgtttgcaggatttgctaaattcataagatagttattacctttctttgaaatttgtaatgttttatattcttgtttcatagccatttgtcagtccacagtggtcattatggttttactttttgatagttcttacaccttgttggagaaactacaaaagaaagttgtcctcgtccttccccttagctaacatcaaaattaaaaagttgaatattaatattagctaacattaaaatggaaggtaattcagttttagtgttagctaacattaacagtctaataatttagctttgtaaattccaaggctaaaaccctttcatgggcttcacagtatttagtcctaattaaatacccttctttattccatgaccttattttataacttaaatttttttgcaattgtataaattagtaattcagtcccagtcctggatctctgtagtgttttgacataataaactgatattctttaaatgtggacctgtaaggagatactatggtgtggtgtattgtgcttttagcctgttttccactattaattagcatttaccagtaagggtcattttgactcaagttatttatgtattaatagcctgtgaatattgcagtcctttttagattatattggtctaaatatgcattctgcagtgaacctgttaagctgttcacatgtatagactattgaaatactgtacttgtacacatctgactgttgacattttgtacttttttctagatccaatatttcacaataaaaaacttgtcaaaggctttgtattagtatttcaatg

SEQ ID NO: 424532 - DNA, 4032 bp, Homo sapiens
atgggaaagggagcggaaggaagcggatccacggccgcacagctaaacagcaaccccctacccgcttcgtctccctccgccgctatcggggcctaagcgggagcggctggcacggcgtcactgggtgggctggggcggaagtggaggcggagggagacggtggcgtcgtccgcggggccctgggctctcgcggcgaggccctggtgggcgcgaggcagggggagggggaggaggaggagcccgcggcccgggcggcggcggctctcgggttctccgtagggccccgcctcggagcgggcggcggcggaggaggagactgaggagcaggatggcggcctcggccctgtacgcctgcaccaagtgtacccagcgttatcctttcgaggagctctcccagggccagcagctctgcaaggaatgtcggattgcacatcctattgtaaaatgtacttactgcagatcagaatttcaacaagagagcaaaactaacacaatttgtaagaagtgtgctcaaaatgtgaagcaatttgggacgcccaagccttgtcagtactgtaacataattgcagcatttattggtaccaagtgtcagcgttgcacaaattcagaaaaaaagtatggaccacctcagacctgtgaacagtgcaaacagcaatgtgcttttgatcggaaggaggaaggaagaagaaaggttgatggaaagttattatgctggctctgtactttatcgtacaaaagagttttacagaagacgaaagaacaaaggaagagcctgggatcttcacattcaaattcatcttcttcatctcttactgagaaagaccagcatcatccaaaacatcatcaccaccatcatcaccatcaccatcgtcacagcagtagccatcacaaaatcagcaatctaagtccagaagaagagcagggactgtggaaacagagccataaatcctctgcaacaattcagaatgaaactccaaagaaaaagcccaaattggaatctaagccatctaatggagataggtgtatgtaatgtgtgccattagtaaggtaatttgccagttgcatccatttctgtcagtagctctataaatcagtcagcagatagtgggggaacagacaattttgtccttataagtcaattgaaagaagaagtgatgtcacttaagcgtctcttacagcagagagaccagaccattttagaaaaagataaaaagttaactgaactaaaggcagactttcagtaccaagagtcaaatttgagaacaaaaatgaacagtatggaaaaagcccacaaagaaactgtggaacaacttcaggccaaaaacagagaactactcaaacaggtcgcagcattatcaaagggtaaaaaatttgacaaaagtggaagcatactaacatctccttgagaaagtcatttgtttagcatttcttcttacaatgtaaatttggggaaaaaaaattctgtgaagcccttaaattctgtgtagtagaaaaatatttttgcacaccaaatgaattggtgtgtttcctgttcacttttgtaattgatatacagcattttttaagttgtaaaacattcaaataaaacttcaactggtttgaagtaactttttaattatttgatatccaggaacttttttgccagcaatagtattaaacagttgtaaaggagtgcatgagtagtgctctttatgaaacgcaacatgcaataatagagtaggtatggtttcagaagtcagagcagcagggtttttttgtttgtttttgttttacactatgctaatttcagacaaacagttttcaatttagaaatacaaaaacttttaaactcgaaaaatggcgaacactggttttttgggaattgtgtttttactttgcatcaagatgaatttaggagaaaatcacggtgcttttattaaatgaacttcagatatatgtaaatttgttttttaaagttacatcattaacattagtaacctagcattttcattattggtataggaattaatgtttattgtacagtatctaaggtaaaatgtgtttctgttttgtaaaaactactgtagatttttacttacaagtgcctttttgccacctaatgtttttatttataggaatgctgatcttttgtacatacattttgttttaaaatcatgtttaataaatgtttgtatataaatgcatatgtacagaagcctatttcaaaaggaaatcaaagttgctagtaaaatgtttgagattacatttagaactaactgataatgcatatagattgtagaaaattttgtgatttgtttctgtgtgataagggaagctgttggtctttgaattcatttaattatgtcaaaatagttccccaaagatttaattttaagttgcttcttaaagagtaattttattttttatgtcatgtggcttcatattagtattgtgtgagttacatgttttgctttatattttataaaattttttaaaaattttaatgtttctgcaatgatccatgtatctgctttccctatgtgtggttatctaagttaatatttatgtacaatgtaatttgtaaatttaaagcaaatctgaaaaaaattaaatgatctttttaatccaatctgtgataatctttgaataaattggaatctactataagattcaggcattataagaaattgtcctaaagtctttaaaattgtctataaaaggttaaggtagggtgggataggttatatgaagttattgactatattctgatccagcggttttcagcctgaaatagaatttatctcctagttattatcagttcagagttttagtttgattttaaagtattgctagatacactgtatagagtgagttgcttctcttaataatttatgggcaaagataaatttgcttcatgtaaaactgttactaaatttataagttttaaaggttttgttttatacaagcattgattgtgaatgtcatatcaaagattggctttcttaagaacacatgattgaaacaatttttttttaacatgacgtgtttcaatagactgttctcatagttcattataaagtgaataccaaataattctttgtccattttgaaagcataatatagggtaattttcaagtgatacaaaaagattcagttagaatcttgtaaactaaaccagtttatttttatgggatcttcatgtaataattttcttaaatttagtactctcaaccatgatagataatgccttaacatggattttaacgtttgcaggatttgctaaattcataagatagttattacctttctttgaaatttgtaatgttttatattcttgtttcatagccatttgtcagtccacagtggtcattatggttttactttttgatagttcttacaccttgttggagaaactacaaaagaaagttgtcctcgtccttccccttagctaacatcaaaattaaaaagttgaatattaatattagctaacattaaaatggaaggtaattcagttttagtgttagctaacattaacagtctaataatttagctttgtaaattccaaggctaaaaccctttcatgggcttcacagtatttagtcctaattaaatacccttctttattccatgaccttattttataacttaaatttttttgcaattgtataaattagtaattcagtcccagtcctggatctctgtagtgttttgacataataaactgatattctttaaatgtggacctgtaaggagatactatggtgtggtgtattgtgcttttagcctgttttccactattaattagcatttaccagtaagggtcattttgactcaagttatttatgtattaatagcctgtgaatattgcagtcctttttagattatattggtctaaatatgcattctgcagtgaacctgttaagctgttcacatgtatagactattgaaatactgtacttgtacacatctgactgttgacattttgtacttttttctagatccaatatttcacaataaaaaacttgtcaaaggctttgtattagtatttcaatg

SEQ ID NO: 424533 - DNA, 4783 bp, Homo sapiens
atgggaaagggagcggaaggaagcggatccacggccgcacagctaaacagcaaccccctacccgcttcgtctccctccgccgctatcggggcctaagcgggagcggctggcacggcgtcactgggtgggctggggcggaagtggaggcggagggagacggtggcgtcgtccgcggggccctgggctctcgcggcgaggccctggtgggcgcgaggcagggggagggggaggaggaggagcccgcggcccgggcggcggcggctctcgggttctccgtagggccccgcctcggagcgggcggcggcggaggaggagactgaggagcaggatggcggcctcggccctgtacgcctgcaccaagtgtacccagcgttatcctttcgaggagctctcccagggccagcagctctgcaaggtccgtgggctccgggaggcgggcgggatgggtgtcctcggccgtagccggagggggccgggtagccgctgcactgcagcccctcttcgccggcgcctcaggggtttgggagtctggagccctcgcctccccactcggggacccctttttctgggggcttgaacattagctgggaacggaccctgaaagggaggcagaatcgtgcccttttccaggcggcccaggagggtgccgggccccgtcagcgtctgggggtctcaggagtggggttgagtgaggcagccacctgtctatgccgcagagacccaggggtggagatgttttcatctcggttttctgcctggtctgtcctcttcttccaccaggaggcaggggacggtttttgcactttcttgctaggaacccgaagccgcaaagctgatggcatccttcttccctgtccaggaaagcgaagcgactggtttgggaacagaatgctctgatttggagctcctcccatcccattaaagcctggatgctgtctgtgagcaacggtgcaaaataataagtagtttcacatttaaccaatccttgaaataggccctgacagctttcttaatttgtctgtaatatacccccacgtctactaaagacaaagacacctgtgccttccctaaggaattatattgtgattggccacttatatgataaagcatccagttctttacgttggggccaggttttataaatgttttagactttcactaggttgggtaaacagttttctaccagaaaagtgagatttgggactttcagaaagatactgactaatgtattgtcttattacaggaatgtcggattgcacatcctattgtaaaatgtacttactgcagatcagaatttcaacaagagagcaaaactaacacaatttgtaagaagtgtgctcaaaatgtgaagcaatttgggacgcccaagccttgtcagtactgtaacataattgcagcatttattggtaccaagtgtcagcgttgcacaaattcagaaaaaaagtatggaccacctcagacctgtgaacagtgcaaacagcaatgtgcttttgatcggaaggaggaaggaagaagaaaggttgatggaaagttattatgctggctctgtactttatcgtacaaaagagttttacagaagacgaaagaacaaaggaagagcctgggatcttcacattcaaattcatcttcttcatctcttactgagaaagaccagcatcatccaaaacatcatcaccaccatcatcaccatcaccatcgtcacagcagtagccatcacaaaatcagcaatctaagtccagaagaagagcagggactgtggaaacagagccataaatcctctgcaacaattcagaatgaaactccaaagaaaaagcccaaattggaatctaagccatctaatggagataggtgtatgtaatgtgtgccattagtaaggtaatttgccagttgcatccatttctgtcagtagctctataaatcagtcagcagatagtgggggaacagacaattttgtccttataagtcaattgaaagaagaagtgatgtcacttaagcgtctcttacagcagagagaccagaccattttagaaaaagataaaaagttaactgaactaaaggcagactttcagtaccaagagtcaaatttgagaacaaaaatgaacagtatggaaaaagcccacaaagaaactgtggaacaacttcaggccaaaaacagagaactactcaaacaggtcgcagcattatcaaagggtaaaaaatttgacaaaagtggaagcatactaacatctccttgagaaagtcatttgtttagcatttcttcttacaatgtaaatttggggaaaaaaaattctgtgaagcccttaaattctgtgtagtagaaaaatatttttgcacaccaaatgaattggtgtgtttcctgttcacttttgtaattgatatacagcattttttaagttgtaaaacattcaaataaaacttcaactggtttgaagtaactttttaattatttgatatccaggaacttttttgccagcaatagtattaaacagttgtaaaggagtgcatgagtagtgctctttatgaaacgcaacatgcaataatagagtaggtatggtttcagaagtcagagcagcagggtttttttgtttgtttttgttttacactatgctaatttcagacaaacagttttcaatttagaaatacaaaaacttttaaactcgaaaaatggcgaacactggttttttgggaattgtgtttttactttgcatcaagatgaatttaggagaaaatcacggtgcttttattaaatgaacttcagatatatgtaaatttgttttttaaagttacatcattaacattagtaacctagcattttcattattggtataggaattaatgtttattgtacagtatctaaggtaaaatgtgtttctgttttgtaaaaactactgtagatttttacttacaagtgcctttttgccacctaatgtttttatttataggaatgctgatcttttgtacatacattttgttttaaaatcatgtttaataaatgtttgtatataaatgcatatgtacagaagcctatttcaaaaggaaatcaaagttgctagtaaaatgtttgagattacatttagaactaactgataatgcatatagattgtagaaaattttgtgatttgtttctgtgtgataagggaagctgttggtctttgaattcatttaattatgtcaaaatagttccccaaagatttaattttaagttgcttcttaaagagtaattttattttttatgtcatgtggcttcatattagtattgtgtgagttacatgttttgctttatattttataaaattttttaaaaattttaatgtttctgcaatgatccatgtatctgctttccctatgtgtggttatctaagttaatatttatgtacaatgtaatttgtaaatttaaagcaaatctgaaaaaaattaaatgatctttttaatccaatctgtgataatctttgaataaattggaatctactataagattcaggcattataagaaattgtcctaaagtctttaaaattgtctataaaaggttaaggtagggtgggataggttatatgaagttattgactatattctgatccagcggttttcagcctgaaatagaatttatctcctagttattatcagttcagagttttagtttgattttaaagtattgctagatacactgtatagagtgagttgcttctcttaataatttatgggcaaagataaatttgcttcatgtaaaactgttactaaatttataagttttaaaggttttgttttatacaagcattgattgtgaatgtcatatcaaagattggctttcttaagaacacatgattgaaacaatttttttttaacatgacgtgtttcaatagactgttctcatagttcattataaagtgaataccaaataattctttgtccattttgaaagcataatatagggtaattttcaagtgatacaaaaagattcagttagaatcttgtaaactaaaccagtttatttttatgggatcttcatgtaataattttcttaaatttagtactctcaaccatgatagataatgccttaacatggattttaacgtttgcaggatttgctaaattcataagatagttattacctttctttgaaatttgtaatgttttatattcttgtttcatagccatttgtcagtccacagtggtcattatggttttactttttgatagttcttacaccttgttggagaaactacaaaagaaagttgtcctcgtccttccccttactaacattaacagtctaataatttagctttgtaaattccaaggctaaaaccctttcatgggcttcacagtatttagtcctaattaaatacccttctttattccatgaccttattttataacttaaatttttttgcaattgtataaattagtaattcagtcccagtcctggatctctgtagtgttttgacataataaactgatattctttaaatgtggacctgtaaggagatactatggtgtggtgtattgtgcttttagcctgttttccactattaattagcatttaccagtaagggtcattttgactcaagttatttatgtattaatagcctgtgaatattgcagtcctttttagattatattggtctaaatatgcattctgcagtgaacctgttaagctgttcacatgtatagactattgaaatactgtacttgtacacatctgactgttgacattttgtacttttttctagatccaatatttcacaataaaaaacttgtcaaaggctttgtattagtatttcaatg

SEQ ID NO: 424534 - DNA, 3794 bp, Homo sapiens
tacggagggtcgggcctcctccagtaagaagcgtgggcgagtagtggtgtcgccagtggcaactgaagggagtaatggagataaaacaaaagcgaaggcgaagttaaagcactccacgagttccctcggattaaacgccggagagagcgtgaatttgcctcggggacgcctctccaggaatgtcggattgcacatcctattgtaaaatgtacttactgcagatcagaatttcaacaagagagcaaaactaacacaatttgtaagaagtgtgctcaaaatgtgaagcaatttgggacgcccaagccttgtcagtactgtaacataattgcagcatttattggtaccaagtgtcagcgttgcacaaattcagaaaaaaagtatggaccacctcagacctgtgaacagtgcaaacagcaatgtgcttttgatcggaaggaggaaggaagaagaaaggttgatggaaagttattatgctggctctgtactttatcgtacaaaagagttttacagaagacgaaagaacaaaggaagagcctgggatcttcacattcaaattcatcttcttcatctcttactgagaaagaccagcatcatccaaaacatcatcaccaccatcatcaccatcaccatcgtcacagcagtagccatcacaaaatcagcaatctaagtccagaagaagagcagggactgtggaaacagagccataaatcctctgcaacaattcagaatgaaactccaaagaaaaagcccaaattggaatctaagccatctaatggagataggtgtatgtaatgtgtgccattagtaaggtaatttgccagttgcatccatttctgtcagtagctctataaatcagtcagcagatagtgggggaacagacaattttgtccttataagtcaattgaaagaagaagtgatgtcacttaagcgtctcttacagcagagagaccagaccattttagaaaaagataaaaagttaactgaactaaaggcagactttcagtaccaagagtcaaatttgagaacaaaaatgaacagtatggaaaaagcccacaaagaaactgtggaacaacttcaggccaaaaacagagaactactcaaacaggtcgcagcattatcaaagggtaaaaaatttgacaaaagtggaagcatactaacatctccttgagaaagtcatttgtttagcatttcttcttacaatgtaaatttggggaaaaaaaattctgtgaagcccttaaattctgtgtagtagaaaaatatttttgcacaccaaatgaattggtgtgtttcctgttcacttttgtaattgatatacagcattttttaagttgtaaaacattcaaataaaacttcaactggtttgaagtaactttttaattatttgatatccaggaacttttttgccagcaatagtattaaacagttgtaaaggagtgcatgagtagtgctctttatgaaacgcaacatgcaataatagagtaggtatggtttcagaagtcagagcagcagggtttttttgtttgtttttgttttacactatgctaatttcagacaaacagttttcaatttagaaatacaaaaacttttaaactcgaaaaatggcgaacactggttttttgggaattgtgtttttactttgcatcaagatgaatttaggagaaaatcacggtgcttttattaaatgaacttcagatatatgtaaatttgttttttaaagttacatcattaacattagtaacctagcattttcattattggtataggaattaatgtttattgtacagtatctaaggtaaaatgtgtttctgttttgtaaaaactactgtagatttttacttacaagtgcctttttgccacctaatgtttttatttataggaatgctgatcttttgtacatacattttgttttaaaatcatgtttaataaatgtttgtatataaatgcatatgtacagaagcctatttcaaaaggaaatcaaagttgctagtaaaatgtttgagattacatttagaactaactgataatgcatatagattgtagaaaattttgtgatttgtttctgtgtgataagggaagctgttggtctttgaattcatttaattatgtcaaaatagttccccaaagatttaattttaagttgcttcttaaagagtaattttattttttatgtcatgtggcttcatattagtattgtgtgagttacatgttttgctttatattttataaaattttttaaaaattttaatgtttctgcaatgatccatgtatctgctttccctatgtgtggttatctaagttaatatttatgtacaatgtaatttgtaaatttaaagcaaatctgaaaaaaattaaatgatctttttaatccaatctgtgataatctttgaataaattggaatctactataagattcaggcattataagaaattgtcctaaagtctttaaaattgtctataaaaggttaaggtagggtgggataggttatatgaagttattgactatattctgatccagcggttttcagcctgaaatagaatttatctcctagttattatcagttcagagttttagtttgattttaaagtattgctagatacactgtatagagtgagttgcttctcttaataatttatgggcaaagataaatttgcttcatgtaaaactgttactaaatttataagttttaaaggttttgttttatacaagcattgattgtgaatgtcatatcaaagattggctttcttaagaacacatgattgaaacaatttttttttaacatgacgtgtttcaatagactgttctcatagttcattataaagtgaataccaaataattctttgtccattttgaaagcataatatagggtaattttcaagtgatacaaaaagattcagttagaatcttgtaaactaaaccagtttatttttatgggatcttcatgtaataattttcttaaatttagtactctcaaccatgatagataatgccttaacatggattttaacgtttgcaggatttgctaaattcataagatagttattacctttctttgaaatttgtaatgttttatattcttgtttcatagccatttgtcagtccacagtggtcattatggttttactttttgatagttcttacaccttgttggagaaactacaaaagaaagttgtcctcgtccttccccttagctaacatcaaaattaaaaagttgaatattaatattagctaacattaaaatggaaggtaattcagttttagtgttagctaacattaacagtctaataatttagctttgtaaattccaaggctaaaaccctttcatgggcttcacagtatttagtcctaattaaatacccttctttattccatgaccttattttataacttaaatttttttgcaattgtataaattagtaattcagtcccagtcctggatctctgtagtgttttgacataataaactgatattctttaaatgtggacctgtaaggagatactatggtgtggtgtattgtgcttttagcctgttttccactattaattagcatttaccagtaagggtcattttgactcaagttatttatgtattaatagcctgtgaatattgcagtcctttttagattatattggtctaaatatgcattctgcagtgaacctgttaagctgttcacatgtatagactattgaaatactgtacttgtacacatctgactgttgacattttgtacttttttctagatccaatatttcacaataaaaaacttgtcaaaggctttgtattagtatttcaatg

SEQ ID NO: 424535 - DNA, 3741 bp, Homo sapiens
atgggaaagggagcggaaggaagcggatccacggccgcacagctaaacagcaaccccctacccgcttcgtctccctccgccgctatcggggcctaagcgggagcggctggcacggcgtcactgggaatgtcggattgcacatcctattgtaaaatgtacttactgcagatcagaatttcaacaagagagcaaaactaacacaatttgtaagaagtgtgctcaaaatgtgaagcaatttgggacgcccaagccttgtcagtactgtaacataattgcagcatttattggtaccaagtgtcagcgttgcacaaattcagaaaaaaagtatggaccacctcagacctgtgaacagtgcaaacagcaatgtgcttttgatcggaaggaggaaggaagaagaaaggttgatggaaagttattatgctggctctgtactttatcgtacaaaagagttttacagaagacgaaagaacaaaggaagagcctgggatcttcacattcaaattcatcttcttcatctcttactgagaaagaccagcatcatccaaaacatcatcaccaccatcatcaccatcaccatcgtcacagcagtagccatcacaaaatcagcaatctaagtccagaagaagagcagggactgtggaaacagagccataaatcctctgcaacaattcagaatgaaactccaaagaaaaagcccaaattggaatctaagccatctaatggagataggtgtatgtaatgtgtgccattagtaaggtaatttgccagttgcatccatttctgtcagtagctctataaatcagtcagcagatagtgggggaacagacaattttgtccttataagtcaattgaaagaagaagtgatgtcacttaagcgtctcttacagcagagagaccagaccattttagaaaaagataaaaagttaactgaactaaaggcagactttcagtaccaagagtcaaatttgagaacaaaaatgaacagtatggaaaaagcccacaaagaaactgtggaacaacttcaggccaaaaacagagaactactcaaacaggtcgcagcattatcaaagggtaaaaaatttgacaaaagtggaagcatactaacatctccttgagaaagtcatttgtttagcatttcttcttacaatgtaaatttggggaaaaaaaattctgtgaagcccttaaattctgtgtagtagaaaaatatttttgcacaccaaatgaattggtgtgtttcctgttcacttttgtaattgatatacagcattttttaagttgtaaaacattcaaataaaacttcaactggtttgaagtaactttttaattatttgatatccaggaacttttttgccagcaatagtattaaacagttgtaaaggagtgcatgagtagtgctctttatgaaacgcaacatgcaataatagagtaggtatggtttcagaagtcagagcagcagggtttttttgtttgtttttgttttacactatgctaatttcagacaaacagttttcaatttagaaatacaaaaacttttaaactcgaaaaatggcgaacactggttttttgggaattgtgtttttactttgcatcaagatgaatttaggagaaaatcacggtgcttttattaaatgaacttcagatatatgtaaatttgttttttaaagttacatcattaacattagtaacctagcattttcattattggtataggaattaatgtttattgtacagtatctaaggtaaaatgtgtttctgttttgtaaaaactactgtagatttttacttacaagtgcctttttgccacctaatgtttttatttataggaatgctgatcttttgtacatacattttgttttaaaatcatgtttaataaatgtttgtatataaatgcatatgtacagaagcctatttcaaaaggaaatcaaagttgctagtaaaatgtttgagattacatttagaactaactgataatgcatatagattgtagaaaattttgtgatttgtttctgtgtgataagggaagctgttggtctttgaattcatttaattatgtcaaaatagttccccaaagatttaattttaagttgcttcttaaagagtaattttattttttatgtcatgtggcttcatattagtattgtgtgagttacatgttttgctttatattttataaaattttttaaaaattttaatgtttctgcaatgatccatgtatctgctttccctatgtgtggttatctaagttaatatttatgtacaatgtaatttgtaaatttaaagcaaatctgaaaaaaattaaatgatctttttaatccaatctgtgataatctttgaataaattggaatctactataagattcaggcattataagaaattgtcctaaagtctttaaaattgtctataaaaggttaaggtagggtgggataggttatatgaagttattgactatattctgatccagcggttttcagcctgaaatagaatttatctcctagttattatcagttcagagttttagtttgattttaaagtattgctagatacactgtatagagtgagttgcttctcttaataatttatgggcaaagataaatttgcttcatgtaaaactgttactaaatttataagttttaaaggttttgttttatacaagcattgattgtgaatgtcatatcaaagattggctttcttaagaacacatgattgaaacaatttttttttaacatgacgtgtttcaatagactgttctcatagttcattataaagtgaataccaaataattctttgtccattttgaaagcataatatagggtaattttcaagtgatacaaaaagattcagttagaatcttgtaaactaaaccagtttatttttatgggatcttcatgtaataattttcttaaatttagtactctcaaccatgatagataatgccttaacatggattttaacgtttgcaggatttgctaaattcataagatagttattacctttctttgaaatttgtaatgttttatattcttgtttcatagccatttgtcagtccacagtggtcattatggttttactttttgatagttcttacaccttgttggagaaactacaaaagaaagttgtcctcgtccttccccttagctaacatcaaaattaaaaagttgaatattaatattagctaacattaaaatggaaggtaattcagttttagtgttagctaacattaacagtctaataatttagctttgtaaattccaaggctaaaaccctttcatgggcttcacagtatttagtcctaattaaatacccttctttattccatgaccttattttataacttaaatttttttgcaattgtataaattagtaattcagtcccagtcctggatctctgtagtgttttgacataataaactgatattctttaaatgtggacctgtaaggagatactatggtgtggtgtattgtgcttttagcctgttttccactattaattagcatttaccagtaagggtcattttgactcaagttatttatgtattaatagcctgtgaatattgcagtcctttttagattatattggtctaaatatgcattctgcagtgaacctgttaagctgttcacatgtatagactattgaaatactgtacttgtacacatctgactgttgacattttgtacttttttctagatccaatatttcacaataaaaaacttgtcaaaggctttgtattagtatttcaatg

SEQ ID NO: 424536 - DNA, 3431 bp, Homo sapiens
tagaggttcccgcccgctcggacacctcagacctgtgaacagtgcaaacagcaatgtgcttttgatcggaaggaggaaggaagaagaaaggttgatggaaagttattatgctggctctgtactttatcgtacaaaagagttttacagaagacgaaagaacaaaggaagagcctgggatcttcacattcaaattcatcttcttcatctcttactgagaaagaccagcatcatccaaaacatcatcaccaccatcatcaccatcaccatcgtcacagcagtagccatcacaaaatcagcaatctaagtccagaagaagagcagggactgtggaaacagagccataaatcctctgcaacaattcagaatgaaactccaaagaaaaagcccaaattggaatctaagccatctaatggagataggtgtatgtaatgtgtgccattagtaaggtaatttgccagttgcatccatttctgtcagtagctctataaatcagtcagcagatagtgggggaacagacaattttgtccttataagtcaattgaaagaagaagtgatgtcacttaagcgtctcttacagcagagagaccagaccattttagaaaaagataaaaagttaactgaactaaaggcagactttcagtaccaagagtcaaatttgagaacaaaaatgaacagtatggaaaaagcccacaaagaaactgtggaacaacttcaggccaaaaacagagaactactcaaacaggtcgcagcattatcaaagggtaaaaaatttgacaaaagtggaagcatactaacatctccttgagaaagtcatttgtttagcatttcttcttacaatgtaaatttggggaaaaaaaattctgtgaagcccttaaattctgtgtagtagaaaaatatttttgcacaccaaatgaattggtgtgtttcctgttcacttttgtaattgatatacagcattttttaagttgtaaaacattcaaataaaacttcaactggtttgaagtaactttttaattatttgatatccaggaacttttttgccagcaatagtattaaacagttgtaaaggagtgcatgagtagtgctctttatgaaacgcaacatgcaataatagagtaggtatggtttcagaagtcagagcagcagggtttttttgtttgtttttgttttacactatgctaatttcagacaaacagttttcaatttagaaatacaaaaacttttaaactcgaaaaatggcgaacactggttttttgggaattgtgtttttactttgcatcaagatgaatttaggagaaaatcacggtgcttttattaaatgaacttcagatatatgtaaatttgttttttaaagttacatcattaacattagtaacctagcattttcattattggtataggaattaatgtttattgtacagtatctaaggtaaaatgtgtttctgttttgtaaaaactactgtagatttttacttacaagtgcctttttgccacctaatgtttttatttataggaatgctgatcttttgtacatacattttgttttaaaatcatgtttaataaatgtttgtatataaatgcatatgtacagaagcctatttcaaaaggaaatcaaagttgctagtaaaatgtttgagattacatttagaactaactgataatgcatatagattgtagaaaattttgtgatttgtttctgtgtgataagggaagctgttggtctttgaattcatttaattatgtcaaaatagttccccaaagatttaattttaagttgcttcttaaagagtaattttattttttatgtcatgtggcttcatattagtattgtgtgagttacatgttttgctttatattttataaaattttttaaaaattttaatgtttctgcaatgatccatgtatctgctttccctatgtgtggttatctaagttaatatttatgtacaatgtaatttgtaaatttaaagcaaatctgaaaaaaattaaatgatctttttaatccaatctgtgataatctttgaataaattggaatctactataagattcaggcattataagaaattgtcctaaagtctttaaaattgtctataaaaggttaaggtagggtgggataggttatatgaagttattgactatattctgatccagcggttttcagcctgaaatagaatttatctcctagttattatcagttcagagttttagtttgattttaaagtattgctagatacactgtatagagtgagttgcttctcttaataatttatgggcaaagataaatttgcttcatgtaaaactgttactaaatttataagttttaaaggttttgttttatacaagcattgattgtgaatgtcatatcaaagattggctttcttaagaacacatgattgaaacaatttttttttaacatgacgtgtttcaatagactgttctcatagttcattataaagtgaataccaaataattctttgtccattttgaaagcataatatagggtaattttcaagtgatacaaaaagattcagttagaatcttgtaaactaaaccagtttatttttatgggatcttcatgtaataattttcttaaatttagtactctcaaccatgatagataatgccttaacatggattttaacgtttgcaggatttgctaaattcataagatagttattacctttctttgaaatttgtaatgttttatattcttgtttcatagccatttgtcagtccacagtggtcattatggttttactttttgatagttcttacaccttgttggagaaactacaaaagaaagttgtcctcgtccttccccttagctaacatcaaaattaaaaagttgaatattaatattagctaacattaaaatggaaggtaattcagttttagtgttagctaacattaacagtctaataatttagctttgtaaattccaaggctaaaaccctttcatgggcttcacagtatttagtcctaattaaatacccttctttattccatgaccttattttataacttaaatttttttgcaattgtataaattagtaattcagtcccagtcctggatctctgtagtgttttgacataataaactgatattctttaaatgtggacctgtaaggagatactatggtgtggtgtattgtgcttttagcctgttttccactattaattagcatttaccagtaagggtcattttgactcaagttatttatgtattaatagcctgtgaatattgcagtcctttttagattatattggtctaaatatgcattctgcagtgaacctgttaagctgttcacatgtatagactattgaaatactgtacttgtacacatctgactgttgacattttgtacttttttctagatccaatatttcacaataaaaaacttgtcaaaggctttgtattagtatttcaatg

SEQ ID NO: 424537 - DNA, 2346 bp, Homo sapiens
atgggaaagggagcggaaggaagcggatccacggccgcacagctaaacagcaaccccctacccgcttcgtctccctccgccgctatcggggcctaagcgggagcggctggcacggcgtcactgggtgggctggggcggaagtggaggcggagggagacggtggcgtcgtccgcggggccctgggctctcgcggcgaggccctggtgggcgcgaggcagggggagggggaggaggaggagcccgcggcccgggcggcggcggctctcgggttctccgtagggccccgcctcggagcgggcggcggcggaggaggagactgaggagcaggatggcggcctcggccctgtacgcctgcaccaagtgtacccagcgttatcctttcgaggagctctcccagggccagcagctctgcaaggtccgtgggctccgggaggcgggcgggatgggtgtcctcggccgtagccggagggggccgggtagccgctgcactgcagcccctcttcgccggcgcctcaggggtttgggagtctggagccctcgcctccccactcggggacccctttttctgggggcttgaacattagctgggaacggaccctgaaagggaggcagaatcgtgcccttttccaggcggcccaggagggtgccgggccccgtcagcgtctgggggtctcaggagtggggttgagtgaggcagccacctgtctatgccgcagagacccaggggtggagatgttttcatctcggttttctgcctggtctgtcctcttcttccaccaggaggcaggggacggtttttgcactttcttgctaggaacccgaagccgcaaagctgatggcatccttcttccctgtccaggaaagcgaagcgactggtttgggaacagaatgctctgatttggagctcctcccatcccattaaagcctggatgctgtctgtgagcaacggtgcaaaataataagtagtttcacatttaaccaatccttgaaataggccctgacagctttcttaatttgtctgtaatatacccccacgtctactaaagacaaagacacctgtgccttccctaaggaattatattgtgattggccacttatatgataaagcatccagttctttacgttggggccaggttttataaatgttttagactttcactaggttgggtaaacagttttctaccagaaaagtgagatttgggactttcagaaagatactgactaatgtattgtcttattacaggaatgtcggattgcacatcctattgtaaaatgtacttactgcagatcagaatttcaacaagagagcaaaactaacacaatttgtaagaagtgtgctcaaaatgtgaagcaatttgggacgcccaagccttgtcagtactgtaacataattgcagcatttattggtaccaagtgtcagcgttgcacaaattcagaaaaaaagtatggaccacctcagacctgtgaacagtgcaaacagcaatgtgcttttgatcggaaggaggaaggaagaagaaaggttgatggaaagttattatgctggctctgtactttatcgtacaaaagagttttacagaagacgaaagaacaaaggaagagcctgggatcttcacattcaaattcatcttcttcatctcttactgagaaagaccagcatcatccaaaacatcatcaccaccatcatcaccatcaccatcgtcacagcagtagccatcacaaaatcagcaatctaagtccagaagaagagcagggactgtggaaacagagccataaatcctctgcaacaattcagaatgaaactccaaagaaaaagcccaaattggaatctaagccatctaatggagataggtgtatgtaatgtgtgccattagtaaggtaatttgccagttgcatccatttctgtcagtagctctataaatcagtcagcagatagtgggggaacagacaattttgtccttataagtcaattgaaagaagaagtgatgtcacttaagcgtctcttacagcagagagaccagaccattttagaaaaagataaaaagttaactgaactaaaggcagactttcagtaccaagagtcaaatttgagaacaaaaatgaacagtatggaaaaagcccacaaagaaactgtggaacaacttcaggccaaaaacagagaactactcaaacaggtcgcagcattatcaagagtcaaatttgagaacaaaaatgaacgttcaatttctacacttcccagaaccaatttgatggtatctgctttctaacaattttttactggctcttcatcagtatatgtgataaaacaaaatcctcttctttcatttgtttttgtgtgtagaaattgaa

SEQ ID NO: 424538 - DNA, 1153 bp, Homo sapiens
atgggaaagggagcggaaggaagcggatccacggccgcacagctaaacagcaaccccctacccgcttcgtctccctccgccgctatcggggcctaagcgggagcggctggcacggcgtcactgggtgggctggggcggaagtggaggcggagggagacggtggcgtcgtccgcggggccctgggctctcgcggcgaggccctggtgggcgcgaggcagggggagggggaggaggaggagcccgcggcccgggcggcggcggctctcgggttctccgtagggccccgcctcggagcgggcggcggcggaggaggagactgaggagcaggatggcggcctcggccctgtacgcctgcaccaagtgtacccagcgttatcctttcgaggagctctcccagggccagcagctctgcaaggaatgtcggattgcacatcctattgtaaaatgtacttactgcagatcagaatttcaacaagagagcaaaactaacacaatttgtaagaagtgtgctcaaaatgtgaagcaatttgggacgcccaagccttgtcagtactgtaacataattgcagcatttattggtaccaagtgtcagcgttgcacaaattcagaaaaaaagtatggaccacctcagacctgtgaacagtgcaaacagcaatgtgcttttgatcggaaggaggaaggaagaagaaaggttgatggaaagttattatgctggctctgtactttatcgtacaaaagagttttacagaagacgaaagaacaaaggaagagcctgggatcttcacattcaaattcatcttcttcatctcttactgagaaagaccagcatcatccaaaacatcatcaccaccatcatcaccatcaccatcgtcacagcagtagccatcacaaaatcagcaatctaagtccagaagaagagcagggactgtggaaacagagccataaatcctctgcaacaattcagaatgaaactccaaagaaaaagcccaaattggaatctaagccatctaatggagataggtaaaaatgaattcttttagtgttatgaaaattcaacttagttgaatagttatggttgaatgccagttattactagataaaaaaatagaaacatgtattttctacattgacttgagtctgtattaactgctta

SEQ ID NO: 424539 - DNA, 245 bp, Homo sapiens
caagcagttaatacagactcattaaacatagccataaatcctctgcaacaattcagaatgaaactccaaagaaaaagcccaaattggaatctaagccatctaatggagataggtaaaaatgaattcttttagtgttatgaaaattcaacttagttgaatagttatggttgaatgccagttattactagataaaaaaatagaaacatgtattttctacattgacttgagtctgtattaactgctta

SEQ ID NO: 424540 - DNA, 302 bp, Homo sapiens
ttgctttacactagaagtattgacccccttaaagctaatactgaattatatttctgcaggtgtatgtaatgtgtgccattagtaaggtaatttgccagttgcatccatttctgtcaggtacatatttttttgcattagccttaaggatgtttgtggaattgtctaatttatgcaatttgaacacctgctaattttccttctacttcatttaactgtgttttacttttttctttttagtagctctataaatcagtcagcagatagtgggggaacagacaattttgtccttataagtcaattga

SEQ ID NO: 424541 - DNA, 727 bp, Homo sapiens
cccacatcttggttaggtctggaagattttaagcactatgaaggcttgtctgctgagaacctagctgggcttcagagccgatgtcctttgatacacagggaaatttgacaccaccctcacctccaggccccaaaaggcctgagtctgggaccccagtcacctcggtacccaagctcctgactcttacctcagtcccaaccccttgacaggcaccaggatcatctacgaccgaaagttcctgctggagtgcaagaactcacccattgcccggacacccccctgctgcctccctcagattcccggggtcacaactcctccaacagcccctctctccaagctggaggagctgaaggagcaggagacagaggaagagatacccgatgacgcacaatttgaaatggacatctaatccagtgcagatgacctggcatgtggagttacagagggatccctcatgccactgctgccaccacctcttcctggggcatccaaaggccagctggcctcatctaatctggaagggagtgacttgttagttccaggcctcctttagttctgaggcagctagaccagggataggagtgggcaacttgccaagcccttaactctacttcctcttcagtctgtggtactcctcctaaccctaaaccctctatgctcaggggctggaactggggaatggagtaagtcaccttctgactgcttagtaaacattcaaagaaaaacc

SEQ ID NO: 424542 - DNA, 480 bp, Homo sapiens
cccacatcttggttaggtctggaagattttaagcactatgaaggcttgtctgctgagaacctagctgggcttcagagccgatgtcctttgatacacagggaaatttgacaccaccctcacctccaggccccaaaaggcctgagtctgggaccccagtcacctcggtacccaagctcctgactcttacctcagtcccaaccccttgacaggcaccaggatcatctacgaccgaaagttcctgctggagtgcaagaactcacccattgcccggacacccccctgctgcctccctcagattcccggggtcacaactcctccaacagcccctctctccaagctggaggagctgaaggagcaggagacagaggaagagatacccgatgacgcacaatttgaaatggacatctaatccagtgcagatgacctggcatgtggagttacagaggcagctgcgcctgtacgccatccagagtactgccc

SEQ ID NO: 424543 - DNA, 697 bp, Homo sapiens
gagtccgcctcagactcagagctgcgctcctcgacctcaacgccaggcggttactttgctgctcctcccgctcgctatgtcaacgtccactagctgcccgattcccgggggccgggaccagctgcccgactgctacagcaccacgccggggggcacgctatacgccactacccccggaggcaccaggatcatctacgaccgaaagttcctgctggagtgcaagaactcacccattgcccggacacccccctgctgcctccctcagattcccggggtcacaactcctccaacagcccctctctccaagctggaggagctgaaggagcaggagacagaggaagagatacccgatgacgcacaatttgaaatggacatctaatccagtgcagatgacctggcatgtggagttacagagggatccctcatgccactgctgccaccacctcttcctggggcatccaaaggccagctggcctcatctaatctggaagggagtgacttgttagttccaggcctcctttagttctgaggcagctagaccagggataggagtgggcaacttgccaagcccttaactctacttcctcttcagtctgtggtactcctcctaaccctaaaccctctatgctcaggggctggaactggggaatggagtaagtcaccttctgactgcttagtaaacattcaaagaaaaacc

SEQ ID NO: 424544 - DNA, 1316 bp, Homo sapiens
tgcttgatagacactggaaagcagaataatgcttaactaccttttttttgctgcttattttataaattaatctttgttaagagatttctgacatcatcagcatcacatcatatgtttcctttcagcggcatctggaggtagcagaagtagcagcagcccactggtggtagtgtctgtgaagtctcccaatcagagtctccgccttggcttgtccagattagcacgagttaaacctttgcatccaaatgccactagcacctgagtgtggtacaggaggaatgtttggttgggagaatcacagctttacaagggtgtttatatttgatttgtgtttatatttgaggcaggtattgtaatataaaggaatccattaccatgtcctataaatgacctctagccattttatgattatgttctctgtaaaactcttcaagacttcaatgagaagtttgtttataagaattatcttctcatacctttccttgtgaagagcgtattctgtttttctatcagttcgacatgaagtccacatcacatgctgttcttttctagttacatgatgtgcctttctagctttgtctagtttatagcaccttaactttaactgttcagttttatctggcagaggaaaacattcttatttctttcagaagacatttctgaaatcttataagctacttaagctacgttgtcagttttatcgcaaagatgttttgtattttagccaaatctttttatagtacaaacttagaattattttacacactaaaatggttgcagttttatggcatatgtctccgatttagatggttattctctagaaaatagtatttaaagacattttatgaaatcttcattgtcaaaacctttaataaaagtggaaatattttgaaatgccctttttcttgataccactcatccacgtgttcctgattgtccacatttcatgataaaatgagagctctgcagagaatgttagcctttctgttgtaaatgtaatcttcaagtagtcactttttgttaagttctttagaaagtagttgtcaagtacttagtcatccctattatgatatgagatagtacagcttttcaggaagcttagatctgaatttactttgaaaaacaattgtaatgaatattttatatttacattgagaatttcaactagcttctgatcaatttttaataaaaaattttcaaatcatgttagctgttaaaaaatgtataataactcagtttttcttggtttatggaaatatctatattaatgtgaaaataattaatttagaattgtgattaaagtgagcatttgtcta

SEQ ID NO: 424545 - DNA, 2241 bp, Homo sapiens
ggcgggagcaaattcgctttccccacagcgcgtgcgccgccgcaagcatggctggtgatgattggacgactggtaacagggggcggagggctccgaagtctggttttgggcgggaattgaaaccgccgctgaagccaacaagaatttgagaactgtaaataccaagccttgaaagggaccatggtgcggcctgtgagacataagaaaccagtcaattactcacagtttgaccactctgacagtgatgatgattttgtttctgcaactgtacctttaaacaagaaatccagaacagcaccaaaggagttaaaacaagataaaccaaaacctaacttgaacaatctccggaaagaagaaatcccagtacaagagaaaacccctaaaaaaaggatggctttagatgacaagctctaccagagagacttagaagttgcactagctttatcagtgaaggaacttccaacagtcaccactaatgtgcagaactctcaagataaaagcattgaaaaacatggcagtagtaaaatagaaacaatgaataagtctcctcatatctctaattgcagtgtagccagtgattatttagatttggataagattactgtggaagatgatgttggtggtgttcaagggaaaagaaaagcagcatctaaagctgcagcacagcagaggaagattcttctggaaggcagtgatggtgatagtgctaatgacactgaaccagactttgcacctggtgaagattctgaggatgattctgattttgtgagagtgaggataatgacgaagacttctctatgagaaaaagtaaagttaaagaaattaaaaagaaagaagtgaaggtaaaatccccagtagaaaagaaagagaagaaatctaaatccaaatgtaatgctttggtgacttcggtggactctgctccagctgccgtcaaatcagaatctcagtccttgccaaaaaaggtttctctgtcttcagataccactaggaaaccattagaaatacgcagtccttcagctgaaagcaagaaacctaaatgggtcccaccagcggcatctggaggtagcagaagtagcagcagcccactggtggtagtgtctgtgaagtctcccaatcagagtctccgccttggcttgtccagattagcacgagttaaacctttgcatccaaatgccactagcacctgagtgtggtacaggaggaatgtttggttgggagaatcacagctttacaagggtgtttatatttgatttgtgtttatatttgaggcaggtattgtaatataaaggaatccattaccatgtcctataaatgacctctagccattttatgattatgttctctgtaaaactcttcaagacttcaatgagaagtttgtttataagaattatcttctcatacctttccttgtgaagagcgtattctgtttttctatcagttcgacatgaagtccacatcacatgctgttcttttctagttacatgatgtgcctttctagctttgtctagtttatagcaccttaactttaactgttcagttttatctggcagaggaaaacattcttatttctttcagaagacatttctgaaatcttataagctacttaagctacgttgtcagttttatcgcaaagatgttttgtattttagccaaatctttttatagtacaaacttagaattattttacacactaaaatggttgcagttttatggcatatgtctccgatttagatggttattctctagaaaatagtatttaaagacattttatgaaatcttcattgtcaaaacctttaataaaagtggaaatattttgaaatgccctttttcttgataccactcatccacgtgttcctgattgtccacatttcatgataaaatgagagctctgcagagaatgttagcctttctgttgtaaatgtaatcttcaagtagtcactttttgttaagttctttagaaagtagttgtcaagtacttagtcatccctattatgatatgagatagtacagcttttcaggaagcttagatctgaatttactttgaaaaacaattgtaatgaatattttatatttacattgagaatttcaactagcttctgatcaatttttaataaaaaattttcaaatcatgttagctgttaaaaaatgtataataactcagtttttcttggtttatggaaatatctatattaatgtgaaaataattaatttagaattgtgattaaagtgagcatttgtcta

SEQ ID NO: 424546 - DNA, 2631 bp, Homo sapiens
ggcgggagcaaattcgctttccccacagcgcgtgcgccgccgcaagcatggctggtgatgattggacgactggtaacagggggcggagggctccgaagtctggttttgggcgggaattgaaaccgccgctgaagccaacaagaatttgagaactgtaaataccaagccttgaaagggaccatggtgcggcctgtgagacataagaaaccagtcaattactcacagtttgaccactctgacagtgatgatgattttgtttctgcaactgtacctttaaacaagaaatccagaacagcaccaaaggagttaaaacaagataaaccaaaacctaacttgaacaatctccggaaagaagaaatcccagtacaagagaaaacccctaaaaaaaggatggctttagatgacaagctctaccagagagacttagaagttgcactagctttatcagtgaaggaacttccaacagtcaccactaatgtgcagaactctcaagataaaagcattgaaaaacatggcagtagtaaaatagaaacaatgaataagtctcctcatatctctaattgcagtgtagccagtgattatttagatttggataagattactgtggaagatgatgttggtggtgttcaagggaaaagaaaagcagcatctaaagctgcagcacagcagaggaagattcttctggaaggcagtgatggtgatagtgctaatgacactgaaccagactttgcacctggtgaagattctgaggatgattctgattttgtgagagtgaggataatgacgaagacttctctatgagaaaaagtaaagttaaagaaattaaaaagaaagaagtgaaggtaaaatccccagtagaaaagaaagagaagaaatctaaatccaaatgtaatgctttggtgacttcggtggactctgctccagctgccgtcaaatcagaatctcagtccttgccaaaaaaggtttctctgtcttcagataccactaggaaaccattagaaatacgcagtccttcagctgaaagcaagaaacctaaatgggtcccaccagcggcatctggaggtagcagaagtagcagcagcccactggtggtagtgtctgtgaagtctcccaatcagagtctccgccttggcttgtccagattagcacgagttaaacctttgcatccaaatgccactagcacctgagtgtggtacaggaggaatgtttggttgggagaatcacagctttacaagggtgtttatatttgatttgtgtttatatttgaggcaggtattgtaatataaaggaatccattaccatgtcctataaatgacctctagccattttatgattatgttctctgtaaaactcttcaagacttcaatgagaagtttgtttataagaattatcttctcatacctttccttgtgaagagcgtattctgtttttctatcagttcgacatgaagtccacatcacatgctgttcttttctagttacatgatgtgcctttctagctttgtctagtttatagcaccttaactttaactgttcagttttatctggcagaggaaaacattcttatttctttcagaagacatttctgaaatcttataagctacttaagctacgttgtcagttttatcgcaaagatgttttgtattttagccaaatctttttatagtacaaacttagaattattttacacactaaaatggttgcagttttatggcatatgtctccgatttagatggttattctctagaaaatagtatttaaagacattttatgaaatcttcattgtcaaaacctttaataaaagtggaaatattttgaaatgccctttttcttgataccactcatccacgtgttcctgattgtccacatttcatgataaaatgagagctctgcagagaatgttagcctttctgttgtaaatgtaatcttcaagtagtcactttttgttaagttctttagaaagtagttgtcaagtacttagtcatccctattatgatatgagatagtacagcttttcaggaagcttagatctgaatttactttgaaaaacaattgtaatgaatattttatatttacattgagaatttcaactagcttctgatcaatttttaataaaaaattttcaaatcatgttagctgttaaaaaatgtataataactcagtttttcttggtttatggaaatatctatattaatgtgaaaataattaatttagaattgtgattaaagtgagcatttgtctattgctgttgtacacttcttttatctaacgtatatttttatagtgtcatataccagccccctaacctgccccacctgtcccctttttaaaaacatattttccagttacatagcactgaggtactctatttggtgtagatcaacaataaacataagagcctactgtatattaggtactgatataattgattaatcatctggcaccagctcaataacctgtttttgccgtgttctttatagtttatcaggggatttgaaaattacctcaaagtatgttaaaaccagcctggctgaaagcactgatacctttatgttgccaaacccagtgtacaattttctcacctaatcttatacaccctattcattatactctgatgaaaacatttgatttc

SEQ ID NO: 424547 - DNA, 2187 bp, Homo sapiens
ggcgggagcaaattcgctttccccacagcgcgtgcgccgccgcaagcatggctggtgatgattggacgactggtaacagggggcggagggctccgaagtctggttttgggcgggaattgaaaccgccgctgaagccaacaagaatttgagaactgtaaataccaagccttgaaagggaccatggtgcggcctgtgagacataagaaaccagtcaattactcacagtttgaccactctgacagtgatgatgattttgtttctgcaactgtacctttaaacaagaaatccagaacagcaccaaaggagttaaaacaagataaaccaaaacctaacttgaacaatctccggaaagaagaaatcccagtacaagagaaaacccctaaaaaaaggatggctttagatgacaagctctaccagagagacttagaagttgcactagctttatcagtgaaggaacttccaacagtcaccactaatgtgcagaactctcaagataaaagcattgaaaaacatggcagtagtaaaatagaaacaatgaataagtctcctcatatctctaattgcagtgtagccagtgattatttagatttggataagattactgtggaagatgatgttggtggtgttcaagggaaaagtgatggtgatagtgctaatgacactgaaccagactttgcacctggtgaagattctgaggatgattctgattttgtgagagtgaggataatgacgaagacttctctatgagaaaaagtaaagttaaagaaattaaaaagaaagaagtgaaggtaaaatccccagtagaaaagaaagagaagaaatctaaatccaaatgtaatgctttggtgacttcggtggactctgctccagctgccgtcaaatcagaatctcagtccttgccaaaaaaggtttctctgtcttcagataccactaggaaaccattagaaatacgcagtccttcagctgaaagcaagaaacctaaatgggtcccaccagcggcatctggaggtagcagaagtagcagcagcccactggtggtagtgtctgtgaagtctcccaatcagagtctccgccttggcttgtccagattagcacgagttaaacctttgcatccaaatgccactagcacctgagtgtggtacaggaggaatgtttggttgggagaatcacagctttacaagggtgtttatatttgatttgtgtttatatttgaggcaggtattgtaatataaaggaatccattaccatgtcctataaatgacctctagccattttatgattatgttctctgtaaaactcttcaagacttcaatgagaagtttgtttataagaattatcttctcatacctttccttgtgaagagcgtattctgtttttctatcagttcgacatgaagtccacatcacatgctgttcttttctagttacatgatgtgcctttctagctttgtctagtttatagcaccttaactttaactgttcagttttatctggcagaggaaaacattcttatttctttcagaagacatttctgaaatcttataagctacttaagctacgttgtcagttttatcgcaaagatgttttgtattttagccaaatctttttatagtacaaacttagaattattttacacactaaaatggttgcagttttatggcatatgtctccgatttagatggttattctctagaaaatagtatttaaagacattttatgaaatcttcattgtcaaaacctttaataaaagtggaaatattttgaaatgccctttttcttgataccactcatccacgtgttcctgattgtccacatttcatgataaaatgagagctctgcagagaatgttagcctttctgttgtaaatgtaatcttcaagtagtcactttttgttaagttctttagaaagtagttgtcaagtacttagtcatccctattatgatatgagatagtacagcttttcaggaagcttagatctgaatttactttgaaaaacaattgtaatgaatattttatatttacattgagaatttcaactagcttctgatcaatttttaataaaaaattttcaaatcatgttagctgttaaaaaatgtataataactcagtttttcttggtttatggaaatatctatattaatgtgaaaataattaatttagaattgtgattaaagtgagcatttgtcta

SEQ ID NO: 424548 - DNA, 2292 bp, Homo sapiens
ggcgggagcaaattcgctttccccacagcgcgtgcgccgccgcaagcatggctggtgatgattggacgactggtaacagggggcggagggctccgaagtctggttttgggcgggaattgaaaccgccgctgaagccaacaagaatttgagaactgtaaataccaagccttgaaagggaccatggtgcggcctgtgagacataagaaaccagtcaattactcacagtttgaccactctgacagtgatgatgattttgtttctgcaactgtacctttaaacaagaaatccagaacagcaccaaaggagttaaaacaagataaaccaaaacctaacttgaacaatctccggaaagaagaaatcccagtacaagagaaaacccctaaaaaaagactccctgaaggtacttttagtattccagctagtgcagtgccttgtacaaagatggctttagatgacaagctctaccagagagacttagaagttgcactagctttatcagtgaaggaacttccaacagtcaccactaatgtgcagaactctcaagataaaagcattgaaaaacatggcagtagtaaaatagaaacaatgaataagtctcctcatatctctaattgcagtgtagccagtgattatttagatttggataagattactgtggaagatgatgttggtggtgttcaagggaaaagaaaagcagcatctaaagctgcagcacagcagaggaagattcttctggaaggcagtgatggtgatagtgctaatgacactgaaccagactttgcacctggtgaagattctgaggatgattctgattttgtgagagtgaggataatgacgaagacttctctatgagaaaaagtaaagttaaagaaattaaaaagaaagaagtgaaggtaaaatccccagtagaaaagaaagagaagaaatctaaatccaaatgtaatgctttggtgacttcggtggactctgctccagctgccgtcaaatcagaatctcagtccttgccaaaaaaggtttctctgtcttcagataccactaggaaaccattagaaatacgcagtccttcagctgaaagcaagaaacctaaatgggtcccaccagcggcatctggaggtagcagaagtagcagcagcccactggtggtagtgtctgtgaagtctcccaatcagagtctccgccttggcttgtccagattagcacgagttaaacctttgcatccaaatgccactagcacctgagtgtggtacaggaggaatgtttggttgggagaatcacagctttacaagggtgtttatatttgatttgtgtttatatttgaggcaggtattgtaatataaaggaatccattaccatgtcctataaatgacctctagccattttatgattatgttctctgtaaaactcttcaagacttcaatgagaagtttgtttataagaattatcttctcatacctttccttgtgaagagcgtattctgtttttctatcagttcgacatgaagtccacatcacatgctgttcttttctagttacatgatgtgcctttctagctttgtctagtttatagcaccttaactttaactgttcagttttatctggcagaggaaaacattcttatttctttcagaagacatttctgaaatcttataagctacttaagctacgttgtcagttttatcgcaaagatgttttgtattttagccaaatctttttatagtacaaacttagaattattttacacactaaaatggttgcagttttatggcatatgtctccgatttagatggttattctctagaaaatagtatttaaagacattttatgaaatcttcattgtcaaaacctttaataaaagtggaaatattttgaaatgccctttttcttgataccactcatccacgtgttcctgattgtccacatttcatgataaaatgagagctctgcagagaatgttagcctttctgttgtaaatgtaatcttcaagtagtcactttttgttaagttctttagaaagtagttgtcaagtacttagtcatccctattatgatatgagatagtacagcttttcaggaagcttagatctgaatttactttgaaaaacaattgtaatgaatattttatatttacattgagaatttcaactagcttctgatcaatttttaataaaaaattttcaaatcatgttagctgttaaaaaatgtataataactcagtttttcttggtttatggaaatatctatattaatgtgaaaataattaatttagaattgtgattaaagtgagcatttgtcta

SEQ ID NO: 424549 - DNA, 2131 bp, Homo sapiens
ggcgggagcaaattcgctttccccacagcgcgtgcgccgccgcaagcatggctggtgatgattggacgactggtaacagggggcggagggctccgaagtctggttttgggcgggaattgaaaccgccgctgaagccaacaagaatttgagaactgtaaataccaagccttgaaagggaccatggtgcggcctgtgagacataagaaaccagtcaattactcacagtttgaccactctgacagtgatgatgattttgtttctgcaactgtacctttaaacaagaaatccagaacagcaccaaaggagttaaaacaagataaaccaaaacctaacttgaacaatctccggaaagaagaaatcccagtacaagagaaaacccctaaaaaaaggcattgaaaaacatggcagtagtaaaatagaaacaatgaataagtctcctcatatctctaattgcagtgtagccagtgattatttagatttggataagattactgtggaagatgatgttggtggtgttcaagggaaaagaaaagcagcatctaaagctgcagcacagcagaggaagattcttctggaaggcagtgatggtgatagtgctaatgacactgaaccagactttgcacctggtgaagattctgaggatgattctgattttgtgagagtgaggataatgacgaagacttctctatgagaaaaagtaaagttaaagaaattaaaaagaaagaagtgaaggtaaaatccccagtagaaaagaaagagaagaaatctaaatccaaatgtaatgctttggtgacttcggtggactctgctccagctgccgtcaaatcagaatctcagtccttgccaaaaaaggtttctctgtcttcagataccactaggaaaccattagaaatacgcagtccttcagctgaaagcaagaaacctaaatgggtcccaccagcggcatctggaggtagcagaagtagcagcagcccactggtggtagtgtctgtgaagtctcccaatcagagtctccgccttggcttgtccagattagcacgagttaaacctttgcatccaaatgccactagcacctgagtgtggtacaggaggaatgtttggttgggagaatcacagctttacaagggtgtttatatttgatttgtgtttatatttgaggcaggtattgtaatataaaggaatccattaccatgtcctataaatgacctctagccattttatgattatgttctctgtaaaactcttcaagacttcaatgagaagtttgtttataagaattatcttctcatacctttccttgtgaagagcgtattctgtttttctatcagttcgacatgaagtccacatcacatgctgttcttttctagttacatgatgtgcctttctagctttgtctagtttatagcaccttaactttaactgttcagttttatctggcagaggaaaacattcttatttctttcagaagacatttctgaaatcttataagctacttaagctacgttgtcagttttatcgcaaagatgttttgtattttagccaaatctttttatagtacaaacttagaattattttacacactaaaatggttgcagttttatggcatatgtctccgatttagatggttattctctagaaaatagtatttaaagacattttatgaaatcttcattgtcaaaacctttaataaaagtggaaatattttgaaatgccctttttcttgataccactcatccacgtgttcctgattgtccacatttcatgataaaatgagagctctgcagagaatgttagcctttctgttgtaaatgtaatcttcaagtagtcactttttgttaagttctttagaaagtagttgtcaagtacttagtcatccctattatgatatgagatagtacagcttttcaggaagcttagatctgaatttactttgaaaaacaattgtaatgaatattttatatttacattgagaatttcaactagcttctgatcaatttttaataaaaaattttcaaatcatgttagctgttaaaaaatgtataataactcagtttttcttggtttatggaaatatctatattaatgtgaaaataattaatttagaattgtgattaaagtgagcatttgtcta

SEQ ID NO: 424550 - DNA, 2113 bp, Homo sapiens
aaaaactgctgaattgtttactttaaaaggtaaactttatgatatgtgaattatatcttaagaaaactgttattctaaaaaaataaattctttaaggtacatctcagtgcttcttcctttatgtaacttttccttatctgtctttgacgttttcttcctcttatactccatagcacttttgagcagcttgaataggactttatagtctgccttttataggataattattagcatgtcttgtttccccaccctcctcctttaattgcagactccctgaaggtacttttagtattccagctagtgcagtgccttgtacaaagatggctttagatgacaagctctaccagagagacttagaagttgcactagctttatcagtgaaggaacttccaacagtcaccactaatgtgcagaactctcaagataaaagcattgaaaaacatggcagtagtaaaatagaaacaatgaataagtctcctcatatctctaattgcagtgtagccagtgattatttagatttggataagattactgtggaagatgatgttggtggtgttcaagggaaaagaaaagcagcatctaaagctgcagcacagcagaggaagattcttctggaaggcagtgatggtgatagtgctaatgacactgaaccagactttgcacctggtgaagattctgaggatgattctgattttgtgagagtgaggataatgacgaagacttctctatgagaaaaagtaaagttaaagaaattaaaaagaaagaagtgaagtgacttcggtggactctgctccagctgccgtcaaatcagaatctcagtccttgccaaaaaaggtttctctgtcttcagataccactaggaaaccattagaaatacgcagtccttcagctgaaagcaagaaacctaaatgggtcccaccagcggcatctggaggtagcagaagtagcagcagcccactggtggtagtgtctgtgaagtctcccaatcagagtctccgccttggcttgtccagattagcacgagttaaacctttgcatccaaatgccactagcacctgagtgtggtacaggaggaatgtttggttgggagaatcacagctttacaagggtgtttatatttgatttgtgtttatatttgaggcaggtattgtaatataaaggaatccattaccatgtcctataaatgacctctagccattttatgattatgttctctgtaaaactcttcaagacttcaatgagaagtttgtttataagaattatcttctcatacctttccttgtgaagagcgtattctgtttttctatcagttcgacatgaagtccacatcacatgctgttcttttctagttacatgatgtgcctttctagctttgtctagtttatagcaccttaactttaactgttcagttttatctggcagaggaaaacattcttatttctttcagaagacatttctgaaatcttataagctacttaagctacgttgtcagttttatcgcaaagatgttttgtattttagccaaatctttttatagtacaaacttagaattattttacacactaaaatggttgcagttttatggcatatgtctccgatttagatggttattctctagaaaatagtatttaaagacattttatgaaatcttcattgtcaaaacctttaataaaagtggaaatattttgaaatgccctttttcttgataccactcatccacgtgttcctgattgtccacatttcatgataaaatgagagctctgcagagaatgttagcctttctgttgtaaatgtaatcttcaagtagtcactttttgttaagttctttagaaagtagttgtcaagtacttagtcatccctattatgatatgagatagtacagcttttcaggaagcttagatctgaatttactttgaaaaacaattgtaatgaatattttatatttacattgagaatttcaactagcttctgatcaatttttaataaaaaattttcaaatcatgttagctgttaaaaaatgtataataactcagtttttcttggtttatggaaatatctatattaatgtgaaaataattaatttagaattgtgattaaagtgagcatttgtcta

SEQ ID NO: 424551 - DNA, 1388 bp, Homo sapiens
ttctctatagcacgggaaccgttatgtgaacatgtgaagattctgaggatgattctgattttgtgagagtgaggataatgacgaagacttctctatgagaaaaagtaaagttaaagaaattaaaaagaaagaagtgaaggtaaaatccccagtagaaaagaaagagaagaaatctaaatccaaatgtaatgctttggcggcatctggaggtagcagaagtagcagcagcccactggtggtagtgtctgtgaagtctcccaatcagagtctccgccttggcttgtccagattagcacgagttaaacctttgcatccaaatgccactagcacctgagtgtggtacaggaggaatgtttggttgggagaatcacagctttacaagggtgtttatatttgatttgtgtttatatttgaggcaggtattgtaatataaaggaatccattaccatgtcctataaatgacctctagccattttatgattatgttctctgtaaaactcttcaagacttcaatgagaagtttgtttataagaattatcttctcatacctttccttgtgaagagcgtattctgtttttctatcagttcgacatgaagtccacatcacatgctgttcttttctagttacatgatgtgcctttctagctttgtctagtttatagcaccttaactttaactgttcagttttatctggcagaggaaaacattcttatttctttcagaagacatttctgaaatcttataagctacttaagctacgttgtcagttttatcgcaaagatgttttgtattttagccaaatctttttatagtacaaacttagaattattttacacactaaaatggttgcagttttatggcatatgtctccgatttagatggttattctctagaaaatagtatttaaagacattttatgaaatcttcattgtcaaaacctttaataaaagtggaaatattttgaaatgccctttttcttgataccactcatccacgtgttcctgattgtccacatttcatgataaaatgagagctctgcagagaatgttagcctttctgttgtaaatgtaatcttcaagtagtcactttttgttaagttctttagaaagtagttgtcaagtacttagtcatccctattatgatatgagatagtacagcttttcaggaagcttagatctgaatttactttgaaaaacaattgtaatgaatattttatatttacattgagaatttcaactagcttctgatcaatttttaataaaaaattttcaaatcatgttagctgttaaaaaatgtataataactcagtttttcttggtttatggaaatatctatattaatgtgaaaataattaatttagaattgtgattaaagtgagcatttgtcta

SEQ ID NO: 424552 - DNA, 1330 bp, Homo sapiens
ggcgggagcaaattcgctttccccacagcgcgtgcgccgccgcaagcatggctggtgatgattggacgactggtaacagggggcggagggctccgaagtctggttttgggcgggaattgaaaccgccgctgaagccaacaagaatttgagaactgtaaataccaagccttgaaagggaccatggtgcggcctgtgagacataagaaaccagtcaattactcacagtttgaccactctgacagtgatgatgattttgtttctgcaactgtacctttaaacaagaaatccagaacagcaccaaaggagttaaaacaagataaaccaaaacctaacttgaacaatctccggaaagaagaaatcccagtacaagagaaaacccctaaaaaaaggatggctttagatgacaagctctaccagagagacttagaagttgcactagctttatcagtgaaggaacttccaacagtcaccactaatgtgcagaactctcaagataaaagcattgaaaaacatggcagtagtaaaatagaaacaatgaataagtctcctcatatctctaattgcagtgtagccagtgattatttagatttggataagattactgtggaagatgatgttggtggtgttcaagggaaaagaaaagcagcatctaaagctgcagcacagcagaggaagattcttctggaaggcagtgatggtgatagtgctaatgacactgaaccagactttgcacctggtgaagattctgaggatgattctgattttgtgagagtgaggataatgacgaagacttctctatgagaaaaagtaaagttaaagaaattaaaaagaaagaagtgaaggtaaaatccccagtagaaaagaaagagaagaaatctaaatccaaatgtaatgctttggtgacttcggtggactctgctccagctgccgtcaaatcagaatctcagtccttgccaaaaaaggtttctctgtcttcagataccactaggaaaccattagaaatacgcagtccttcagctgaaagcaagaaacctaaatgggtcccaccaggtatggcatatttatcatcaaggacaggagcttggaaaattatcactggtaaatttttttcctagttacaaacatcatgtgtgagcatttccccatattattacatattcttcaaaaccaaagttcctggttgctgcatatattcatttatttaaccattccttattattggacatccaggtttattattttttcagtgctataaataagattgcaataagtgcaaatgtccttattttagaaatctctgggcatattactgattattttcctaggataa

SEQ ID NO: 424553 - DNA, 953 bp, Homo sapiens
ggcgggagcaaattcgctttccccacagcgcgtgcgccgccgcaagcatggctggtgatgattggacgactggtaacagggggcggagggctccgaagtctggttttgggcgggaattgaaaccgccgctgaagccaacaagaatttgagaactgtaaataccaagccttgaaagggaccatggtgcggcctgtgagacataagaaaccagtcaattactcacagtttgaccactctgacagtgatgatgattttgtttctgcaactgtacctttaaacaagaaatccagaacagcaccaaaggagttaaaacaagataaaccaaaacctaacttgaacaatctccggaaagaagaaatcccagtacaagagaaaacccctaaaaaaaggatggctttagatgacaagctctaccagagagacttagaagttgcactagctttatcagtgaaggaacttccaacagtcaccactaatgtgcagaactctcaagataaaagcattgaaaaacatggcagtagtaaaatagaaacaatgaataagtctcctcatatctctaattgcagtgtagccagtgattatttagatttggataagattactgtggaagatgatgttggtggtgttcaagggaaaagaaaagcagcatctaaagctgcagcacagcagaggaagattcttctggaaggcagtgatggtgatagtgctaatgacactgaaccagactttgcacctggtgaagattctgaggatgattctgattttgtgagagtgaggataatgacgaagacttctctatgagaaaaagtaaagttaaagaaattaaaaagaaagaagtgaaggtaaaatccccagtagaaaagaaagagaagaaatctaaatccaaatgtaatgctttgggtaagcttggtccaaaacacttaattttataaaggaaatgtatgtggtttgtt

SEQ ID NO: 424554 - DNA, 419 bp, Homo sapiens
ggcgggagcaaattcgctttccccacagcgcgtgcgccgccgcaagcatggctggtgatgattggacgactggtaacagggggcggagggctccgaagtctggttttgggcgggaattgaaaccgccgctgaagccaacaagaatttgagaactgtaaataccaagccttgaaagggaccatggtgcggcctgtgagacataagaaaccagtcaattactcacagtttgaccactctgacagtgatgatgattttgtttctgcaactgtacctttaaacaagaaatccagaacagcaccaaagtaactaaacaggagcccacaagacggtctgccagattgtcagcgaaacctgctccaccaaaacctgaacccaaaccaagaaaaacatctgctaagaaagaacctggagcaaagatt

SEQ ID NO: 424555 - DNA, 325 bp, Homo sapiens
atttaatccacgcaacaaccctttgatggaggtttacagttatccccattttctaggtgaggaaactgaggctcagtgaagttagtgacctgtctgaggatgcaaacccaggcacccacaatggcaaccactgcagtgttctgctactggaaacagtgcagcacaaaggtgcataagaatctgaaagctgtggataaagttaaggcaacagaatcctcactttttagagcaaagatgaactatataatcttctgttttaggtgaagattctgaggatgattctgattttgtgagagtgaggataatgacgaagacttctctatga

SEQ ID NO: 424556 - DNA, 367 bp, Homo sapiens
gagagaagaaggcagcaggggccacttcaagcttccctgcttcctaagcttaggttgtcagaagcctttttagagatacatttttagaaaaagaaaaatagtgtggtaacagtttactacttgcttctttttttttgtttgtttagagtattttatagtaatattactatagctttatgtctagcttaccaaataaggggtgaagtgtgccccagagaacgctgttactgtagaaacgtgtcttagccccaatttccactcattggatacaatgagtgatcaagcactcgaggctctgtcggcttcactgggcacccggcaagcagaacctgagctcgacctccgctcaattaaggaagtcgatgag

SEQ ID NO: 424557 - DNA, 2570 bp, Homo sapiens
tactttgggtgtgtttcaaatattagtctgatttttgcttgagaaaatatttgtattgatatgtaagtttgcatttgactacattggtaaggtgttttcccccattgaaactaatattttctattttcaagaaaaaagcagcaagcctcggcagcagtcaatcctccagaacctatgctggtggaacagcctcggccaccaaggtgtcagcttcctctggtgcaaccagcaagtcttccagtatgaatcccacagaaaccaaggccattccagtcagccaacagatggaaggaccacatcttcctaacaagaaaaaacacaaaaaacaggctgtaaaaacagaacctgagaagaagtcacagtcaaccaagctgtctgtggttcatgagaaaaaatcccaagaaggaaagccaaaagaacacacagagccaaaaagcctacccaagcaggcatcagatacaggaagtaacgatgctcacaataaaaaagcagtttccagatcagctgaacagcagccatcagagaaatcaacagaaccaaagactaaaccacaagacatgatttctgctggtggagagagtgttgctggtatcactgcaatatctggcaagccgggtgacaagaaaaaagaaaagaaatcattaaccccagctgtgccagttgaatctaaaccggataaaccatcgggaaagtcaggcatggatgctgctttggatgacttaatagatactttaggaggacctgaagaaactgaagaagaaaatacaacgtatactggaccagaagtttcagatccaatgagttccacctacatagaggaattgggtaaaagagaagtcacaattcctccaaaatatagggaactattggctaaaaaggaagggatcacagggcctcctgcagactcttcgaaacccatagggccagatgatgctatagacgccttgtcatctgacttcacctgtgggtcgcctacagctgctggaaagaaaactgaaaaagaggaatctacagaagttttaaaagctcagtcagcagggacagtcagaagtgctgctccaccccaagagaagaaaagaaaggtggagaaggatacaatgagtgatcaagcactcgaggctctgtcggcttcactgggcacccggcaagcagaacctgagctcgacctccgctcaattaaggaagtcgatgaggcaaaagctaaagaagaaaaactagagaagtgtggtgaggatgatgaaacaatcccatctgagtacagattaaaaccagccacggataaagatggaaaaccactattgccagagcctgaagaaaaacccaagcctcggagtgaatcagaactcattgatgaactttcagaagattttgaccggtctgaatgtaaagagaaaccatctaagccaactgaaaagacagaagaatctaaggccgctgctccagctcctgtgtcggaggctgtgtgtcggacctccatgtgtagtatacagtcagcaccccctgagccggctaccttgaagggcacagtgccagatgatgctgtagaagccttggctgatagcctggggaaaaaggaagcagatccagaagatggaaaacctgtgatggataaagtcaaggagaaggccaaagaagaagaccgtgaaaagcttggtgaaaaagaagaaacaattcctcctgattatagattagaagaggtcaaggataaagatggaaagccactcctgccaaaagagtctaaggaacagcttccacccatgagtgaagacttccttctggatgctttgtctgaggacttctctggtccacaaaatgcttcatctcttaaatttgaagatgctaaacttgctgctgccatctctgaagtggtttcccaaaccccagcttcaacgacccaagctggagccccaccccgtgatacctcgcagagtgacaaagacctcgatgatgccttggataaactctctgacagtctaggacaaaggcagcctgacccagatgagaacaaaccaatggaagataaagtaaaggaaaaagctaaagctgaacatagagacaagcttggagaaagagatgacactatcccacctgaatacagacatctcctggatgataatggacaggacaaaccagtgaagccacctacaaagaaatcagaggattcaaagaaacctgcagatgaccaagaccccattgatgctctctcaggagatctggacagctgtccctccactacagaaacctcacagaacacagcaaaggataagtgcaagaaggctgcttccagctccaaagcacctaagaatggaggtaaagcgaaggattcagcaaagacaacagaggaaacttccaagccaaaagatgactaaagaaatacaagttaaggtatctggtatctgcatgtaaaatcttcagctggtggatggtgacttttgaagaacaaaaggctttggcaacagaaaacaattgttctgggtgatttctagaatggtttttgttgagtctctgaacatcctaaatattggtttgttattcttttccagaaagaaaatgaatttgactggttcacc

SEQ ID NO: 424558 - DNA, 354 bp, Homo sapiens
  misc_feature (42)..(42): n is a, c, g, or t
  misc_feature (50)..(50): n is a, c, g, or t
tttaatagaaattttttttttccccctttttttgccccgggnaaaagggnaaaccttgggtgtttgttaataactaataactggagtaagctacaggatctaaagcagccctttttacagtctagttaggagagagaaaataattgcaaatatccacttagaggcaaagaacaattttttattatcaaaaaggtttctgcacattgttgtggcaatattgtatctgtttagaaaatgggcttttccaaaagcaaacaaagataggttcctcaggtgaccaaaactgaaaatcaatatttccatgtttcattaatcaaggcataaaatacaattaaagcaaaatattttacatta

SEQ ID NO: 424559 - DNA, 562 bp, Homo sapiens
  misc_feature (450)..(450): n is a, c, g, or t
aggagcccgggtccctccgcgggcaggaaggggagggcccatcggggctaggggaaccccggcgcagacctggggtggggtcggaaaagctgtttcatcgcccgctcccgggccctccgctcctcctgcctccctccctctctccctggcaggactccccgccaggcctccccgccactctccgcggcgcattccgggaggcagcggccgcagcggcctcgccatgtcccagcccggccagaagcccgccgcctccccgcggccccggcgagcagccgccgcccgccgcacccatgagcatgtcagtgaaaaaaccagtgaatcgccttccaaaccaggagaaaagaaaggatcagatgagaaaaaagcagcaagcctcggcagcagtcaatcctccagaacctatgctggtggaacagcctcggccaccaaggtcagttctctgggcancagaagtcttcagttgaatcacagaaccaagctgtaaaacagacctgaaagaatacagtcaacaactgtctgtggtatgagaaaatccagaggaagcaagacacacaagcaa

SEQ ID NO: 424560 - DNA, 820 bp, Homo sapiens
aggagcccgggtccctccgcgggcaggaaggggagggcccatcggggctaggggaaccccggcgcagacctggggtggggtcggaaaagctgtttcatcgcccgctcccgggccctccgctcctcctgcctccctccctctctccctggcaggactccccgccaggcctccccgccactctccgcggcgcattccgggaggcagcggccgcagcggcctcgccatgtcccagcccggccagaagcccgccgcctccccgcggccccggcgagcagccgccgcccgccgcacccatgagcatgtcagtgaaaaaaccagtgaatcgccttccaaaccaggagaaaagaaaggatcagatgagaaaaaagcagcaagcctcggcagcagtcaatcctccagaacctatgctggtggaacagcctcggccaccaaggtcagtgatttcctgaacacgaaaagacccctactgtattctacagggatatgattagtgggtggggcctgtaggaatggcaaacagtgtccagatatcactgaaggttttttaacaaagtatcatttctgtgctagaagagagaatataatttcttaataatgatgtgaatgatttaaaacctagtaaaaccatttattgtataaatcttcttggcatataataagcgttaaataaatattaattattatgatgactatctgcagataatattaaacttttgaacatactgtgagtaaaaacgtagtgctcccactttagaaaataattcatatcctcctcatgggcattaaccacaccaggcgtgctgctagtgctttatgtaat

SEQ ID NO: 424561 - DNA, 590 bp, Homo sapiens
tactttgggtgtgtttcaaatattagtctgatttttgcttgagaaaatatttgtattgatatgtaagtttgcatttgactacattggtaaggtgttttcccccattgaaactaatattttctattttcaagaaaaaagcagcaagcctcggcagcagtcaatcctccagaacctatgctggtggaacagcctcggccaccaaggtcagtgatttcctgaacacgaaaagacccctactgtattctacagggatatgattagtgggtggggcctgtaggaatggcaaacagtgtccagatatcactgaaggttttttaacaaagtatcatttctgtgctagaagagagaatataatttcttaataatgatgtgaatgatttaaaacctagtaaaaccatttattgtataaatcttcttggcatataataagcgttaaataaatattaattattatgatgactatctgcagataatattaaacttttgaacatactgtgagtaaaaacgtagtgctcccactttagaaaataattcatatcctcctcatgggcattaaccacaccaggcgtgctgctagtgctttatgtaat

SEQ ID NO: 424562 - DNA, 678 bp, Homo sapiens
aggagcccgggtccctccgcgggcaggaaggggagggcccatcggggctaggggaaccccggcgcagacctggggtggggtcggaaaagctgtttcatcgcccgctcccgggccctccgctcctcctgcctccctccctctctccctggcaggactccccgccaggcctccccgccactctccgcggcgcattccgggaggcagcggccgcagcggcctcgccatgtcccagcccggccagaagcccgccgcctccccgcggccccggcgagcagccgccgcccgccgcacccatgagcatgtcagtgaaaaaaccagtgaatcgccttccaaaccaggagaaaagaaaggatcagatgagatgtagaggaattacaggaccaaaagttgcatggactaacaagccaaagataaaataactagagaggaggaaaaagaaaaatgaaaacacttaacatcagcaactttaaatgcagtagaacaaataagtctttccaaacctgcaatcaaatctatttaaaggatgaaactgacacatccggccacactgagagagtgtgaatcttttagcaacatatttcagtaaagtcctggggaatggaatttaaagtataaaacgggcatgatctcagagagccaattttaaaagcttcaaatttaacaatggatttattttta

SEQ ID NO: 424563 - DNA, 965 bp, Homo sapiens
  misc_feature (932)..(932): n is a, c, g, or t
tgggagtgcagatatctttataaggtgataatttcatctcctttgggtatatacccagaagagggattactgggtcatacagtagttctacttttaatttctttaggaacctatatactgttttccatcatagcccataccaatctacatccccactgacagtgtactagggttcccttttctccacacccttgccgacatttattatctattgacaagctctgttttgattagcaaaataaggtctgggtgagtcaggcaccacgggaattagagcatcaatgtcacccacatttccctccttatttctatcctttttccctcctgctttaaacaattctctgacaccgttgttcaaaaaaaatcatgaaaaaacacccaaagtcttccattatttaattaaattggagatctcagaatggtctggattaatttaactgcagcctagttaattgctagatggattggtgatagccatagcctcattacatttcctttgctttaggataagtgcaagaaggctgcttccagctccaaagcacctaagaatggaggtaaagcgaaggattcagcaaagacaacagaggaaacttccaagccaaaagatgactaaagaaatacaagttaaggtatctggtatctgcatgtaaaatcttcagctggtggatggtgacttttgaagaacaaaaggctttggcaacagaaaacaattgttctgggtgatttctagaatggtttttgttgagtctctgaacatcctaaatattggtttgttattcttttccagaaagaaaatgaatttgactggttcacctgtgtactgagtattgataaactttgaatttttttaattgccttcaaaaaaaaaaaaaaaaaaaaaaaaaaaaaaaaaaaaaaaaaaaaaaaaaaaaaaaaaaaaaaaaaaaaaaaanaaaaacaaaaaaaaaaaaaaaaaaaagaacaaa

SEQ ID NO: 424564 - DNA, 2330 bp, Homo sapiens
  misc_feature (151)..(151): n is a, c, g, or t
atgcaagattaattcacagtcgattaaaaatcactgagcactactcaacaaagcacatcaataattttactaattgttcaaatcattaatcctaaaggagctcatcatgatagctccactaaaaacagaccttctacaacagcgaagccanctgttaaccattactcttacccttgtcctgacccaaaatcatctcttctgtcttcacctgccttggaaatgcaacatctccactgaatatttgattcagacttggctctttaagaacaatttctgtgcaataagtagcacaatacagggataggaaaacaggtttatcctactaacttgatttgagcaaatgatttaacttctatggaagccagtctcctcatttgtaaaatgaagagcagtggtgaaggatgtagttatataatgcaggtaaagtgcaaagccccaaacccagcatgtatcagggacttaacctcatccatttgttcaccaatatttactctgatatttattcatccctctgctgtaattactgtgctagacactgaggatgcagcagtgaatcaggcaagcatcctcccctcatggagcttacagtcttttggggtatacaagcagtaaatatgattactgtaaataaactgctatgaagaaaatatgccaggggtatgctagtaactgaggagatgtggcctgcattgaacagcatggttttggggaaggtgatctgagccgagacctctcaaagataaaatgcccctttctagtgaaaagttggggaatgggcaagccaggcagagagaataaaaagtgcagaggcttaaagacaggagaaacatgtggtagcccaggagcagaaggaggctgagtggctacagtgttatgagagagtaagccaggagcgcctgtgggaattggcaccagagaggtcctcagaagccaggtcttcaaggtcatggacacatgggaaggagggatttggaatttactgcaagaacaataggcagggtttcaagaagccagggtcagttatgggctgacttgcagtcttcaatgtggaaaatgttttgctattggcaaagtggcaagggggaggccagttaggacactattgcaataggcaaggcaagagatgagaaaggattgaatgggggtaagagcagagagaagtgcgcaagatccagtgcatgtgctgagggaagaccggcaggacttgcgtagttagatgtctggggaagaaaggattcaggatgactcccgtattttatatgtccgtagtttgctctccattatgataacatctcgggctctttacttttcatgccctgcttcaggatcttcgcacctgatatttcctctgcacacaatactcctctagatgttggcatttccttcgatatcttctcaaatgtctcctaatcatcctataaaacagcaccaaccctctatcccaatcactctccttgccttattcatcttcagagcatgtaactacttgacattggttgatttgtctgtaattgtctgattcccacagcagaaatttcagctccgtgacagcaaaggttttgtctgtctgttcactgttacagccccataacctaaaaccatgtgtggcatatatgtcttgaatgaattaatgagaatacaagtgaatgaatgaaatgctttgttgctatagatcttgtctatagatgactacctttctggtcaaggctttggacatctcttcagtcatcagacagagtatctctgctctagacctcgctggagttcaagcttgaattattatatgcaagttaattttacaagcctggatgaggctactgaaaactggaaaaaagctacgagactgtaacaacccttcattctttttcatttccaaagctctctccccatctcaagctagaaaatagtgtaaccagactacacaatggaaccactcctaaaaaaattaatattagcctctcagcttttatctaaatgtaccacagtttaagagccttgtaaaatttgttccacaactttactataggaaaccttattatagaagggacaccacagaactcaatggcccacacatcaaagtcctcgagtttaggactgaagaaaagtctgcttttgtagaaaatgtgtatgcttcatgttctcttttaccagacaatgagaataactcatactgattcctcatttttccttgacttccaggaatgtctgtgataaattcaggggacaattgcgagaattatcctcagccataagtccctcacatggttatcacctgtccattatgtatctttttgtccttcattttaacatttcttttatacatggatctt

SEQ ID NO: 424565 - DNA, 1802 bp, Homo sapiens
tgctgtcacttcctgttctgagtcatcagggaaggggagtctccctgacttccagcaacaatccttgagtctgggactgccctggcctaagatgggccagtttctatcttcgactttcttggagggctcaccggccacagtgtggcacgataagctttgtgacggtgaacgcagaggagcaagagaagcagttcgtatcttccaggaccaagcaaaagctaaagaagaaaaactagagaagtgtggtgaggatgatgaaacaatcccatctgagtacagattaaaaccagccacggataaagatggaaaaccactattgccagagcctgaagaaaaacccaagcctcggagtgaatcagaactcattgatgaactttcagaagattttgaccggtctgaatgtaaagagaaaccatctaagccaactgaaaagacagaagaatctaaggccgctgctccagctcctgtgtcggaggctgtgtgtcggacctccatgtgtagtatacagtcagcaccccctgagccggctaccttgaagggcacagtgccagatgatgctgtagaagccttggctgatagcctggggaaaaaggaagcagatccagaagatggaaaacctgtgatggataaagtcaaggagaaggccaaagaagaagaccgtgaaaagcttggtgaaaaagaagaaacaattcctcctgattatagattagaagaggtcaaggataaagatggaaagccactcctgccaaaagagtctaaggaacagcttccacccatgagtgaagacttccttctggatgctttgtctgaggacttctctggtccacaaaatgcttcatctcttaaatttgaagatgctaaacttgctgctgccatctctgaagtggtttcccaaaccccagcttcaacgacccaagctggagccccaccccgtgatacctcgcagagtgacaaagacctcgatgatgccttggataaactctctgacagtctaggacaaaggcagcctgacccagatgagaacaaaccaatggaagataaagtaaaggaaaaagctaaagctgaacatagagacaagcttggagaaagagatgacactatcccacctgaatacagacatctcctggatgataatggacaggacaaaccagtgaagccacctacaaagaaatcagaggattcaaagaaacctgcagatgaccaagaccccattgatgctctctcaggagatctggacagctgtccctccactacagaaacctcacagaacacagcaaaggataagtgcaagaaggctgcttccagctccaaagcacctaagaatggaggtaaagcgaaggattcagcaaagacaacagaggaaacttccaagccaaaagatgactaaagaaatacaagttaaggtatctggtatctgcatgtaaaatcttcagctggtggatggtgacttttgaagaacaaaaggctttggcaacagaaaacaattgttctgggtgatttctagaatggtttttgttgagtctctgaacatcctaaatattggtttgttattcttttccagaaagaaaatgaatttgactggttcacctgtgtactgagtattgataaactttgaatttttttaattgccttcaattgggagagaaagctttatatttgtgtgaggacttctgcatcttacagtcagcacagaacacactgagacttgaatcaagtcagcaacagagcaaaataaaggttagataagtccttgtgtagcaaatttcgagcataagaaataaaatctaattaattcttagggt

SEQ ID NO: 424566 - DNA, 333 bp, Homo sapiens
ggtataatttttctcaggagaaggccaaagaagaagaccgtgaaaagcttggtgaaaaagaagaaacaattcctcctgattatagattagaagaggtcaaggataaagatggaaagccactcctgccaaaagagtctaaggaacagcttccacccatgagtgaagacttccttctggatgctttgtctgaggacttctctggtccacaaaatgcttcatctctttctttaaattttgaaggattgctaaaactttgctggctggccattctcttgaaggtggtttccccaaaaaccccaggcaccaagaagggtacccgagtctccgaattcc

SEQ ID NO: 424567 - DNA, 2270 bp, Homo sapiens
agaacatagggtactccgagtgaagaattcagcagctaagtggaagttgtcttctattccactttaaatacttttatctactgaatcgcaagaaaattgggtttctggtgctgtctgtggttcatgagaaaaaatcccaagaaggaaagccaaaagaacacacagagccaaaaagcctacccaagcaggcatcagatacaggaagtaacgatgctcacaataaaaaagcagtttccagatcagctgaacagcagccatcagagaaatcaacagaaccaaagactaaaccacaagacatgatttctgctggtggagagagtgttgctggtatcactgcaatatctggcaagccgggtgacaagaaaaaagaaaagaaatcattaaccccagctgtgccagttgaatctaaaccggataaaccatcgggaaagtcaggcatggatgctgctttggatgacttaatagatactttaggaggacctgaagaaactgaagaagaaaatacaacgtatactggaccagaagtttcagatccaatgagttccacctacatagaggaattgggtaaaagagaagtcacaattcctccaaaatatagggaactattggctaaacccatagggccagatgatgctatagacgccttgtcatctgacttcacctgtgggtcgcctacagctgctggaaagaaaactgaaaaagaggaatctacagaagttttaaaagctcagtcagcagggacagtcagaagtgctgctccaccccaagagaagaaaagaaaggtggagaaggatacaatgagtgatcaagcactcgaggctctgtcggcttcactgggcacccggcaagcagaacctgagctcgacctccgctcaattaaggaagtcgatgaggcaaaagctaaagaagaaaaactagagaagtgtggtgaggatgatgaaacaatcccatctgagtacagattaaaaccagccacggataaagatggaaaaccactattgccagagcctgaagaaaaacccaagcctcggagtgaatcagaactcattgatgaactttcagaagattttgaccggtctgaatgtaaagagaaaccatctaagccaactgaaaagacagaagaatctaaggccgctgctccagctcctgtgtcggaggctgtgtgtcggacctccatgtgtagtatacagtcagcaccccctgagccggctaccttgaagggcacagtgccagatgatgctgtagaagccttggctgatagcctggggaaaaaggaagcagatccagaagatggaaaacctgtgatggataaagtcaaggagaaggccaaagaagaagaccgtgaaaagcttggtgaaaaagaagaaacaattcctcctgattatagattagaagaggtcaaggataaagatggaaagccactcctgccaaaagagtctaaggaacagcttccacccatgagtgaagacttccttctggatgctttgtctgaggacttctctggtccacaaaatgcttcatctcttaaatttgaagatgctaaacttgctgctgccatctctgaagtggtttcccaaaccccagcttcaacgacccaagctggagccccaccccgtgatacctcgcagagtgacaaagacctcgatgatgccttggataaactctctgacagtctaggacaaaggcagcctgacccagatgagaacaaaccaatggaagataaagtaaaggaaaaagctaaagctgaacatagagacaagcttggagaaagagatgacactatcccacctgaatacagacatctcctggatgataatggacaggacaaaccagtgaagccacctacaaagaaatcagaggattcaaagaaacctgcagatgaccaagaccccattgatgctctctcaggagatctggacagctgtccctccactacagaaacctcacagaacacagcaaaggataagtgcaagaaggctgcttccagctccaaagcacctaagaatggaggtaaagcgaaggattcagcaaagacaacagaggaaacttccaagccaaaagatgactaaagaaatacaagttaaggtatctggtatctgcatgtaaaatcttcagctggtggatggtgacttttgaagaacaaaaggctttggcaacagaaaacaattgttctgggtgatttctagaatggtttttgttgagtctctgaacatcctaaatattggtttgttattcttttccagaaagaaaatgaatttgactggttcacc

SEQ ID NO: 424568 - DNA, 5328 bp, Homo sapiens
aggagcccgggtccctccgcgggcaggaaggggagggcccatcggggctaggggaaccccggcgcagacctggggtggggtcggaaaagctgtttcatcgcccgctcccgggccctccgctcctcctgcctccctccctctctccctggcaggactccccgccaggcctccccgccactctccgcggcgcattccgggaggcagcggccgcagcggcctcgccatgtcccagcccggccagaagcccgccgcctccccgcggccccggcgagcagccgccgcccgccgcacccatgagcatgtcagtgaaaaaaccagtgaatcgccttccaaaccaggagaaaagaaaggatcagatgagaaaaaagcagcaagcctcggcagcagtcaatcctccagaacctatgctggtggaacagcctcggccaccaaggtgtcagcttcctctggtgcaaccagcaagtcttccagtatgaatcccacagaaaccaaggctgtaaaaacagaacctgagaagaagtcacagtcaaccaagccaaaaagcctacccaagcaggcatcagatacaggaagtaacgatgctcacaataaaaaagcagtttccagatcagctgaacagcagccatcagagaaatcaacagaaccaaagactaaaccacaagacatgatttctgctggtggagagagtgttgctggtatcactgcaatatctggcaagccgggtgacaagaaaaaagaaaagaaatcattaaccccagctgtgccagttgaatctaaaccggataaaccatcgggaaagtcaggcatggatgctgctttggatgacttaatagatactttaggaggacctgaagaaactgaagaagaaaatacaacgtatactggaccagaagtttcagatccaatgagttccacctacatagaggaattgggtaaaagagaagtcacaattcctccaaaatatagggaactattggctaaaaaggaagggatcacagggcctcctgcagactcttcgaaacccatagggccagatgatgctatagacgccttgtcatctgacttcacctgtgggtcgcctacagctgctggaaagaaaactgaaaaagaggaatctacagaagttttaaaagctcagtcagcagggacagtcagaagtgctgctccaccccaagagaagaaaagaaaggtggagaaggatacaatgagtgatcaagcactcgaggctctgtcggcttcactgggcacccggcaagcagaacctgagctcgacctccgctcaattaaggaagtcgatgaggcaaaagctaaagaagaaaaactagagaagtgtggtgaggatgatgaaacaatcccatctgagtacagattaaaaccagccacggataaagatggaaaaccactattgccagagcctgaagaaaaacccaagcctcggagtgaatcagaactcattgatgaactttcagaagattttgaccggtctgaatgtaaagagaaaccatctaagccaactgaaaagacagaagaatctaaggccgctgctccagctcctgtgtcggaggctgtgtgtcggacctccatgtgtagtatacagtcagcaccccctgagccggctaccttgaagggcacagtgccagatgatgctgtagaagccttggctgatagcctggggaaaaaggaagcagatccagaagatggaaaacctgtgatggataaagtcaaggagaaggccaaagaagaagaccgtgaaaagcttggtgaaaaagaagaaacaattcctcctgattatagattagaagaggtcaaggataaagatggaaagccactcctgccaaaagagtctaaggaacagcttccacccatgagtgaagacttccttctggatgctttgtctgaggacttctctggtccacaaaatgcttcatctcttaaatttgaagatgctaaacttgctgctgccatctctgaagtggtttcccaaaccccagcttcaacgacccaagctggagccccaccccgtgatacctcgcagagtgacaaagacctcgatgatgccttggataaactctctgacagtctaggacaaaggcagcctgacccagatgagaacaaaccaatggaagataaagtaaaggaaaaagctaaagctgaacatagagacaagcttggagaaagagatgacactatcccacctgaatacagacatctcctggatgataatggacaggacaaaccagtgaagccacctacaaagaaatcagaggattcaaagaaacctgcagatgaccaagaccccattgatgctctctcaggagatctggacagctgtccctccactacagaaacctcacagaacacagcaaaggataagtgcaagaaggctgcttccagctccaaagcacctaagaatggaggtaaagcgaaggattcagcaaagacaacagaggaaacttccaagccaaaagatgactaaagaaatacaagttaaggtatctggtatctgcatgtaaaatcttcagctggtggatggtgacttttgaagaacaaaaggctttggcaacagaaaacaattgttctgggtgatttctagaatggtttttgttgagtctctgaacatcctaaatattggtttgttattcttttccagaaagaaaatgaatttgactggttcacctgtgtactgagtattgataaactttgaatttttttaattgccttcaattgggagagaaagctttatatttgtaagaaatatatttgataaagtttcttaaagcaacaccaaaaaaacaaaagaaaagctaagtgaatttttgcacattctacacacagtgcctgtaaatctcatttgtattttcagtttgcccttaattttttttgttagtgtttagaaaacaatgttttaaacattcttcagtgttctgatttcttattaccccctttcctcttgggcttttgaactgtatttgatgttgctttgggataatgtttataagtcaaacataagatattgtacattgggcacatatctcctcttgggctgctaataataaattaataacaggtaacctggacaaaccaggaagcaccaaaccccttttcagtttgaactcttctttgccaggtgtgaggacttctgcatcttacagtcagcacagaacacactgagacttgaatcaagtcagcaacagagcaaaataaaggttagataagtccttgtgtagcaaatttcgagcataagaaataaaatctaattaattcttagggtactcatctgacttgaactctgttggtttactgtgttagtaaactgtgctttctattatctatacataaaacctgagcagcaactgtgtctttagagctattgccacattagcctttgcactgtatagcgtctggctttatggaacttaagtttaccaaatataaaaagaaacttctgcttttaaaaaaattatatatatatattaaatttgaaacctgcatttctcccacagcaatgtaagaagtaggctctgatgtcctaccactttgaatggttttctaatatcttaatgaatagttcctgaacattgcactgatatcatcgattagaattttgatatttaatttcatctttatttcctggtagagaatgcaggaaaagatgtcaggtacataacataaaacagattgggaatttattgtttccaaagggcatggccttccttagcatcagtttgaagcttttgttatgacttagctgacttgtggcagcggggcaagcaaaaacaataacactgcttataaatggcaccacatcttgttaacctcccccccaaatactctctgaaagtcatgcacatacctatgggattttacacaccaccagcttaaaatgctatgtctctatccatcagaaatagtcattattctatttttaaggcagcaacaagaaaagaaaaaacacttttcctgagggatttctaaccatgtatctaatcctcccatttgggcagtataggtgtttgcttttttgttttctttttttaagaaaaaccttgaaacctttgacactgacagatgtgtttgcaaggatacggctgcagtattactaatttccatgtgtatctggaagtatttttaaatggcataccaaaatccagaagtttaaagatgcctataaaagtaaacaacatttatttaaaaagaactctgaatatgccttcttttttaattagaaatatcttcgagacttgggtgtttgttaataactaataactggagtaagctacaggatctaaagcagccctttttacagtctagttaggagagagaaaataattgcaaatatccacttagaggcaaagaacaattttttattatcaaaaaggtttctgcacattgttgtggcaatattgtatctgtttagaaaatgggcttttccaaaagcaaacaaagataggttcctcaggtgaccaaaactgaaaatcaatatttccatgtttcattaatcaaggcataaaatacaattaaagcaaaatattttacattaaaatcttggttgtgtatttttttaaaagaagggaaatagtttagtttggggtggaaattaccagtgatttctatttttattaaaccattcactacaacaaataagtataaaaattccaattccacttttatacctatttatttgttgtagtgaatggtttaataaatggcagatttatgtccagaagtcactctattttgtcgtgtattaggggaacacattttgacatttttcgtaccaatcatcaatcatattcccttatcttgaagtttttgccttatattcaaaaagttcagtttgaattctcctttgccaggtgtgaggatttccgcaccttagagtcagcgcaaaacacgctgcaacttgaatcaagtcagcaacagagcacactatgggttagataagtccctgtgtagcaagttttcagaataagaaataaaatctaattcttagggtattaactgacttgacttgaactccgttggtttaccatgttagtaaactgtgctttctattattatcatctatacataaaacctgagcagcaactgtgtgctgaagcaaccgtgtgtgaagtcttcacaaaagaaagaaagacttcaaagccaaagaatgtcctatttgctaatatgagcaaatattttgtttcacaatgtactatcatttattggtgactgcaataatttactgtcagtaaatgccaataactagttagttagaaattgtaaagtaggccaaataagaagcagagagagaaaaaaaatcacctccctaagaaaagggttttc

SEQ ID NO: 424569 - DNA, 5385 bp, Homo sapiens
aggagcccgggtccctccgcgggcaggaaggggagggcccatcggggctaggggaaccccggcgcagacctggggtggggtcggaaaagctgtttcatcgcccgctcccgggccctccgctcctcctgcctccctccctctctccctggcaggactccccgccaggcctccccgccactctccgcggcgcattccgggaggcagcggccgcagcggcctcgccatgtcccagcccggccagaagcccgccgcctccccgcggccccggcgagcagccgccgcccgccgcacccatgagcatgtcagtgaaaaaaccagtgaatcgccttccaaaccaggagaaaagaaaggatcagatgagaaaaaagcagcaagcctcggcagcagtcaatcctccagaacctatgctggtggaacagcctcggccaccaaggtgtcagcttcctctggtgcaaccagcaagtcttccagtatgaatcccacagaaaccaaggctgtaaaaacagaacctgagaagaagtcacagtcaaccaagctgtctgtggttcatgagaaaaaatcccaagaaggaaagccaaaagaacacacagagccaaaaagcctacccaagcaggcatcagatacaggaagtaacgatgctcacaataaaaaagcagtttccagatcagctgaacagcagccatcagagaaatcaacagaaccaaagactaaaccacaagacatgatttctgctggtggagagagtgttgctggtatcactgcaatatctggcaagccgggtgacaagaaaaaagaaaagaaatcattaaccccagctgtgccagttgaatctaaaccggataaaccatcgggaaagtcaggcatggatgctgctttggatgacttaatagatactttaggaggacctgaagaaactgaagaagaaaatacaacgtatactggaccagaagtttcagatccaatgagttccacctacatagaggaattgggtaaaagagaagtcacaattcctccaaaatatagggaactattggctaaaaaggaagggatcacagggcctcctgcagactcttcgaaacccatagggccagatgatgctatagacgccttgtcatctgacttcacctgtgggtcgcctacagctgctggaaagaaaactgaaaaagaggaatctacagaagttttaaaagctcagtcagcagggacagtcagaagtgctgctccaccccaagagaagaaaagaaaggtggagaaggatacaatgagtgatcaagcactcgaggctctgtcggcttcactgggcacccggcaagcagaacctgagctcgacctccgctcaattaaggaagtcgatgaggcaaaagctaaagaagaaaaactagagaagtgtggtgaggatgatgaaacaatcccatctgagtacagattaaaaccagccacggataaagatggaaaaccactattgccagagcctgaagaaaaacccaagcctcggagtgaatcagaactcattgatgaactttcagaagattttgaccggtctgaatgtaaagagaaaccatctaagccaactgaaaagacagaagaatctaaggccgctgctccagctcctgtgtcggaggctgtgtgtcggacctccatgtgtagtatacagtcagcaccccctgagccggctaccttgaagggcacagtgccagatgatgctgtagaagccttggctgatagcctggggaaaaaggaagcagatccagaagatggaaaacctgtgatggataaagtcaaggagaaggccaaagaagaagaccgtgaaaagcttggtgaaaaagaagaaacaattcctcctgattatagattagaagaggtcaaggataaagatggaaagccactcctgccaaaagagtctaaggaacagcttccacccatgagtgaagacttccttctggatgctttgtctgaggacttctctggtccacaaaatgcttcatctcttaaatttgaagatgctaaacttgctgctgccatctctgaagtggtttcccaaaccccagcttcaacgacccaagctggagccccaccccgtgatacctcgcagagtgacaaagacctcgatgatgccttggataaactctctgacagtctaggacaaaggcagcctgacccagatgagaacaaaccaatggaagataaagtaaaggaaaaagctaaagctgaacatagagacaagcttggagaaagagatgacactatcccacctgaatacagacatctcctggatgataatggacaggacaaaccagtgaagccacctacaaagaaatcagaggattcaaagaaacctgcagatgaccaagaccccattgatgctctctcaggagatctggacagctgtccctccactacagaaacctcacagaacacagcaaaggataagtgcaagaaggctgcttccagctccaaagcacctaagaatggaggtaaagcgaaggattcagcaaagacaacagaggaaacttccaagccaaaagatgactaaagaaatacaagttaaggtatctggtatctgcatgtaaaatcttcagctggtggatggtgacttttgaagaacaaaaggctttggcaacagaaaacaattgttctgggtgatttctagaatggtttttgttgagtctctgaacatcctaaatattggtttgttattcttttccagaaagaaaatgaatttgactggttcacctgtgtactgagtattgataaactttgaatttttttaattgccttcaattgggagagaaagctttatatttgtaagaaatatatttgataaagtttcttaaagcaacaccaaaaaaacaaaagaaaagctaagtgaatttttgcacattctacacacagtgcctgtaaatctcatttgtattttcagtttgcccttaattttttttgttagtgtttagaaaacaatgttttaaacattcttcagtgttctgatttcttattaccccctttcctcttgggcttttgaactgtatttgatgttgctttgggataatgtttataagtcaaacataagatattgtacattgggcacatatctcctcttgggctgctaataataaattaataacaggtaacctggacaaaccaggaagcaccaaaccccttttcagtttgaactcttctttgccaggtgtgaggacttctgcatcttacagtcagcacagaacacactgagacttgaatcaagtcagcaacagagcaaaataaaggttagataagtccttgtgtagcaaatttcgagcataagaaataaaatctaattaattcttagggtactcatctgacttgaactctgttggtttactgtgttagtaaactgtgctttctattatctatacataaaacctgagcagcaactgtgtctttagagctattgccacattagcctttgcactgtatagcgtctggctttatggaacttaagtttaccaaatataaaaagaaacttctgcttttaaaaaaattatatatatatattaaatttgaaacctgcatttctcccacagcaatgtaagaagtaggctctgatgtcctaccactttgaatggttttctaatatcttaatgaatagttcctgaacattgcactgatatcatcgattagaattttgatatttaatttcatctttatttcctggtagagaatgcaggaaaagatgtcaggtacataacataaaacagattgggaatttattgtttccaaagggcatggccttccttagcatcagtttgaagcttttgttatgacttagctgacttgtggcagcggggcaagcaaaaacaataacactgcttataaatggcaccacatcttgttaacctcccccccaaatactctctgaaagtcatgcacatacctatgggattttacacaccaccagcttaaaatgctatgtctctatccatcagaaatagtcattattctatttttaaggcagcaacaagaaaagaaaaaacacttttcctgagggatttctaaccatgtatctaatcctcccatttgggcagtataggtgtttgcttttttgttttctttttttaagaaaaaccttgaaacctttgacactgacagatgtgtttgcaaggatacggctgcagtattactaatttccatgtgtatctggaagtatttttaaatggcataccaaaatccagaagtttaaagatgcctataaaagtaaacaacatttatttaaaaagaactctgaatatgccttcttttttaattagaaatatcttcgagacttgggtgtttgttaataactaataactggagtaagctacaggatctaaagcagccctttttacagtctagttaggagagagaaaataattgcaaatatccacttagaggcaaagaacaattttttattatcaaaaaggtttctgcacattgttgtggcaatattgtatctgtttagaaaatgggcttttccaaaagcaaacaaagataggttcctcaggtgaccaaaactgaaaatcaatatttccatgtttcattaatcaaggcataaaatacaattaaagcaaaatattttacattaaaatcttggttgtgtatttttttaaaagaagggaaatagtttagtttggggtggaaattaccagtgatttctatttttattaaaccattcactacaacaaataagtataaaaattccaattccacttttatacctatttatttgttgtagtgaatggtttaataaatggcagatttatgtccagaagtcactctattttgtcgtgtattaggggaacacattttgacatttttcgtaccaatcatcaatcatattcccttatcttgaagtttttgccttatattcaaaaagttcagtttgaattctcctttgccaggtgtgaggatttccgcaccttagagtcagcgcaaaacacgctgcaacttgaatcaagtcagcaacagagcacactatgggttagataagtccctgtgtagcaagttttcagaataagaaataaaatctaattcttagggtattaactgacttgacttgaactccgttggtttaccatgttagtaaactgtgctttctattattatcatctatacataaaacctgagcagcaactgtgtgctgaagcaaccgtgtgtgaagtcttcacaaaagaaagaaagacttcaaagccaaagaatgtcctatttgctaatatgagcaaatattttgtttcacaatgtactatcatttattggtgactgcaataatttactgtcagtaaatgccaataactagttagttagaaattgtaaagtaggccaaataagaagcagagagagaaaaaaaatcacctccctaagaaaagggttttc

SEQ ID NO: 424570 - DNA, 4540 bp, Homo sapiens
aggagcccgggtccctccgcgggcaggaaggggagggcccatcggggctaggggaaccccggcgcagacctggggtggggtcggaaaagctgtttcatcgcccgctcccgggccctccgctcctcctgcctccctccctctctccctggcaggactccccgccaggcctccccgccactctccgcggcgcattccgggaggcagcggccgcagcggcctcgccatgtcccagcccggccagaagcccgccgcctccccgcggccccggcgagcagccgccgcccgccgcacccatgagcatgtcagtgaaaaaaccagtgaatcgccttccaaaccaggagaaaagaaaggatcagatgagaaaaaagcagcaagcctcggcagcagtcaatcctccagaacctatgctggtggaacagcctcggccaccaaggtgtcagcttcctctggtgcaaccagcaagtcttccagtatgaatcccacagaaaccaaggctgtaaaaacagaacctgagaagaagtcacagtcaaccaagccaaaaagcctacccaagcaggcatcagatacaggaagtaacgatgctcacaataaaaaagcagtttccagatcagctgaacagcagccatcagagaaatcaacagaaccaaagactaaaccacaagacatgatttctgctggtggagagagtgttgctggtatcactgcaatatctggcaagccgggtgacaagaaaaaagaaaagaaatcattaaccccagctgtgccagttgaatctaaaccggataaaccatcgggaaagtcaggcatggatgctgctttggatgacttaatagatactttaggaggacctgaagaaactgaagaagaaaatacaacgtatactggaccagaagtttcagatccaatgagttccacctacatagaggaattgggtaaaagagaagtcacaattcctccaaaatatagggaactattggctaaaaaggaagggatcacagggcctcctgcagactcttcgaaacccatagggccagatgatgctatagacgccttgtcatctgacttcacctgtgggtcgcctacagctgctggaaagaaaactgaaaaagaggaatctacagaagttttaaaagctcagtcagcagggacagtcagaagtgctgctccaccccaagagaagaaaagaaaggtggagaaggatacaatgagtgatcaagcactcgaggctctgtcggcttcactgggcacccggcaagcagaacctgagctcgacctccgctcaattaaggaagtcgatgaggcaaaagctaaagaagaaaaactagagaagtgtggtgaggatgatgaaacaatcccatctgagtacagattaaaaccagccacggataaagatggaaaaccactattgccagagcctgaagaaaaacccaagcctcggagtgaatcagaactcattgatgaactttcagaagattttgaccggtctgaatgtaaagagaaaccatctaagccaactgaaaagacagaagaatctaaggccgctgctccagctcctgtgtcggaggctgtgtgtcggacctccatgtgtagtatacagtcagcaccccctgagccggctaccttgaagggcacagtgccagatgatgctgtagaagccttggctgatagcctggggaaaaaggaagcagatccagaagatggaaaacctgtgatggataaagtcaaggagaaggccaaagaagaagaccgtgaaaagcttggtgaaaaagaagaaacaattcctcctgattatagattagaagaggtcaaggataaagatggaaagccactcctgccaaaagagtctaaggaacagcttccacccatgagtgaagacttccttctggatgctttgtctgaggacttctctggtccacaaaatgcttcatctcttaaatttgaagatgctaaacttgctgctgccatctctgaagtggtttcccaaaccccagcttcaacgacccaagctggagccccaccccgtgatacctcgcagagtgacaaagacctcgatgatgccttggataaactctctgacagtctaggacaaaggcagcctgacccagatgagaacaaaccaatggaagataaagtaaaggaaaaagctaaagctgaacatagagacaagcttggagaaagagatgacactatcccacctgaatacagacatctcctggatgataatggacaggacaaaccagtgaagccacctacaaagaaatcagaggattcaaagaaacctgcagatgaccaagaccccattgatgctctctcaggagatctggacagctgtccctccactacagaaacctcacagaacacagcaaaggataagtgcaagaaggctgcttccagctccaaagcacctaagaatggaggtaaagcgaaggattcagcaaagacaacagaggaaacttccaagccaaaagatgactaaagaaatacaagttaaggtatctggtatctgcatgtaaaatcttcagctggtggatggtgacttttgaagaacaaaaggctttggcaacagaaaacaattgttctgggtgatttctagaatggtttttgttgagtctctgaacatcctaaatattggtttgttattcttttccagaaagaaaatgaatttgactggttcacctgtgtactgagtattgataaactttgaatttttttaattgccttcaattgggagagaaagctttatatttgtaagaaatatatttgataaagtttcttaaagcaacaccaaaaaaacaaaagaaaagctaagtgaatttttgcacattctacacacagtgcctgtaaatctcatttgtattttcagtttgcccttaattttttttgttagtgtttagaaaacaatgttttaaacattcttcagtgttctgatttcttattaccccctttcctcttgggcttttgaactgtatttgatgttgctttgggataatgtttataagtcaaacataagatattgtacattgggcacatatctcctcttgggctgctaataataaattaataacaggtaacctggacaaaccaggaagcaccaaaccccttttcagtttgaactcttctttgccaggtgtgaggacttctgcatcttacagtcagcacagaacacactgagacttgaatcaagtcagcaacagagcaaaataaaggttagataagtccttgtgtagcaaatttcgagcataagaaataaaatctaattaattcttagggtactcatctgacttgaactctgttggtttactgtgttagtaaactgtgctttctattatctatacataaaacctgagcagcaactgtgtctttagagctattgccacattagcctttgcactgtatagcgtctggctttatggaacttaagtttaccaaatataaaaagaaacttctgcttttaaaaaaattatatatatatattaaatttgaaacctgcatttctcccacagcaatgtaagaagtaggctctgatgtcctaccactttgaatggttttctaatatcttaatgaatagttcctgaacattgcactgatatcatcgattagaattttgatatttaatttcatctttatttcctggtagagaatgcaggaaaagatgtcaggtacataacataaaacagattgggaatttattgtttccaaagggcatggccttccttagcatcagtttgaagcttttgttatgacttagctgacttgtggcagcggggcaagcaaaaacaataacactgcttataaatggcaccacatcttgttaacctcccccccaaatactctctgaaagtcatgcacatacctatgggattttacacaccaccagcttaaaatgctatgtctctatccatcagaaatagtcattattctatttttaaggcagcaacaagaaaagaaaaaacacttttcctgagggatttctaaccatgtatctaatcctcccatttgggcagtataggtgtttgcttttttgttttctttttttaagaaaaaccttgaaacctttgacactgacagatgtgtttgcaaggatacggctgcagtattactaatttccatgtgtatctggaagtatttttaaatggcataccaaaatccagaagtttaaagatgcctataaaagtaaacaacatttatttaaaaagaactctgaatatgccttcttttttaattagaaatatcttcgagacttgggtgtttgttaataactaataactggagtaagctacaggatctaaagcagccctttttacagtctagttaggagagagaaaataattgcaaatatccacttagaggcaaagaacaattttttattatcaaaaaggtttctgcacattgttgtggcaatattgtatctgtttagaaaatgggcttttccaaaagcaaacaaagataggttcctcaggtgaccaaaactgaaaatcaatatttccatgtttcattaatcaaggcataaaatacaattaaagcaaaatattttacatta

SEQ ID NO: 424571 - DNA, 5346 bp, Homo sapiens
aggagcccgggtccctccgcgggcaggaaggggagggcccatcggggctaggggaaccccggcgcagacctggggtggggtcggaaaagctgtttcatcgcccgctcccgggccctccgctcctcctgcctccctccctctctccctggcaggactccccgccaggcctccccgccactctccgcggcgcattccgggaggcagcggccgcagcggcctcgccatgtcccagcccggccagaagcccgccgcctccccgcggccccggcgagcagccgccgcccgccgcacccatgagcatgtcagtgaaaaaaccagtgaatcgccttccaaaccaggagaaaagaaaggatcagatgagaaaaaagcagcaagcctcggcagcagtcaatcctccagaacctatgctggtggaacagcctcggccaccaaggtgtcagcttcctctggtgcaaccagcaagtcttccagtatgaatcccacagaaaccaaggctgtaaaaacagaacctgagaagaagtcacagtcaaccaagctgtctgtggttcatgagaaaaaatcccaagaaggaaagccaaaagaacacacagagccaaaaagcctacccaagcaggcatcagatacaggaagtaacgatgctcacaataaaaaagcagtttccagatcagctgaacagcagccatcagagaaatcaacagaaccaaagactaaaccacaagacatgatttctgctggtggagagagtgttgctggtatcactgcaatatctggcaagccgggtgacaagaaaaaagaaaagaaatcattaaccccagctgtgccagttgaatctaaaccggataaaccatcgggaaagtcaggcatggatgctgctttggatgacttaatagatactttaggaggacctgaagaaactgaagaagaaaatacaacgtatactggaccagaagtttcagatccaatgagttccacctacatagaggaattgggtaaaagagaagtcacaattcctccaaaatatagggaactattggctaaacccatagggccagatgatgctatagacgccttgtcatctgacttcacctgtgggtcgcctacagctgctggaaagaaaactgaaaaagaggaatctacagaagttttaaaagctcagtcagcagggacagtcagaagtgctgctccaccccaagagaagaaaagaaaggtggagaaggatacaatgagtgatcaagcactcgaggctctgtcggcttcactgggcacccggcaagcagaacctgagctcgacctccgctcaattaaggaagtcgatgaggcaaaagctaaagaagaaaaactagagaagtgtggtgaggatgatgaaacaatcccatctgagtacagattaaaaccagccacggataaagatggaaaaccactattgccagagcctgaagaaaaacccaagcctcggagtgaatcagaactcattgatgaactttcagaagattttgaccggtctgaatgtaaagagaaaccatctaagccaactgaaaagacagaagaatctaaggccgctgctccagctcctgtgtcggaggctgtgtgtcggacctccatgtgtagtatacagtcagcaccccctgagccggctaccttgaagggcacagtgccagatgatgctgtagaagccttggctgatagcctggggaaaaaggaagcagatccagaagatggaaaacctgtgatggataaagtcaaggagaaggccaaagaagaagaccgtgaaaagcttggtgaaaaagaagaaacaattcctcctgattatagattagaagaggtcaaggataaagatggaaagccactcctgccaaaagagtctaaggaacagcttccacccatgagtgaagacttccttctggatgctttgtctgaggacttctctggtccacaaaatgcttcatctcttaaatttgaagatgctaaacttgctgctgccatctctgaagtggtttcccaaaccccagcttcaacgacccaagctggagccccaccccgtgatacctcgcagagtgacaaagacctcgatgatgccttggataaactctctgacagtctaggacaaaggcagcctgacccagatgagaacaaaccaatggaagataaagtaaaggaaaaagctaaagctgaacatagagacaagcttggagaaagagatgacactatcccacctgaatacagacatctcctggatgataatggacaggacaaaccagtgaagccacctacaaagaaatcagaggattcaaagaaacctgcagatgaccaagaccccattgatgctctctcaggagatctggacagctgtccctccactacagaaacctcacagaacacagcaaaggataagtgcaagaaggctgcttccagctccaaagcacctaagaatggaggtaaagcgaaggattcagcaaagacaacagaggaaacttccaagccaaaagatgactaaagaaatacaagttaaggtatctggtatctgcatgtaaaatcttcagctggtggatggtgacttttgaagaacaaaaggctttggcaacagaaaacaattgttctgggtgatttctagaatggtttttgttgagtctctgaacatcctaaatattggtttgttattcttttccagaaagaaaatgaatttgactggttcacctgtgtactgagtattgataaactttgaatttttttaattgccttcaattgggagagaaagctttatatttgtaagaaatatatttgataaagtttcttaaagcaacaccaaaaaaacaaaagaaaagctaagtgaatttttgcacattctacacacagtgcctgtaaatctcatttgtattttcagtttgcccttaattttttttgttagtgtttagaaaacaatgttttaaacattcttcagtgttctgatttcttattaccccctttcctcttgggcttttgaactgtatttgatgttgctttgggataatgtttataagtcaaacataagatattgtacattgggcacatatctcctcttgggctgctaataataaattaataacaggtaacctggacaaaccaggaagcaccaaaccccttttcagtttgaactcttctttgccaggtgtgaggacttctgcatcttacagtcagcacagaacacactgagacttgaatcaagtcagcaacagagcaaaataaaggttagataagtccttgtgtagcaaatttcgagcataagaaataaaatctaattaattcttagggtactcatctgacttgaactctgttggtttactgtgttagtaaactgtgctttctattatctatacataaaacctgagcagcaactgtgtctttagagctattgccacattagcctttgcactgtatagcgtctggctttatggaacttaagtttaccaaatataaaaagaaacttctgcttttaaaaaaattatatatatatattaaatttgaaacctgcatttctcccacagcaatgtaagaagtaggctctgatgtcctaccactttgaatggttttctaatatcttaatgaatagttcctgaacattgcactgatatcatcgattagaattttgatatttaatttcatctttatttcctggtagagaatgcaggaaaagatgtcaggtacataacataaaacagattgggaatttattgtttccaaagggcatggccttccttagcatcagtttgaagcttttgttatgacttagctgacttgtggcagcggggcaagcaaaaacaataacactgcttataaatggcaccacatcttgttaacctcccccccaaatactctctgaaagtcatgcacatacctatgggattttacacaccaccagcttaaaatgctatgtctctatccatcagaaatagtcattattctatttttaaggcagcaacaagaaaagaaaaaacacttttcctgagggatttctaaccatgtatctaatcctcccatttgggcagtataggtgtttgcttttttgttttctttttttaagaaaaaccttgaaacctttgacactgacagatgtgtttgcaaggatacggctgcagtattactaatttccatgtgtatctggaagtatttttaaatggcataccaaaatccagaagtttaaagatgcctataaaagtaaacaacatttatttaaaaagaactctgaatatgccttcttttttaattagaaatatcttcgagacttgggtgtttgttaataactaataactggagtaagctacaggatctaaagcagccctttttacagtctagttaggagagagaaaataattgcaaatatccacttagaggcaaagaacaattttttattatcaaaaaggtttctgcacattgttgtggcaatattgtatctgtttagaaaatgggcttttccaaaagcaaacaaagataggttcctcaggtgaccaaaactgaaaatcaatatttccatgtttcattaatcaaggcataaaatacaattaaagcaaaatattttacattaaaatcttggttgtgtatttttttaaaagaagggaaatagtttagtttggggtggaaattaccagtgatttctatttttattaaaccattcactacaacaaataagtataaaaattccaattccacttttatacctatttatttgttgtagtgaatggtttaataaatggcagatttatgtccagaagtcactctattttgtcgtgtattaggggaacacattttgacatttttcgtaccaatcatcaatcatattcccttatcttgaagtttttgccttatattcaaaaagttcagtttgaattctcctttgccaggtgtgaggatttccgcaccttagagtcagcgcaaaacacgctgcaacttgaatcaagtcagcaacagagcacactatgggttagataagtccctgtgtagcaagttttcagaataagaaataaaatctaattcttagggtattaactgacttgacttgaactccgttggtttaccatgttagtaaactgtgctttctattattatcatctatacataaaacctgagcagcaactgtgtgctgaagcaaccgtgtgtgaagtcttcacaaaagaaagaaagacttcaaagccaaagaatgtcctatttgctaatatgagcaaatattttgtttcacaatgtactatcatttattggtgactgcaataatttactgtcagtaaatgccaataactagttagttagaaattgtaaagtaggccaaataagaagcagagagagaaaaaaaatcacctccctaagaaaagggttttc

SEQ ID NO: 424572 - DNA, 5133 bp, Homo sapiens
aggagcccgggtccctccgcgggcaggaaggggagggcccatcggggctaggggaaccccggcgcagacctggggtggggtcggaaaagctgtttcatcgcccgctcccgggccctccgctcctcctgcctccctccctctctccctggcaggactccccgccaggcctccccgccactctccgcggcgcattccgggaggcagcggccgcagcggcctcgccatgtcccagcccggccagaagcccgccgcctccccgcggccccggcgagcagccgccgcccgccgcacccatgagcatgtcagtgaaaaaaccagtgaatcgccttccaaaccaggagaaaagaaaggatcagatgagaaaaaagcagcaagcctcggcagcagtcaatcctccagaacctatgctggtggaacagcctcggccaccaaggtgtcagcttcctctggtgcaaccagcaagtcttccagtatgaatcccacagaaaccaaggctgtaaaaacagaacctgagaagaagtcacagtcaaccaagccaaaaagcctacccaagcaggcatcagatacaggaagtaacgatgctcacaataaaaaagcagtttccagatcagctgaacagcagccatcagagaaatcaacagaaccaaagactaaaccacaagacatgatttctgctggtggagagagtgttgctggtatcactgcaatatctggcaagccgggtgacaagaaaaaagaaaagaaatcattaaccccagctgtgccagttgaatctaaaccggataaaccatcgggaaagtcaggcatggatgctgctttggatgacttaatagatactttaggaggacctgaagaaactgaagaagaaaatacaacgtatactggaccagaagtttcagatccaatgagttccacctacatagaggaattgggtaaaagagaagtcacaattcctccaaaatatagggaactattggctaaaaaggaagggatcacagggcctcctgcagactcttcgaaacccatagggccagatgatgctatagacgccttgtcatctgacttcacctgtgggtcgcctacagctgctggaaagaaaactgaaaaagaggaatctacagaagttttaaaagctcagtcagcagggacagtcagaagtgctgctccaccccaagagaagaaaagaaaggtggagaaggatacaatgagtgatcaagcactcgaggctctgtcggcttcactgggcacccggcaagcagaacctgagctcgacctccgctcaattaaggaagtcgatgaggcaaaagctaaagaagaaaaactagagaagtgtggtgaggatgatgaaacaatcccatctgagtacagattaaaaccagccacggataaagatggaaaaccactattgccagagcctgaagaaaaacccaagcctcggagtgaatcagaactcattgatgaactttcagaagattttgaccggtctgaatgtaaagagaaaccatctaagccaactgaaaagacagaagaatctaaggccgctgctccagctcctgtgtcggaggctgtgtgtcggacctccatgtgtagtatacagtcagcaccccctgagccggctaccttgaagggcacagtgccagatgatgctgtagaagccttggctgatagcctggggaaaaaggaagcagatccagaagatggaaaacctgtgatggataaagtcaaggagaaggccaaagaagaagaccgtgaaaagcttggtgaaaaagaagaaacaattcctcctgattatagattagaagaggtcaaggataaagatggaaagccactcctgccaaaagagtctaaggaacagcttccacccatgagtgaagacttccttctggatgctttgtctgaggacttctctggtccacaaaatgcttcatctcttaaatttgaagatgctaaacttgctgctgccatctctgaagtggtttcccaaaccccagcttcaacgacccaagctggagccccaccccgtgatacctcgcagagtgacaaagacctcgatgatgccttggataaactctctgacagtctaggacaaaggcagcctgacccagatgagaacaaaccaatggaagataaagtaaaggaaaaagctaaagctgaacatagagacaagcttggagaaagagatgacactatcccacctgaatacagacatctcctggatgataatggacaggacaaaccagtgaagccacctacaaagaaatcagaggattcaaagaaacctgcagatgaccaagaccccattgatgctctctcaggagatctggacagctgtccctccactacagaaacctcacagaacacagcaaaggataagtgcaagaaggctgcttccagctccaaagcacctaagaatggaggtaaagcgaaggattcagcaaagacaacagaggaaacttccaagccaaaagatgactaaagaaatacaagttaaggtatctggtatctgcatgtaaaatcttcagctggtggatggtgacttttgaagaacaaaaggctttggcaacagaaaacaattgttctgggtgatttctagaatggtttttgttgagtctctgaacatcctaaatattggtttgttattcttttccagaaagaaaatgaatttgactggttcacctgtgtactgagtattgataaactttgaatttttttaattgccttcaattgggagagaaagctttatatttgtaagaaatatatttgataaagtttcttaaagcaacaccaaaaaaacaaaagaaaagctaagtgaatttttgcacattctacacacagtgcctgtaaatctcatttgtattttcagtttgcccttaattttttttgttagtgtttagaaaacaatgttttaaacattcttcagtgttctgatttcttattaccccctttcctcttgggcttttgaactgtatttgatgttgctttgggataatgtttataagtcaaacataagatattgtacattgggcacatatctcctcttgggctgctaataataaattaataacaggtaacctggacaaaccaggaagcaccaaaccccttttcagtttgaactcttctttgccaggtgtgaggacttctgcatcttacagtcagcacagaacacactgagacttgaatcaagtcagcaacagagcaaaataaaggttagataagtccttgtgtagcaaatttcgagcataagaaataaaatctaattaattcttagggtactcatctgacttgaactctgttggtttactgtgttagtaaactgtgctttctattatctatacataaaacctgagcagcaactgtgtctttagagctattgccacattagcctttgcactgtatagcgtctggctttatggaacttaagtttaccaaatataaaaagaaacttctgcttttaaaaaaattatatatatatattaaatttgaaacctgcatttctcccacagcaatgtaagaagtaggctctgatgtcctaccactttgaatggttttctaatatcttaatgaatagttcctgaacattgcactgatatcatcgattagaattttgatatttaatttcatctttatttcctggtagagaatgcaggaaaagatgtcaggtacataacataaaacagattgggaatttattgtttccaaagggcatggccttccttagcatcagtttgaagcttttgttatgacttagctgacttgtggcagcggggcaagcaaaaacaataacactgcttataaatggcaccacatcttgttaacctcccccccaaatactctctgaaagtcatgcacatacctatgggattttacacaccaccagcttaaaatgctatgtctctatccatcagaaatagtcattattctatttttaaggcagcaacaagaaaagaaaaaacacttttcctgagggatttctaaccatgtatctaatcctcccatttgggcagtataggtgtttgcttttttgttttctttttttaagaaaaaccttgaaacctttgacactgacagatgtgtttgcaaggatacggctgcagtattactaatttccatgtgtatctggaagtatttttaaatggcataccaaaatccagaagtttaaagatgcctataaaagtaaacaacatttatttaaaaagaactctgaatatgccttcttttttaattagaaatatcttcgagacttgggtgtttgttaataactaataactggagtaagctacaggatctaaagcagccctttttacagtctagttaggagagagaaaataattgcaaatatccacttagaggcaaagaacaattttttattatcaaaaaggtttctgcacattgttgtggcaatattgtatctgtttagaaaatgggcttttccaaaagcaaacaaagataggttcctcaggtgaccaaaactgaaaatcaatatttccatgtttcattaatcaaggcataaaatacaattaaagcaaaatattttacattaaaatcttggttgtgtatttttttaaaagaagggaaatagtttagtttggggtggaaattaccagtgatttctatttttattaaaccattcaaaaagttcagtttgaattctcctttgccaggtgtgaggatttccgcaccttagagtcagcgcaaaacacgctgcaacttgaatcaagtcagcaacagagcacactatgggttagataagtccctgtgtagcaagttttcagaataagaaataaaatctaattcttagggtattaactgacttgacttgaactccgttggtttaccatgttagtaaactgtgctttctattattatcatctatacataaaacctgagcagcaactgtgtgctgaagcaaccgtgtgtgaagtcttcacaaaagaaagaaagacttcaaagccaaagaatgtcctatttgctaatatgagcaaatattttgtttcacaatgtactatcatttattggtgactgcaataatttactgtcagtaaatgccaataactagttagttagaaattgtaaagtaggccaaataagaagcagagagagaaaaaaaatcacctccctaagaaaagggttttc

SEQ ID NO: 424573 - DNA, 5451 bp, Homo sapiens
aggagcccgggtccctccgcgggcaggaaggggagggcccatcggggctaggggaaccccggcgcagacctggggtggggtcggaaaagctgtttcatcgcccgctcccgggccctccgctcctcctgcctccctccctctctccctggcaggactccccgccaggcctccccgccactctccgcggcgcattccgggaggcagcggccgcagcggcctcgccatgtcccagcccggccagaagcccgccgcctccccgcggccccggcgagcagccgccgcccgccgcacccatgagcatgtcagtgaaaaaaccagtgaatcgccttccaaaccaggagaaaagaaaggatcagatgagaaaaaagcagcaagcctcggcagcagtcaatcctccagaacctatgctggtggaacagcctcggccaccaaggtgtcagcttcctctggtgcaaccagcaagtcttccagtatgaatcccacagaaaccaaggccattccagtcagccaacagatggaaggaccacatcttcctaacaagaaaaaacacaaaaaacaggctgtaaaaacagaacctgagaagaagtcacagtcaaccaagctgtctgtggttcatgagaaaaaatcccaagaaggaaagccaaaagaacacacagagccaaaaagcctacccaagcaggcatcagatacaggaagtaacgatgctcacaataaaaaagcagtttccagatcagctgaacagcagccatcagagaaatcaacagaaccaaagactaaaccacaagacatgatttctgctggtggagagagtgttgctggtatcactgcaatatctggcaagccgggtgacaagaaaaaagaaaagaaatcattaaccccagctgtgccagttgaatctaaaccggataaaccatcgggaaagtcaggcatggatgctgctttggatgacttaatagatactttaggaggacctgaagaaactgaagaagaaaatacaacgtatactggaccagaagtttcagatccaatgagttccacctacatagaggaattgggtaaaagagaagtcacaattcctccaaaatatagggaactattggctaaaaaggaagggatcacagggcctcctgcagactcttcgaaacccatagggccagatgatgctatagacgccttgtcatctgacttcacctgtgggtcgcctacagctgctggaaagaaaactgaaaaagaggaatctacagaagttttaaaagctcagtcagcagggacagtcagaagtgctgctccaccccaagagaagaaaagaaaggtggagaaggatacaatgagtgatcaagcactcgaggctctgtcggcttcactgggcacccggcaagcagaacctgagctcgacctccgctcaattaaggaagtcgatgaggcaaaagctaaagaagaaaaactagagaagtgtggtgaggatgatgaaacaatcccatctgagtacagattaaaaccagccacggataaagatggaaaaccactattgccagagcctgaagaaaaacccaagcctcggagtgaatcagaactcattgatgaactttcagaagattttgaccggtctgaatgtaaagagaaaccatctaagccaactgaaaagacagaagaatctaaggccgctgctccagctcctgtgtcggaggctgtgtgtcggacctccatgtgtagtatacagtcagcaccccctgagccggctaccttgaagggcacagtgccagatgatgctgtagaagccttggctgatagcctggggaaaaaggaagcagatccagaagatggaaaacctgtgatggataaagtcaaggagaaggccaaagaagaagaccgtgaaaagcttggtgaaaaagaagaaacaattcctcctgattatagattagaagaggtcaaggataaagatggaaagccactcctgccaaaagagtctaaggaacagcttccacccatgagtgaagacttccttctggatgctttgtctgaggacttctctggtccacaaaatgcttcatctcttaaatttgaagatgctaaacttgctgctgccatctctgaagtggtttcccaaaccccagcttcaacgacccaagctggagccccaccccgtgatacctcgcagagtgacaaagacctcgatgatgccttggataaactctctgacagtctaggacaaaggcagcctgacccagatgagaacaaaccaatggaagataaagtaaaggaaaaagctaaagctgaacatagagacaagcttggagaaagagatgacactatcccacctgaatacagacatctcctggatgataatggacaggacaaaccagtgaagccacctacaaagaaatcagaggattcaaagaaacctgcagatgaccaagaccccattgatgctctctcaggagatctggacagctgtccctccactacagaaacctcacagaacacagcaaaggataagtgcaagaaggctgcttccagctccaaagcacctaagaatggaggtaaagcgaaggattcagcaaagacaacagaggaaacttccaagccaaaagatgactaaagaaatacaagttaaggtatctggtatctgcatgtaaaatcttcagctggtggatggtgacttttgaagaacaaaaggctttggcaacagaaaacaattgttctgggtgatttctagaatggtttttgttgagtctctgaacatcctaaatattggtttgttattcttttccagaaagaaaatgaatttgactggttcacctgtgtactgagtattgataaactttgaatttttttaattgccttcaattgggagagaaagctttatatttgtaagaaatatatttgataaagtttcttaaagcaacaccaaaaaaacaaaagaaaagctaagtgaatttttgcacattctacacacagtgcctgtaaatctcatttgtattttcagtttgcccttaattttttttgttagtgtttagaaaacaatgttttaaacattcttcagtgttctgatttcttattaccccctttcctcttgggcttttgaactgtatttgatgttgctttgggataatgtttataagtcaaacataagatattgtacattgggcacatatctcctcttgggctgctaataataaattaataacaggtaacctggacaaaccaggaagcaccaaaccccttttcagtttgaactcttctttgccaggtgtgaggacttctgcatcttacagtcagcacagaacacactgagacttgaatcaagtcagcaacagagcaaaataaaggttagataagtccttgtgtagcaaatttcgagcataagaaataaaatctaattaattcttagggtactcatctgacttgaactctgttggtttactgtgttagtaaactgtgctttctattatctatacataaaacctgagcagcaactgtgtctttagagctattgccacattagcctttgcactgtatagcgtctggctttatggaacttaagtttaccaaatataaaaagaaacttctgcttttaaaaaaattatatatatatattaaatttgaaacctgcatttctcccacagcaatgtaagaagtaggctctgatgtcctaccactttgaatggttttctaatatcttaatgaatagttcctgaacattgcactgatatcatcgattagaattttgatatttaatttcatctttatttcctggtagagaatgcaggaaaagatgtcaggtacataacataaaacagattgggaatttattgtttccaaagggcatggccttccttagcatcagtttgaagcttttgttatgacttagctgacttgtggcagcggggcaagcaaaaacaataacactgcttataaatggcaccacatcttgttaacctcccccccaaatactctctgaaagtcatgcacatacctatgggattttacacaccaccagcttaaaatgctatgtctctatccatcagaaatagtcattattctatttttaaggcagcaacaagaaaagaaaaaacacttttcctgagggatttctaaccatgtatctaatcctcccatttgggcagtataggtgtttgcttttttgttttctttttttaagaaaaaccttgaaacctttgacactgacagatgtgtttgcaaggatacggctgcagtattactaatttccatgtgtatctggaagtatttttaaatggcataccaaaatccagaagtttaaagatgcctataaaagtaaacaacatttatttaaaaagaactctgaatatgccttcttttttaattagaaatatcttcgagacttgggtgtttgttaataactaataactggagtaagctacaggatctaaagcagccctttttacagtctagttaggagagagaaaataattgcaaatatccacttagaggcaaagaacaattttttattatcaaaaaggtttctgcacattgttgtggcaatattgtatctgtttagaaaatgggcttttccaaaagcaaacaaagataggttcctcaggtgaccaaaactgaaaatcaatatttccatgtttcattaatcaaggcataaaatacaattaaagcaaaatattttacattaaaatcttggttgtgtatttttttaaaagaagggaaatagtttagtttggggtggaaattaccagtgatttctatttttattaaaccattcactacaacaaataagtataaaaattccaattccacttttatacctatttatttgttgtagtgaatggtttaataaatggcagatttatgtccagaagtcactctattttgtcgtgtattaggggaacacattttgacatttttcgtaccaatcatcaatcatattcccttatcttgaagtttttgccttatattcaaaaagttcagtttgaattctcctttgccaggtgtgaggatttccgcaccttagagtcagcgcaaaacacgctgcaacttgaatcaagtcagcaacagagcacactatgggttagataagtccctgtgtagcaagttttcagaataagaaataaaatctaattcttagggtattaactgacttgacttgaactccgttggtttaccatgttagtaaactgtgctttctattattatcatctatacataaaacctgagcagcaactgtgtgctgaagcaaccgtgtgtgaagtcttcacaaaagaaagaaagacttcaaagccaaagaatgtcctatttgctaatatgagcaaatattttgtttcacaatgtactatcatttattggtgactgcaataatttactgtcagtaaatgccaataactagttagttagaaattgtaaagtaggccaaataagaagcagagagagaaaaaaaatcacctccctaagaaaagggttttc

SEQ ID NO: 424574 - DNA, 5076 bp, Homo sapiens
cagcgatacggcccggaagttcgggatgcgaggactgcggggtccggtgtcacgcagagtgtcagcttcctctggtgcaaccagcaagtcttccagtatgaatcccacagaaaccaaggccattccagtcagccaacagatggaaggaccacatcttcctaacaagaaaaaacacaaaaaacaggctgtaaaaacagaacctgagaagaagtcacagtcaaccaagctgtctgtggttcatgagaaaaaatcccaagaaggaaagccaaaagaacacacagagccaaaaagcctacccaagcaggcatcagatacaggaagtaacgatgctcacaataaaaaagcagtttccagatcagctgaacagcagccatcagagaaatcaacagaaccaaagactaaaccacaagacatgatttctgctggtggagagagtgttgctggtatcactgcaatatctggcaagccgggtgacaagaaaaaagaaaagaaatcattaaccccagctgtgccagttgaatctaaaccggataaaccatcgggaaagtcaggcatggatgctgctttggatgacttaatagatactttaggaggacctgaagaaactgaagaagaaaatacaacgtatactggaccagaagtttcagatccaatgagttccacctacatagaggaattgggtaaaagagaagtcacaattcctccaaaatatagggaactattggctaaaaaggaagggatcacagggcctcctgcagactcttcgaaacccatagggccagatgatgctatagacgccttgtcatctgacttcacctgtgggtcgcctacagctgctggaaagaaaactgaaaaagaggaatctacagaagttttaaaagctcagtcagcagggacagtcagaagtgctgctccaccccaagagaagaaaagaaaggtggagaaggatacaatgagtgatcaagcactcgaggctctgtcggcttcactgggcacccggcaagcagaacctgagctcgacctccgctcaattaaggaagtcgatgaggcaaaagctaaagaagaaaaactagagaagtgtggtgaggatgatgaaacaatcccatctgagtacagattaaaaccagccacggataaagatggaaaaccactattgccagagcctgaagaaaaacccaagcctcggagtgaatcagaactcattgatgaactttcagaagattttgaccggtctgaatgtaaagagaaaccatctaagccaactgaaaagacagaagaatctaaggccgctgctccagctcctgtgtcggaggctgtgtgtcggacctccatgtgtagtatacagtcagcaccccctgagccggctaccttgaagggcacagtgccagatgatgctgtagaagccttggctgatagcctggggaaaaaggaagcagatccagaagatggaaaacctgtgatggataaagtcaaggagaaggccaaagaagaagaccgtgaaaagcttggtgaaaaagaagaaacaattcctcctgattatagattagaagaggtcaaggataaagatggaaagccactcctgccaaaagagtctaaggaacagcttccacccatgagtgaagacttccttctggatgctttgtctgaggacttctctggtccacaaaatgcttcatctcttaaatttgaagatgctaaacttgctgctgccatctctgaagtggtttcccaaaccccagcttcaacgacccaagctggagccccaccccgtgatacctcgcagagtgacaaagacctcgatgatgccttggataaactctctgacagtctaggacaaaggcagcctgacccagatgagaacaaaccaatggaagataaagtaaaggaaaaagctaaagctgaacatagagacaagcttggagaaagagatgacactatcccacctgaatacagacatctcctggatgataatggacaggacaaaccagtgaagccacctacaaagaaatcagaggattcaaagaaacctgcagatgaccaagaccccattgatgctctctcaggagatctggacagctgtccctccactacagaaacctcacagaacacagcaaaggataagtgcaagaaggctgcttccagctccaaagcacctaagaatggaggtaaagcgaaggattcagcaaagacaacagaggaaacttccaagccaaaagatgactaaagaaatacaagttaaggtatctggtatctgcatgtaaaatcttcagctggtggatggtgacttttgaagaacaaaaggctttggcaacagaaaacaattgttctgggtgatttctagaatggtttttgttgagtctctgaacatcctaaatattggtttgttattcttttccagaaagaaaatgaatttgactggttcacctgtgtactgagtattgataaactttgaatttttttaattgccttcaattgggagagaaagctttatatttgtaagaaatatatttgataaagtttcttaaagcaacaccaaaaaaacaaaagaaaagctaagtgaatttttgcacattctacacacagtgcctgtaaatctcatttgtattttcagtttgcccttaattttttttgttagtgtttagaaaacaatgttttaaacattcttcagtgttctgatttcttattaccccctttcctcttgggcttttgaactgtatttgatgttgctttgggataatgtttataagtcaaacataagatattgtacattgggcacatatctcctcttgggctgctaataataaattaataacaggtaacctggacaaaccaggaagcaccaaaccccttttcagtttgaactcttctttgccaggtgtgaggacttctgcatcttacagtcagcacagaacacactgagacttgaatcaagtcagcaacagagcaaaataaaggttagataagtccttgtgtagcaaatttcgagcataagaaataaaatctaattaattcttagggtactcatctgacttgaactctgttggtttactgtgttagtaaactgtgctttctattatctatacataaaacctgagcagcaactgtgtctttagagctattgccacattagcctttgcactgtatagcgtctggctttatggaacttaagtttaccaaatataaaaagaaacttctgcttttaaaaaaattatatatatatattaaatttgaaacctgcatttctcccacagcaatgtaagaagtaggctctgatgtcctaccactttgaatggttttctaatatcttaatgaatagttcctgaacattgcactgatatcatcgattagaattttgatatttaatttcatctttatttcctggtagagaatgcaggaaaagatgtcaggtacataacataaaacagattgggaatttattgtttccaaagggcatggccttccttagcatcagtttgaagcttttgttatgacttagctgacttgtggcagcggggcaagcaaaaacaataacactgcttataaatggcaccacatcttgttaacctcccccccaaatactctctgaaagtcatgcacatacctatgggattttacacaccaccagcttaaaatgctatgtctctatccatcagaaatagtcattattctatttttaaggcagcaacaagaaaagaaaaaacacttttcctgagggatttctaaccatgtatctaatcctcccatttgggcagtataggtgtttgcttttttgttttctttttttaagaaaaaccttgaaacctttgacactgacagatgtgtttgcaaggatacggctgcagtattactaatttccatgtgtatctggaagtatttttaaatggcataccaaaatccagaagtttaaagatgcctataaaagtaaacaacatttatttaaaaagaactctgaatatgccttcttttttaattagaaatatcttcgagacttgggtgtttgttaataactaataactggagtaagctacaggatctaaagcagccctttttacagtctagttaggagagagaaaataattgcaaatatccacttagaggcaaagaacaattttttattatcaaaaaggtttctgcacattgttgtggcaatattgtatctgtttagaaaatgggcttttccaaaagcaaacaaagataggttcctcaggtgaccaaaactgaaaatcaatatttccatgtttcattaatcaaggcataaaatacaattaaagcaaaatattttacattaaaatcttggttgtgtatttttttaaaagaagggaaatagtttagtttggggtggaaattaccagtgatttctatttttattaaaccattcactacaacaaataagtataaaaattccaattccacttttatacctatttatttgttgtagtgaatggtttaataaatggcagatttatgtccagaagtcactctattttgtcgtgtattaggggaacacattttgacatttttcgtaccaatcatcaatcatattcccttatcttgaagtttttgccttatattcaaaaagttcagtttgaattctcctttgccaggtgtgaggatttccgcaccttagagtcagcgcaaaacacgctgcaacttgaatcaagtcagcaacagagcacactatgggttagataagtccctgtgtagcaagttttcagaataagaaataaaatctaattcttagggtattaactgacttgacttgaactccgttggtttaccatgttagtaaactgtgctttctattattatcatctatacataaaacctgagcagcaactgtgtgctgaagcaaccgtgtgtgaagtcttcacaaaagaaagaaagacttcaaagccaaagaatgtcctatttgctaatatgagcaaatattttgtttcacaatgtactatcatttattggtgactgcaataatttactgtcagtaaatgccaataactagttagttagaaattgtaaagtaggccaaataagaagcagagagagaaaaaaaatcacctccctaagaaaagggttttc

SEQ ID NO: 424575 - DNA, 5221 bp, Homo sapiens
tactttgggtgtgtttcaaatattagtctgatttttgcttgagaaaatatttgtattgatatgtaagtttgcatttgactacattggtaaggtgttttcccccattgaaactaatattttctattttcaagaaaaaagcagcaagcctcggcagcagtcaatcctccagaacctatgctggtggaacagcctcggccaccaaggtgtcagcttcctctggtgcaaccagcaagtcttccagtatgaatcccacagaaaccaaggccattccagtcagccaacagatggaaggaccacatcttcctaacaagaaaaaacacaaaaaacaggctgtaaaaacagaacctgagaagaagtcacagtcaaccaagctgtctgtggttcatgagaaaaaatcccaagaaggaaagccaaaagaacacacagagccaaaaagcctacccaagcaggcatcagatacaggaagtaacgatgctcacaataaaaaagcagtttccagatcagctgaacagcagccatcagagaaatcaacagaaccaaagactaaaccacaagacatgatttctgctggtggagagagtgttgctggtatcactgcaatatctggcaagccgggtgacaagaaaaaagaaaagaaatcattaaccccagctgtgccagttgaatctaaaccggataaaccatcgggaaagtcaggcatggatgctgctttggatgacttaatagatactttaggaggacctgaagaaactgaagaagaaaatacaacgtatactggaccagaagtttcagatccaatgagttccacctacatagaggaattgggtaaaagagaagtcacaattcctccaaaatatagggaactattggctaaaaaggaagggatcacagggcctcctgcagactcttcgaaacccatagggccagatgatgctatagacgccttgtcatctgacttcacctgtgggtcgcctacagctgctggaaagaaaactgaaaaagaggaatctacagaagttttaaaagctcagtcagcagggacagtcagaagtgctgctccaccccaagagaagaaaagaaaggtggagaaggatacaatgagtgatcaagcactcgaggctctgtcggcttcactgggcacccggcaagcagaacctgagctcgacctccgctcaattaaggaagtcgatgaggcaaaagctaaagaagaaaaactagagaagtgtggtgaggatgatgaaacaatcccatctgagtacagattaaaaccagccacggataaagatggaaaaccactattgccagagcctgaagaaaaacccaagcctcggagtgaatcagaactcattgatgaactttcagaagattttgaccggtctgaatgtaaagagaaaccatctaagccaactgaaaagacagaagaatctaaggccgctgctccagctcctgtgtcggaggctgtgtgtcggacctccatgtgtagtatacagtcagcaccccctgagccggctaccttgaagggcacagtgccagatgatgctgtagaagccttggctgatagcctggggaaaaaggaagcagatccagaagatggaaaacctgtgatggataaagtcaaggagaaggccaaagaagaagaccgtgaaaagcttggtgaaaaagaagaaacaattcctcctgattatagattagaagaggtcaaggataaagatggaaagccactcctgccaaaagagtctaaggaacagcttccacccatgagtgaagacttccttctggatgctttgtctgaggacttctctggtccacaaaatgcttcatctcttaaatttgaagatgctaaacttgctgctgccatctctgaagtggtttcccaaaccccagcttcaacgacccaagctggagccccaccccgtgatacctcgcagagtgacaaagacctcgatgatgccttggataaactctctgacagtctaggacaaaggcagcctgacccagatgagaacaaaccaatggaagataaagtaaaggaaaaagctaaagctgaacatagagacaagcttggagaaagagatgacactatcccacctgaatacagacatctcctggatgataatggacaggacaaaccagtgaagccacctacaaagaaatcagaggattcaaagaaacctgcagatgaccaagaccccattgatgctctctcaggagatctggacagctgtccctccactacagaaacctcacagaacacagcaaaggataagtgcaagaaggctgcttccagctccaaagcacctaagaatggaggtaaagcgaaggattcagcaaagacaacagaggaaacttccaagccaaaagatgactaaagaaatacaagttaaggtatctggtatctgcatgtaaaatcttcagctggtggatggtgacttttgaagaacaaaaggctttggcaacagaaaacaattgttctgggtgatttctagaatggtttttgttgagtctctgaacatcctaaatattggtttgttattcttttccagaaagaaaatgaatttgactggttcacctgtgtactgagtattgataaactttgaatttttttaattgccttcaattgggagagaaagctttatatttgtaagaaatatatttgataaagtttcttaaagcaacaccaaaaaaacaaaagaaaagctaagtgaatttttgcacattctacacacagtgcctgtaaatctcatttgtattttcagtttgcccttaattttttttgttagtgtttagaaaacaatgttttaaacattcttcagtgttctgatttcttattaccccctttcctcttgggcttttgaactgtatttgatgttgctttgggataatgtttataagtcaaacataagatattgtacattgggcacatatctcctcttgggctgctaataataaattaataacaggtaacctggacaaaccaggaagcaccaaaccccttttcagtttgaactcttctttgccaggtgtgaggacttctgcatcttacagtcagcacagaacacactgagacttgaatcaagtcagcaacagagcaaaataaaggttagataagtccttgtgtagcaaatttcgagcataagaaataaaatctaattaattcttagggtactcatctgacttgaactctgttggtttactgtgttagtaaactgtgctttctattatctatacataaaacctgagcagcaactgtgtctttagagctattgccacattagcctttgcactgtatagcgtctggctttatggaacttaagtttaccaaatataaaaagaaacttctgcttttaaaaaaattatatatatatattaaatttgaaacctgcatttctcccacagcaatgtaagaagtaggctctgatgtcctaccactttgaatggttttctaatatcttaatgaatagttcctgaacattgcactgatatcatcgattagaattttgatatttaatttcatctttatttcctggtagagaatgcaggaaaagatgtcaggtacataacataaaacagattgggaatttattgtttccaaagggcatggccttccttagcatcagtttgaagcttttgttatgacttagctgacttgtggcagcggggcaagcaaaaacaataacactgcttataaatggcaccacatcttgttaacctcccccccaaatactctctgaaagtcatgcacatacctatgggattttacacaccaccagcttaaaatgctatgtctctatccatcagaaatagtcattattctatttttaaggcagcaacaagaaaagaaaaaacacttttcctgagggatttctaaccatgtatctaatcctcccatttgggcagtataggtgtttgcttttttgttttctttttttaagaaaaaccttgaaacctttgacactgacagatgtgtttgcaaggatacggctgcagtattactaatttccatgtgtatctggaagtatttttaaatggcataccaaaatccagaagtttaaagatgcctataaaagtaaacaacatttatttaaaaagaactctgaatatgccttcttttttaattagaaatatcttcgagacttgggtgtttgttaataactaataactggagtaagctacaggatctaaagcagccctttttacagtctagttaggagagagaaaataattgcaaatatccacttagaggcaaagaacaattttttattatcaaaaaggtttctgcacattgttgtggcaatattgtatctgtttagaaaatgggcttttccaaaagcaaacaaagataggttcctcaggtgaccaaaactgaaaatcaatatttccatgtttcattaatcaaggcataaaatacaattaaagcaaaatattttacattaaaatcttggttgtgtatttttttaaaagaagggaaatagtttagtttggggtggaaattaccagtgatttctatttttattaaaccattcactacaacaaataagtataaaaattccaattccacttttatacctatttatttgttgtagtgaatggtttaataaatggcagatttatgtccagaagtcactctattttgtcgtgtattaggggaacacattttgacatttttcgtaccaatcatcaatcatattcccttatcttgaagtttttgccttatattcaaaaagttcagtttgaattctcctttgccaggtgtgaggatttccgcaccttagagtcagcgcaaaacacgctgcaacttgaatcaagtcagcaacagagcacactatgggttagataagtccctgtgtagcaagttttcagaataagaaataaaatctaattcttagggtattaactgacttgacttgaactccgttggtttaccatgttagtaaactgtgctttctattattatcatctatacataaaacctgagcagcaactgtgtgctgaagcaaccgtgtgtgaagtcttcacaaaagaaagaaagacttcaaagccaaagaatgtcctatttgctaatatgagcaaatattttgtttcacaatgtactatcatttattggtgactgcaataatttactgtcagtaaatgccaataactagttagttagaaattgtaaagtaggccaaataagaagcagagagagaaaaaaaatcacctccctaagaaaagggttttc

SEQ ID NO: 424576 - DNA, 5071 bp, Homo sapiens
  misc_feature (3)..(3): n is a, c, g, or t
gtngcactcagagagctgggctggagctccaagcggaaaccgcgggagccgagcccagctaggaatgcagacctcctgaaaaccaagccgaggactgcggggtccggtgtccacgcagagtgtcagcttcctctggtgcaaccagcaagtcttccagtatgaatcccacagaaaccaaggctgtaaaaacagaacctgagaagaagtcacagtcaaccaagctgtctgtggttcatgagaaaaaatcccaagaaggaaagccaaaagaacacacagagccaaaaagcctacccaagcaggcatcagatacaggaagtaacgatgctcacaataaaaaagcagtttccagatcagctgaacagcagccatcagagaaatcaacagaaccaaagactaaaccacaagacatgatttctgctggtggagagagtgttgctggtatcactgcaatatctggcaagccgggtgacaagaaaaaagaaaagaaatcattaaccccagctgtgccagttgaatctaaaccggataaaccatcgggaaagtcaggcatggatgctgctttggatgacttaatagatactttaggaggacctgaagaaactgaagaagaaaatacaacgtatactggaccagaagtttcagatccaatgagttccacctacatagaggaattgggtaaaagagaagtcacaattcctccaaaatatagggaactattggctaaaaaggaagggatcacagggcctcctgcagactcttcgaaacccatagggccagatgatgctatagacgccttgtcatctgacttcacctgtgggtcgcctacagctgctggaaagaaaactgaaaaagaggaatctacagaagttttaaaagctcagtcagcagggacagtcagaagtgctgctccaccccaagagaagaaaagaaaggtggagaaggatacaatgagtgatcaagcactcgaggctctgtcggcttcactgggcacccggcaagcagaacctgagctcgacctccgctcaattaaggaagtcgatgaggcaaaagctaaagaagaaaaactagagaagtgtggtgaggatgatgaaacaatcccatctgagtacagattaaaaccagccacggataaagatggaaaaccactattgccagagcctgaagaaaaacccaagcctcggagtgaatcagaactcattgatgaactttcagaagattttgaccggtctgaatgtaaagagaaaccatctaagccaactgaaaagacagaagaatctaaggccgctgctccagctcctgtgtcggaggctgtgtgtcggacctccatgtgtagtatacagtcagcaccccctgagccggctaccttgaagggcacagtgccagatgatgctgtagaagccttggctgatagcctggggaaaaaggaagcagatccagaagatggaaaacctgtgatggataaagtcaaggagaaggccaaagaagaagaccgtgaaaagcttggtgaaaaagaagaaacaattcctcctgattatagattagaagaggtcaaggataaagatggaaagccactcctgccaaaagagtctaaggaacagcttccacccatgagtgaagacttccttctggatgctttgtctgaggacttctctggtccacaaaatgcttcatctcttaaatttgaagatgctaaacttgctgctgccatctctgaagtggtttcccaaaccccagcttcaacgacccaagctggagccccaccccgtgatacctcgcagagtgacaaagacctcgatgatgccttggataaactctctgacagtctaggacaaaggcagcctgacccagatgagaacaaaccaatggaagataaagtaaaggaaaaagctaaagctgaacatagagacaagcttggagaaagagatgacactatcccacctgaatacagacatctcctggatgataatggacaggacaaaccagtgaagccacctacaaagaaatcagaggattcaaagaaacctgcagatgaccaagaccccattgatgctctctcaggagatctggacagctgtccctccactacagaaacctcacagaacacagcaaaggataagtgcaagaaggctgcttccagctccaaagcacctaagaatggaggtaaagcgaaggattcagcaaagacaacagaggaaacttccaagccaaaagatgactaaagaaatacaagttaaggtatctggtatctgcatgtaaaatcttcagctggtggatggtgacttttgaagaacaaaaggctttggcaacagaaaacaattgttctgggtgatttctagaatggtttttgttgagtctctgaacatcctaaatattggtttgttattcttttccagaaagaaaatgaatttgactggttcacctgtgtactgagtattgataaactttgaatttttttaattgccttcaattgggagagaaagctttatatttgtaagaaatatatttgataaagtttcttaaagcaacaccaaaaaaacaaaagaaaagctaagtgaatttttgcacattctacacacagtgcctgtaaatctcatttgtattttcagtttgcccttaattttttttgttagtgtttagaaaacaatgttttaaacattcttcagtgttctgatttcttattaccccctttcctcttgggcttttgaactgtatttgatgttgctttgggataatgtttataagtcaaacataagatattgtacattgggcacatatctcctcttgggctgctaataataaattaataacaggtaacctggacaaaccaggaagcaccaaaccccttttcagtttgaactcttctttgccaggtgtgaggacttctgcatcttacagtcagcacagaacacactgagacttgaatcaagtcagcaacagagcaaaataaaggttagataagtccttgtgtagcaaatttcgagcataagaaataaaatctaattaattcttagggtactcatctgacttgaactctgttggtttactgtgttagtaaactgtgctttctattatctatacataaaacctgagcagcaactgtgtctttagagctattgccacattagcctttgcactgtatagcgtctggctttatggaacttaagtttaccaaatataaaaagaaacttctgcttttaaaaaaattatatatatatattaaatttgaaacctgcatttctcccacagcaatgtaagaagtaggctctgatgtcctaccactttgaatggttttctaatatcttaatgaatagttcctgaacattgcactgatatcatcgattagaattttgatatttaatttcatctttatttcctggtagagaatgcaggaaaagatgtcaggtacataacataaaacagattgggaatttattgtttccaaagggcatggccttccttagcatcagtttgaagcttttgttatgacttagctgacttgtggcagcggggcaagcaaaaacaataacactgcttataaatggcaccacatcttgttaacctcccccccaaatactctctgaaagtcatgcacatacctatgggattttacacaccaccagcttaaaatgctatgtctctatccatcagaaatagtcattattctatttttaaggcagcaacaagaaaagaaaaaacacttttcctgagggatttctaaccatgtatctaatcctcccatttgggcagtataggtgtttgcttttttgttttctttttttaagaaaaaccttgaaacctttgacactgacagatgtgtttgcaaggatacggctgcagtattactaatttccatgtgtatctggaagtatttttaaatggcataccaaaatccagaagtttaaagatgcctataaaagtaaacaacatttatttaaaaagaactctgaatatgccttcttttttaattagaaatatcttcgagacttgggtgtttgttaataactaataactggagtaagctacaggatctaaagcagccctttttacagtctagttaggagagagaaaataattgcaaatatccacttagaggcaaagaacaattttttattatcaaaaaggtttctgcacattgttgtggcaatattgtatctgtttagaaaatgggcttttccaaaagcaaacaaagataggttcctcaggtgaccaaaactgaaaatcaatatttccatgtttcattaatcaaggcataaaatacaattaaagcaaaatattttacattaaaatcttggttgtgtatttttttaaaagaagggaaatagtttagtttggggtggaaattaccagtgatttctatttttattaaaccattcactacaacaaataagtataaaaattccaattccacttttatacctatttatttgttgtagtgaatggtttaataaatggcagatttatgtccagaagtcactctattttgtcgtgtattaggggaacacattttgacatttttcgtaccaatcatcaatcatattcccttatcttgaagtttttgccttatattcaaaaagttcagtttgaattctcctttgccaggtgtgaggatttccgcaccttagagtcagcgcaaaacacgctgcaacttgaatcaagtcagcaacagagcacactatgggttagataagtccctgtgtagcaagttttcagaataagaaataaaatctaattcttagggtattaactgacttgacttgaactccgttggtttaccatgttagtaaactgtgctttctattattatcatctatacataaaacctgagcagcaactgtgtgctgaagcaaccgtgtgtgaagtcttcacaaaagaaagaaagacttcaaagccaaagaatgtcctatttgctaatatgagcaaatattttgtttcacaatgtactatcatttattggtgactgcaataatttactgtcagtaaatgccaataactagttagttagaaattgtaaagtaggccaaataagaagcagagagagaaaaaaaatcacctccctaagaaaagggttttc

SEQ ID NO: 424577 - DNA, 5014 bp, Homo sapiens
  misc_feature (3)..(3): n is a, c, g, or t
gtngcactcagagagctgggctggagctccaagcggaaaccgcgggagccgagcccagctaggaatgcagacctcctgaaaaccaagccgaggactgcggggtccggtgtccacgcagagtgtcagcttcctctggtgcaaccagcaagtcttccagtatgaatcccacagaaaccaaggctgtaaaaacagaacctgagaagaagtcacagtcaaccaagccaaaaagcctacccaagcaggcatcagatacaggaagtaacgatgctcacaataaaaaagcagtttccagatcagctgaacagcagccatcagagaaatcaacagaaccaaagactaaaccacaagacatgatttctgctggtggagagagtgttgctggtatcactgcaatatctggcaagccgggtgacaagaaaaaagaaaagaaatcattaaccccagctgtgccagttgaatctaaaccggataaaccatcgggaaagtcaggcatggatgctgctttggatgacttaatagatactttaggaggacctgaagaaactgaagaagaaaatacaacgtatactggaccagaagtttcagatccaatgagttccacctacatagaggaattgggtaaaagagaagtcacaattcctccaaaatatagggaactattggctaaaaaggaagggatcacagggcctcctgcagactcttcgaaacccatagggccagatgatgctatagacgccttgtcatctgacttcacctgtgggtcgcctacagctgctggaaagaaaactgaaaaagaggaatctacagaagttttaaaagctcagtcagcagggacagtcagaagtgctgctccaccccaagagaagaaaagaaaggtggagaaggatacaatgagtgatcaagcactcgaggctctgtcggcttcactgggcacccggcaagcagaacctgagctcgacctccgctcaattaaggaagtcgatgaggcaaaagctaaagaagaaaaactagagaagtgtggtgaggatgatgaaacaatcccatctgagtacagattaaaaccagccacggataaagatggaaaaccactattgccagagcctgaagaaaaacccaagcctcggagtgaatcagaactcattgatgaactttcagaagattttgaccggtctgaatgtaaagagaaaccatctaagccaactgaaaagacagaagaatctaaggccgctgctccagctcctgtgtcggaggctgtgtgtcggacctccatgtgtagtatacagtcagcaccccctgagccggctaccttgaagggcacagtgccagatgatgctgtagaagccttggctgatagcctggggaaaaaggaagcagatccagaagatggaaaacctgtgatggataaagtcaaggagaaggccaaagaagaagaccgtgaaaagcttggtgaaaaagaagaaacaattcctcctgattatagattagaagaggtcaaggataaagatggaaagccactcctgccaaaagagtctaaggaacagcttccacccatgagtgaagacttccttctggatgctttgtctgaggacttctctggtccacaaaatgcttcatctcttaaatttgaagatgctaaacttgctgctgccatctctgaagtggtttcccaaaccccagcttcaacgacccaagctggagccccaccccgtgatacctcgcagagtgacaaagacctcgatgatgccttggataaactctctgacagtctaggacaaaggcagcctgacccagatgagaacaaaccaatggaagataaagtaaaggaaaaagctaaagctgaacatagagacaagcttggagaaagagatgacactatcccacctgaatacagacatctcctggatgataatggacaggacaaaccagtgaagccacctacaaagaaatcagaggattcaaagaaacctgcagatgaccaagaccccattgatgctctctcaggagatctggacagctgtccctccactacagaaacctcacagaacacagcaaaggataagtgcaagaaggctgcttccagctccaaagcacctaagaatggaggtaaagcgaaggattcagcaaagacaacagaggaaacttccaagccaaaagatgactaaagaaatacaagttaaggtatctggtatctgcatgtaaaatcttcagctggtggatggtgacttttgaagaacaaaaggctttggcaacagaaaacaattgttctgggtgatttctagaatggtttttgttgagtctctgaacatcctaaatattggtttgttattcttttccagaaagaaaatgaatttgactggttcacctgtgtactgagtattgataaactttgaatttttttaattgccttcaattgggagagaaagctttatatttgtaagaaatatatttgataaagtttcttaaagcaacaccaaaaaaacaaaagaaaagctaagtgaatttttgcacattctacacacagtgcctgtaaatctcatttgtattttcagtttgcccttaattttttttgttagtgtttagaaaacaatgttttaaacattcttcagtgttctgatttcttattaccccctttcctcttgggcttttgaactgtatttgatgttgctttgggataatgtttataagtcaaacataagatattgtacattgggcacatatctcctcttgggctgctaataataaattaataacaggtaacctggacaaaccaggaagcaccaaaccccttttcagtttgaactcttctttgccaggtgtgaggacttctgcatcttacagtcagcacagaacacactgagacttgaatcaagtcagcaacagagcaaaataaaggttagataagtccttgtgtagcaaatttcgagcataagaaataaaatctaattaattcttagggtactcatctgacttgaactctgttggtttactgtgttagtaaactgtgctttctattatctatacataaaacctgagcagcaactgtgtctttagagctattgccacattagcctttgcactgtatagcgtctggctttatggaacttaagtttaccaaatataaaaagaaacttctgcttttaaaaaaattatatatatatattaaatttgaaacctgcatttctcccacagcaatgtaagaagtaggctctgatgtcctaccactttgaatggttttctaatatcttaatgaatagttcctgaacattgcactgatatcatcgattagaattttgatatttaatttcatctttatttcctggtagagaatgcaggaaaagatgtcaggtacataacataaaacagattgggaatttattgtttccaaagggcatggccttccttagcatcagtttgaagcttttgttatgacttagctgacttgtggcagcggggcaagcaaaaacaataacactgcttataaatggcaccacatcttgttaacctcccccccaaatactctctgaaagtcatgcacatacctatgggattttacacaccaccagcttaaaatgctatgtctctatccatcagaaatagtcattattctatttttaaggcagcaacaagaaaagaaaaaacacttttcctgagggatttctaaccatgtatctaatcctcccatttgggcagtataggtgtttgcttttttgttttctttttttaagaaaaaccttgaaacctttgacactgacagatgtgtttgcaaggatacggctgcagtattactaatttccatgtgtatctggaagtatttttaaatggcataccaaaatccagaagtttaaagatgcctataaaagtaaacaacatttatttaaaaagaactctgaatatgccttcttttttaattagaaatatcttcgagacttgggtgtttgttaataactaataactggagtaagctacaggatctaaagcagccctttttacagtctagttaggagagagaaaataattgcaaatatccacttagaggcaaagaacaattttttattatcaaaaaggtttctgcacattgttgtggcaatattgtatctgtttagaaaatgggcttttccaaaagcaaacaaagataggttcctcaggtgaccaaaactgaaaatcaatatttccatgtttcattaatcaaggcataaaatacaattaaagcaaaatattttacattaaaatcttggttgtgtatttttttaaaagaagggaaatagtttagtttggggtggaaattaccagtgatttctatttttattaaaccattcactacaacaaataagtataaaaattccaattccacttttatacctatttatttgttgtagtgaatggtttaataaatggcagatttatgtccagaagtcactctattttgtcgtgtattaggggaacacattttgacatttttcgtaccaatcatcaatcatattcccttatcttgaagtttttgccttatattcaaaaagttcagtttgaattctcctttgccaggtgtgaggatttccgcaccttagagtcagcgcaaaacacgctgcaacttgaatcaagtcagcaacagagcacactatgggttagataagtccctgtgtagcaagttttcagaataagaaataaaatctaattcttagggtattaactgacttgacttgaactccgttggtttaccatgttagtaaactgtgctttctattattatcatctatacataaaacctgagcagcaactgtgtgctgaagcaaccgtgtgtgaagtcttcacaaaagaaagaaagacttcaaagccaaagaatgtcctatttgctaatatgagcaaatattttgtttcacaatgtactatcatttattggtgactgcaataatttactgtcagtaaatgccaataactagttagttagaaattgtaaagtaggccaaataagaagcagagagagaaaaaaaatcacctccctaagaaaagggttttc

SEQ ID NO: 424578 - DNA, 5394 bp, Homo sapiens
aggagcccgggtccctccgcgggcaggaaggggagggcccatcggggctaggggaaccccggcgcagacctggggtggggtcggaaaagctgtttcatcgcccgctcccgggccctccgctcctcctgcctccctccctctctccctggcaggactccccgccaggcctccccgccactctccgcggcgcattccgggaggcagcggccgcagcggcctcgccatgtcccagcccggccagaagcccgccgcctccccgcggccccggcgagcagccgccgcccgccgcacccatgagcatgtcagtgaaaaaaccagtgaatcgccttccaaaccaggagaaaagaaaggatcagatgagaaaaaagcagcaagcctcggcagcagtcaatcctccagaacctatgctggtggaacagcctcggccaccaaggtgtcagcttcctctggtgcaaccagcaagtcttccagtatgaatcccacagaaaccaaggccattccagtcagccaacagatggaaggaccacatcttcctaacaagaaaaaacacaaaaaacaggctgtaaaaacagaacctgagaagaagtcacagtcaaccaagccaaaaagcctacccaagcaggcatcagatacaggaagtaacgatgctcacaataaaaaagcagtttccagatcagctgaacagcagccatcagagaaatcaacagaaccaaagactaaaccacaagacatgatttctgctggtggagagagtgttgctggtatcactgcaatatctggcaagccgggtgacaagaaaaaagaaaagaaatcattaaccccagctgtgccagttgaatctaaaccggataaaccatcgggaaagtcaggcatggatgctgctttggatgacttaatagatactttaggaggacctgaagaaactgaagaagaaaatacaacgtatactggaccagaagtttcagatccaatgagttccacctacatagaggaattgggtaaaagagaagtcacaattcctccaaaatatagggaactattggctaaaaaggaagggatcacagggcctcctgcagactcttcgaaacccatagggccagatgatgctatagacgccttgtcatctgacttcacctgtgggtcgcctacagctgctggaaagaaaactgaaaaagaggaatctacagaagttttaaaagctcagtcagcagggacagtcagaagtgctgctccaccccaagagaagaaaagaaaggtggagaaggatacaatgagtgatcaagcactcgaggctctgtcggcttcactgggcacccggcaagcagaacctgagctcgacctccgctcaattaaggaagtcgatgaggcaaaagctaaagaagaaaaactagagaagtgtggtgaggatgatgaaacaatcccatctgagtacagattaaaaccagccacggataaagatggaaaaccactattgccagagcctgaagaaaaacccaagcctcggagtgaatcagaactcattgatgaactttcagaagattttgaccggtctgaatgtaaagagaaaccatctaagccaactgaaaagacagaagaatctaaggccgctgctccagctcctgtgtcggaggctgtgtgtcggacctccatgtgtagtatacagtcagcaccccctgagccggctaccttgaagggcacagtgccagatgatgctgtagaagccttggctgatagcctggggaaaaaggaagcagatccagaagatggaaaacctgtgatggataaagtcaaggagaaggccaaagaagaagaccgtgaaaagcttggtgaaaaagaagaaacaattcctcctgattatagattagaagaggtcaaggataaagatggaaagccactcctgccaaaagagtctaaggaacagcttccacccatgagtgaagacttccttctggatgctttgtctgaggacttctctggtccacaaaatgcttcatctcttaaatttgaagatgctaaacttgctgctgccatctctgaagtggtttcccaaaccccagcttcaacgacccaagctggagccccaccccgtgatacctcgcagagtgacaaagacctcgatgatgccttggataaactctctgacagtctaggacaaaggcagcctgacccagatgagaacaaaccaatggaagataaagtaaaggaaaaagctaaagctgaacatagagacaagcttggagaaagagatgacactatcccacctgaatacagacatctcctggatgataatggacaggacaaaccagtgaagccacctacaaagaaatcagaggattcaaagaaacctgcagatgaccaagaccccattgatgctctctcaggagatctggacagctgtccctccactacagaaacctcacagaacacagcaaaggataagtgcaagaaggctgcttccagctccaaagcacctaagaatggaggtaaagcgaaggattcagcaaagacaacagaggaaacttccaagccaaaagatgactaaagaaatacaagttaaggtatctggtatctgcatgtaaaatcttcagctggtggatggtgacttttgaagaacaaaaggctttggcaacagaaaacaattgttctgggtgatttctagaatggtttttgttgagtctctgaacatcctaaatattggtttgttattcttttccagaaagaaaatgaatttgactggttcacctgtgtactgagtattgataaactttgaatttttttaattgccttcaattgggagagaaagctttatatttgtaagaaatatatttgataaagtttcttaaagcaacaccaaaaaaacaaaagaaaagctaagtgaatttttgcacattctacacacagtgcctgtaaatctcatttgtattttcagtttgcccttaattttttttgttagtgtttagaaaacaatgttttaaacattcttcagtgttctgatttcttattaccccctttcctcttgggcttttgaactgtatttgatgttgctttgggataatgtttataagtcaaacataagatattgtacattgggcacatatctcctcttgggctgctaataataaattaataacaggtaacctggacaaaccaggaagcaccaaaccccttttcagtttgaactcttctttgccaggtgtgaggacttctgcatcttacagtcagcacagaacacactgagacttgaatcaagtcagcaacagagcaaaataaaggttagataagtccttgtgtagcaaatttcgagcataagaaataaaatctaattaattcttagggtactcatctgacttgaactctgttggtttactgtgttagtaaactgtgctttctattatctatacataaaacctgagcagcaactgtgtctttagagctattgccacattagcctttgcactgtatagcgtctggctttatggaacttaagtttaccaaatataaaaagaaacttctgcttttaaaaaaattatatatatatattaaatttgaaacctgcatttctcccacagcaatgtaagaagtaggctctgatgtcctaccactttgaatggttttctaatatcttaatgaatagttcctgaacattgcactgatatcatcgattagaattttgatatttaatttcatctttatttcctggtagagaatgcaggaaaagatgtcaggtacataacataaaacagattgggaatttattgtttccaaagggcatggccttccttagcatcagtttgaagcttttgttatgacttagctgacttgtggcagcggggcaagcaaaaacaataacactgcttataaatggcaccacatcttgttaacctcccccccaaatactctctgaaagtcatgcacatacctatgggattttacacaccaccagcttaaaatgctatgtctctatccatcagaaatagtcattattctatttttaaggcagcaacaagaaaagaaaaaacacttttcctgagggatttctaaccatgtatctaatcctcccatttgggcagtataggtgtttgcttttttgttttctttttttaagaaaaaccttgaaacctttgacactgacagatgtgtttgcaaggatacggctgcagtattactaatttccatgtgtatctggaagtatttttaaatggcataccaaaatccagaagtttaaagatgcctataaaagtaaacaacatttatttaaaaagaactctgaatatgccttcttttttaattagaaatatcttcgagacttgggtgtttgttaataactaataactggagtaagctacaggatctaaagcagccctttttacagtctagttaggagagagaaaataattgcaaatatccacttagaggcaaagaacaattttttattatcaaaaaggtttctgcacattgttgtggcaatattgtatctgtttagaaaatgggcttttccaaaagcaaacaaagataggttcctcaggtgaccaaaactgaaaatcaatatttccatgtttcattaatcaaggcataaaatacaattaaagcaaaatattttacattaaaatcttggttgtgtatttttttaaaagaagggaaatagtttagtttggggtggaaattaccagtgatttctatttttattaaaccattcactacaacaaataagtataaaaattccaattccacttttatacctatttatttgttgtagtgaatggtttaataaatggcagatttatgtccagaagtcactctattttgtcgtgtattaggggaacacattttgacatttttcgtaccaatcatcaatcatattcccttatcttgaagtttttgccttatattcaaaaagttcagtttgaattctcctttgccaggtgtgaggatttccgcaccttagagtcagcgcaaaacacgctgcaacttgaatcaagtcagcaacagagcacactatgggttagataagtccctgtgtagcaagttttcagaataagaaataaaatctaattcttagggtattaactgacttgacttgaactccgttggtttaccatgttagtaaactgtgctttctattattatcatctatacataaaacctgagcagcaactgtgtgctgaagcaaccgtgtgtgaagtcttcacaaaagaaagaaagacttcaaagccaaagaatgtcctatttgctaatatgagcaaatattttgtttcacaatgtactatcatttattggtgactgcaataatttactgtcagtaaatgccaataactagttagttagaaattgtaaagtaggccaaataagaagcagagagagaaaaaaaatcacctccctaagaaaagggttttc

SEQ ID NO: 424579 - DNA, 5054 bp, Homo sapiens
  misc_feature (13)..(13): n is a, c, g, or t
  misc_feature (15)..(15): n is a, c, g, or t
cggctgctcgcgngngccagtgagcatgtcagtgaaaaaaccagtgaatcgccttccaaaccaggagaaaagaaaggatcagatgagaaaaaagcagcaagcctcggcagcagtcaatcctccagaacctatgctggtggaacagcctcggccaccaaggtgtcagcttcctctggtgcaaccagcaagtcttccagtatgaatcccacagaaaccaaggctgtaaaaacagaacctgagaagaagtcacagtcaaccaagccaaaaagcctacccaagcaggcatcagatacaggaagtaacgatgctcacaataaaaaagcagtttccagatcagctgaacagcagccatcagagaaatcaacagaaccaaagactaaaccacaagacatgatttctgctggtggagagagtgttgctggtatcactgcaatatctggcaagccgggtgacaagaaaaaagaaaagaaatcattaaccccagctgtgccagttgaatctaaaccggataaaccatcgggaaagtcaggcatggatgctgctttggatgacttaatagatactttaggaggacctgaagaaactgaagaagaaaatacaacgtatactggaccagaagtttcagatccaatgagttccacctacatagaggaattgggtaaaagagaagtcacaattcctccaaaatatagggaactattggctaaaaaggaagggatcacagggcctcctgcagactcttcgaaacccatagggccagatgatgctatagacgccttgtcatctgacttcacctgtgggtcgcctacagctgctggaaagaaaactgaaaaagaggaatctacagaagttttaaaagctcagtcagcagggacagtcagaagtgctgctccaccccaagagaagaaaagaaaggtggagaaggatacaatgagtgatcaagcactcgaggctctgtcggcttcactgggcacccggcaagcagaacctgagctcgacctccgctcaattaaggaagtcgatgaggcaaaagctaaagaagaaaaactagagaagtgtggtgaggatgatgaaacaatcccatctgagtacagattaaaaccagccacggataaagatggaaaaccactattgccagagcctgaagaaaaacccaagcctcggagtgaatcagaactcattgatgaactttcagaagattttgaccggtctgaatgtaaagagaaaccatctaagccaactgaaaagacagaagaatctaaggccgctgctccagctcctgtgtcggaggctgtgtgtcggacctccatgtgtagtatacagtcagcaccccctgagccggctaccttgaagggcacagtgccagatgatgctgtagaagccttggctgatagcctggggaaaaaggaagcagatccagaagatggaaaacctgtgatggataaagtcaaggagaaggccaaagaagaagaccgtgaaaagcttggtgaaaaagaagaaacaattcctcctgattatagattagaagaggtcaaggataaagatggaaagccactcctgccaaaagagtctaaggaacagcttccacccatgagtgaagacttccttctggatgctttgtctgaggacttctctggtccacaaaatgcttcatctcttaaatttgaagatgctaaacttgctgctgccatctctgaagtggtttcccaaaccccagcttcaacgacccaagctggagccccaccccgtgatacctcgcagagtgacaaagacctcgatgatgccttggataaactctctgacagtctaggacaaaggcagcctgacccagatgagaacaaaccaatggaagataaagtaaaggaaaaagctaaagctgaacatagagacaagcttggagaaagagatgacactatcccacctgaatacagacatctcctggatgataatggacaggacaaaccagtgaagccacctacaaagaaatcagaggattcaaagaaacctgcagatgaccaagaccccattgatgctctctcaggagatctggacagctgtccctccactacagaaacctcacagaacacagcaaaggataagtgcaagaaggctgcttccagctccaaagcacctaagaatggaggtaaagcgaaggattcagcaaagacaacagaggaaacttccaagccaaaagatgactaaagaaatacaagttaaggtatctggtatctgcatgtaaaatcttcagctggtggatggtgacttttgaagaacaaaaggctttggcaacagaaaacaattgttctgggtgatttctagaatggtttttgttgagtctctgaacatcctaaatattggtttgttattcttttccagaaagaaaatgaatttgactggttcacctgtgtactgagtattgataaactttgaatttttttaattgccttcaattgggagagaaagctttatatttgtaagaaatatatttgataaagtttcttaaagcaacaccaaaaaaacaaaagaaaagctaagtgaatttttgcacattctacacacagtgcctgtaaatctcatttgtattttcagtttgcccttaattttttttgttagtgtttagaaaacaatgttttaaacattcttcagtgttctgatttcttattaccccctttcctcttgggcttttgaactgtatttgatgttgctttgggataatgtttataagtcaaacataagatattgtacattgggcacatatctcctcttgggctgctaataataaattaataacaggtaacctggacaaaccaggaagcaccaaaccccttttcagtttgaactcttctttgccaggtgtgaggacttctgcatcttacagtcagcacagaacacactgagacttgaatcaagtcagcaacagagcaaaataaaggttagataagtccttgtgtagcaaatttcgagcataagaaataaaatctaattaattcttagggtactcatctgacttgaactctgttggtttactgtgttagtaaactgtgctttctattatctatacataaaacctgagcagcaactgtgtctttagagctattgccacattagcctttgcactgtatagcgtctggctttatggaacttaagtttaccaaatataaaaagaaacttctgcttttaaaaaaattatatatatatattaaatttgaaacctgcatttctcccacagcaatgtaagaagtaggctctgatgtcctaccactttgaatggttttctaatatcttaatgaatagttcctgaacattgcactgatatcatcgattagaattttgatatttaatttcatctttatttcctggtagagaatgcaggaaaagatgtcaggtacataacataaaacagattgggaatttattgtttccaaagggcatggccttccttagcatcagtttgaagcttttgttatgacttagctgacttgtggcagcggggcaagcaaaaacaataacactgcttataaatggcaccacatcttgttaacctcccccccaaatactctctgaaagtcatgcacatacctatgggattttacacaccaccagcttaaaatgctatgtctctatccatcagaaatagtcattattctatttttaaggcagcaacaagaaaagaaaaaacacttttcctgagggatttctaaccatgtatctaatcctcccatttgggcagtataggtgtttgcttttttgttttctttttttaagaaaaaccttgaaacctttgacactgacagatgtgtttgcaaggatacggctgcagtattactaatttccatgtgtatctggaagtatttttaaatggcataccaaaatccagaagtttaaagatgcctataaaagtaaacaacatttatttaaaaagaactctgaatatgccttcttttttaattagaaatatcttcgagacttgggtgtttgttaataactaataactggagtaagctacaggatctaaagcagccctttttacagtctagttaggagagagaaaataattgcaaatatccacttagaggcaaagaacaattttttattatcaaaaaggtttctgcacattgttgtggcaatattgtatctgtttagaaaatgggcttttccaaaagcaaacaaagataggttcctcaggtgaccaaaactgaaaatcaatatttccatgtttcattaatcaaggcataaaatacaattaaagcaaaatattttacattaaaatcttggttgtgtatttttttaaaagaagggaaatagtttagtttggggtggaaattaccagtgatttctatttttattaaaccattcactacaacaaataagtataaaaattccaattccacttttatacctatttatttgttgtagtgaatggtttaataaatggcagatttatgtccagaagtcactctattttgtcgtgtattaggggaacacattttgacatttttcgtaccaatcatcaatcatattcccttatcttgaagtttttgccttatattcaaaaagttcagtttgaattctcctttgccaggtgtgaggatttccgcaccttagagtcagcgcaaaacacgctgcaacttgaatcaagtcagcaacagagcacactatgggttagataagtccctgtgtagcaagttttcagaataagaaataaaatctaattcttagggtattaactgacttgacttgaactccgttggtttaccatgttagtaaactgtgctttctattattatcatctatacataaaacctgagcagcaactgtgtgctgaagcaaccgtgtgtgaagtcttcacaaaagaaagaaagacttcaaagccaaagaatgtcctatttgctaatatgagcaaatattttgtttcacaatgtactatcatttattggtgactgcaataatttactgtcagtaaatgccaataactagttagttagaaattgtaaagtaggccaaataagaagcagagagagaaaaaaaatcacctccctaagaaaagggttttc

SEQ ID NO: 424580 - DNA, 5313 bp, Homo sapiens
aggagcccgggtccctccgcgggcaggaaggggagggcccatcggggctaggggaaccccggcgcagacctggggtggggtcggaaaagctgtttcatcgcccgctcccgggccctccgctcctcctgcctccctccctctctccctggcaggactccccgccaggcctccccgccactctccgcggcgcattccgggaggcagcggccgcagcggcctcgccatgtcccagcccggccagaagcccgccgcctccccgcggccccggcgagcagccgccgcccgccgcacccatgagcatgtcagtgaaaaaaccagtgaatcgccttccaaaccaggagaaaagaaaggatcagatgaggtgtcagcttcctctggtgcaaccagcaagtcttccagtatgaatcccacagaaaccaaggctgtaaaaacagaacctgagaagaagtcacagtcaaccaagctgtctgtggttcatgagaaaaaatcccaagaaggaaagccaaaagaacacacagagccaaaaagcctacccaagcaggcatcagatacaggaagtaacgatgctcacaataaaaaagcagtttccagatcagctgaacagcagccatcagagaaatcaacagaaccaaagactaaaccacaagacatgatttctgctggtggagagagtgttgctggtatcactgcaatatctggcaagccgggtgacaagaaaaaagaaaagaaatcattaaccccagctgtgccagttgaatctaaaccggataaaccatcgggaaagtcaggcatggatgctgctttggatgacttaatagatactttaggaggacctgaagaaactgaagaagaaaatacaacgtatactggaccagaagtttcagatccaatgagttccacctacatagaggaattgggtaaaagagaagtcacaattcctccaaaatatagggaactattggctaaaaaggaagggatcacagggcctcctgcagactcttcgaaacccatagggccagatgatgctatagacgccttgtcatctgacttcacctgtgggtcgcctacagctgctggaaagaaaactgaaaaagaggaatctacagaagttttaaaagctcagtcagcagggacagtcagaagtgctgctccaccccaagagaagaaaagaaaggtggagaaggatacaatgagtgatcaagcactcgaggctctgtcggcttcactgggcacccggcaagcagaacctgagctcgacctccgctcaattaaggaagtcgatgaggcaaaagctaaagaagaaaaactagagaagtgtggtgaggatgatgaaacaatcccatctgagtacagattaaaaccagccacggataaagatggaaaaccactattgccagagcctgaagaaaaacccaagcctcggagtgaatcagaactcattgatgaactttcagaagattttgaccggtctgaatgtaaagagaaaccatctaagccaactgaaaagacagaagaatctaaggccgctgctccagctcctgtgtcggaggctgtgtgtcggacctccatgtgtagtatacagtcagcaccccctgagccggctaccttgaagggcacagtgccagatgatgctgtagaagccttggctgatagcctggggaaaaaggaagcagatccagaagatggaaaacctgtgatggataaagtcaaggagaaggccaaagaagaagaccgtgaaaagcttggtgaaaaagaagaaacaattcctcctgattatagattagaagaggtcaaggataaagatggaaagccactcctgccaaaagagtctaaggaacagcttccacccatgagtgaagacttccttctggatgctttgtctgaggacttctctggtccacaaaatgcttcatctcttaaatttgaagatgctaaacttgctgctgccatctctgaagtggtttcccaaaccccagcttcaacgacccaagctggagccccaccccgtgatacctcgcagagtgacaaagacctcgatgatgccttggataaactctctgacagtctaggacaaaggcagcctgacccagatgagaacaaaccaatggaagataaagtaaaggaaaaagctaaagctgaacatagagacaagcttggagaaagagatgacactatcccacctgaatacagacatctcctggatgataatggacaggacaaaccagtgaagccacctacaaagaaatcagaggattcaaagaaacctgcagatgaccaagaccccattgatgctctctcaggagatctggacagctgtccctccactacagaaacctcacagaacacagcaaaggataagtgcaagaaggctgcttccagctccaaagcacctaagaatggaggtaaagcgaaggattcagcaaagacaacagaggaaacttccaagccaaaagatgactaaagaaatacaagttaaggtatctggtatctgcatgtaaaatcttcagctggtggatggtgacttttgaagaacaaaaggctttggcaacagaaaacaattgttctgggtgatttctagaatggtttttgttgagtctctgaacatcctaaatattggtttgttattcttttccagaaagaaaatgaatttgactggttcacctgtgtactgagtattgataaactttgaatttttttaattgccttcaattgggagagaaagctttatatttgtaagaaatatatttgataaagtttcttaaagcaacaccaaaaaaacaaaagaaaagctaagtgaatttttgcacattctacacacagtgcctgtaaatctcatttgtattttcagtttgcccttaattttttttgttagtgtttagaaaacaatgttttaaacattcttcagtgttctgatttcttattaccccctttcctcttgggcttttgaactgtatttgatgttgctttgggataatgtttataagtcaaacataagatattgtacattgggcacatatctcctcttgggctgctaataataaattaataacaggtaacctggacaaaccaggaagcaccaaaccccttttcagtttgaactcttctttgccaggtgtgaggacttctgcatcttacagtcagcacagaacacactgagacttgaatcaagtcagcaacagagcaaaataaaggttagataagtccttgtgtagcaaatttcgagcataagaaataaaatctaattaattcttagggtactcatctgacttgaactctgttggtttactgtgttagtaaactgtgctttctattatctatacataaaacctgagcagcaactgtgtctttagagctattgccacattagcctttgcactgtatagcgtctggctttatggaacttaagtttaccaaatataaaaagaaacttctgcttttaaaaaaattatatatatatattaaatttgaaacctgcatttctcccacagcaatgtaagaagtaggctctgatgtcctaccactttgaatggttttctaatatcttaatgaatagttcctgaacattgcactgatatcatcgattagaattttgatatttaatttcatctttatttcctggtagagaatgcaggaaaagatgtcaggtacataacataaaacagattgggaatttattgtttccaaagggcatggccttccttagcatcagtttgaagcttttgttatgacttagctgacttgtggcagcggggcaagcaaaaacaataacactgcttataaatggcaccacatcttgttaacctcccccccaaatactctctgaaagtcatgcacatacctatgggattttacacaccaccagcttaaaatgctatgtctctatccatcagaaatagtcattattctatttttaaggcagcaacaagaaaagaaaaaacacttttcctgagggatttctaaccatgtatctaatcctcccatttgggcagtataggtgtttgcttttttgttttctttttttaagaaaaaccttgaaacctttgacactgacagatgtgtttgcaaggatacggctgcagtattactaatttccatgtgtatctggaagtatttttaaatggcataccaaaatccagaagtttaaagatgcctataaaagtaaacaacatttatttaaaaagaactctgaatatgccttcttttttaattagaaatatcttcgagacttgggtgtttgttaataactaataactggagtaagctacaggatctaaagcagccctttttacagtctagttaggagagagaaaataattgcaaatatccacttagaggcaaagaacaattttttattatcaaaaaggtttctgcacattgttgtggcaatattgtatctgtttagaaaatgggcttttccaaaagcaaacaaagataggttcctcaggtgaccaaaactgaaaatcaatatttccatgtttcattaatcaaggcataaaatacaattaaagcaaaatattttacattaaaatcttggttgtgtatttttttaaaagaagggaaatagtttagtttggggtggaaattaccagtgatttctatttttattaaaccattcactacaacaaataagtataaaaattccaattccacttttatacctatttatttgttgtagtgaatggtttaataaatggcagatttatgtccagaagtcactctattttgtcgtgtattaggggaacacattttgacatttttcgtaccaatcatcaatcatattcccttatcttgaagtttttgccttatattcaaaaagttcagtttgaattctcctttgccaggtgtgaggatttccgcaccttagagtcagcgcaaaacacgctgcaacttgaatcaagtcagcaacagagcacactatgggttagataagtccctgtgtagcaagttttcagaataagaaataaaatctaattcttagggtattaactgacttgacttgaactccgttggtttaccatgttagtaaactgtgctttctattattatcatctatacataaaacctgagcagcaactgtgtgctgaagcaaccgtgtgtgaagtcttcacaaaagaaagaaagacttcaaagccaaagaatgtcctatttgctaatatgagcaaatattttgtttcacaatgtactatcatttattggtgactgcaataatttactgtcagtaaatgccaataactagttagttagaaattgtaaagtaggccaaataagaagcagagagagaaaaaaaatcacctccctaagaaaagggttttc

SEQ ID NO: 424581 - DNA, 5151 bp, Homo sapiens
agcgaaatgtttctttttaagggtttgctaattattatataacataaaaaaaaaacccacacatgtgggccaaatgcatccacaggccccagtatgtgactctgaaggaaccaaatgatggccccatgccaggagcagtcccattgggaagcacagtcccttctgttccaaatccagaatggccactgaaagaccccaccattttcttgtgggtggtagggggatcaaatcttccagtatgaatcccacagaaaccaaggctgtaaaaacagaacctgagaagaagtcacagtcaaccaagctgtctgtggttcatgagaaaaaatcccaagaaggaaagccaaaagaacacacagagccaaaaagcctacccaagcaggcatcagatacaggaagtaacgatgctcacaataaaaaagcagtttccagatcagctgaacagcagccatcagagaaatcaacagaaccaaagactaaaccacaagacatgatttctgctggtggagagagtgttgctggtatcactgcaatatctggcaagccgggtgacaagaaaaaagaaaagaaatcattaaccccagctgtgccagttgaatctaaaccggataaaccatcgggaaagtcaggcatggatgctgctttggatgacttaatagatactttaggaggacctgaagaaactgaagaagaaaatacaacgtatactggaccagaagtttcagatccaatgagttccacctacatagaggaattgggtaaaagagaagtcacaattcctccaaaatatagggaactattggctaaaaaggaagggatcacagggcctcctgcagactcttcgaaacccatagggccagatgatgctatagacgccttgtcatctgacttcacctgtgggtcgcctacagctgctggaaagaaaactgaaaaagaggaatctacagaagttttaaaagctcagtcagcagggacagtcagaagtgctgctccaccccaagagaagaaaagaaaggtggagaaggatacaatgagtgatcaagcactcgaggctctgtcggcttcactgggcacccggcaagcagaacctgagctcgacctccgctcaattaaggaagtcgatgaggcaaaagctaaagaagaaaaactagagaagtgtggtgaggatgatgaaacaatcccatctgagtacagattaaaaccagccacggataaagatggaaaaccactattgccagagcctgaagaaaaacccaagcctcggagtgaatcagaactcattgatgaactttcagaagattttgaccggtctgaatgtaaagagaaaccatctaagccaactgaaaagacagaagaatctaaggccgctgctccagctcctgtgtcggaggctgtgtgtcggacctccatgtgtagtatacagtcagcaccccctgagccggctaccttgaagggcacagtgccagatgatgctgtagaagccttggctgatagcctggggaaaaaggaagcagatccagaagatggaaaacctgtgatggataaagtcaaggagaaggccaaagaagaagaccgtgaaaagcttggtgaaaaagaagaaacaattcctcctgattatagattagaagaggtcaaggataaagatggaaagccactcctgccaaaagagtctaaggaacagcttccacccatgagtgaagacttccttctggatgctttgtctgaggacttctctggtccacaaaatgcttcatctcttaaatttgaagatgctaaacttgctgctgccatctctgaagtggtttcccaaaccccagcttcaacgacccaagctggagccccaccccgtgatacctcgcagagtgacaaagacctcgatgatgccttggataaactctctgacagtctaggacaaaggcagcctgacccagatgagaacaaaccaatggaagataaagtaaaggaaaaagctaaagctgaacatagagacaagcttggagaaagagatgacactatcccacctgaatacagacatctcctggatgataatggacaggacaaaccagtgaagccacctacaaagaaatcagaggattcaaagaaacctgcagatgaccaagaccccattgatgctctctcaggagatctggacagctgtccctccactacagaaacctcacagaacacagcaaaggataagtgcaagaaggctgcttccagctccaaagcacctaagaatggaggtaaagcgaaggattcagcaaagacaacagaggaaacttccaagccaaaagatgactaaagaaatacaagttaaggtatctggtatctgcatgtaaaatcttcagctggtggatggtgacttttgaagaacaaaaggctttggcaacagaaaacaattgttctgggtgatttctagaatggtttttgttgagtctctgaacatcctaaatattggtttgttattcttttccagaaagaaaatgaatttgactggttcacctgtgtactgagtattgataaactttgaatttttttaattgccttcaattgggagagaaagctttatatttgtaagaaatatatttgataaagtttcttaaagcaacaccaaaaaaacaaaagaaaagctaagtgaatttttgcacattctacacacagtgcctgtaaatctcatttgtattttcagtttgcccttaattttttttgttagtgtttagaaaacaatgttttaaacattcttcagtgttctgatttcttattaccccctttcctcttgggcttttgaactgtatttgatgttgctttgggataatgtttataagtcaaacataagatattgtacattgggcacatatctcctcttgggctgctaataataaattaataacaggtaacctggacaaaccaggaagcaccaaaccccttttcagtttgaactcttctttgccaggtgtgaggacttctgcatcttacagtcagcacagaacacactgagacttgaatcaagtcagcaacagagcaaaataaaggttagataagtccttgtgtagcaaatttcgagcataagaaataaaatctaattaattcttagggtactcatctgacttgaactctgttggtttactgtgttagtaaactgtgctttctattatctatacataaaacctgagcagcaactgtgtctttagagctattgccacattagcctttgcactgtatagcgtctggctttatggaacttaagtttaccaaatataaaaagaaacttctgcttttaaaaaaattatatatatatattaaatttgaaacctgcatttctcccacagcaatgtaagaagtaggctctgatgtcctaccactttgaatggttttctaatatcttaatgaatagttcctgaacattgcactgatatcatcgattagaattttgatatttaatttcatctttatttcctggtagagaatgcaggaaaagatgtcaggtacataacataaaacagattgggaatttattgtttccaaagggcatggccttccttagcatcagtttgaagcttttgttatgacttagctgacttgtggcagcggggcaagcaaaaacaataacactgcttataaatggcaccacatcttgttaacctcccccccaaatactctctgaaagtcatgcacatacctatgggattttacacaccaccagcttaaaatgctatgtctctatccatcagaaatagtcattattctatttttaaggcagcaacaagaaaagaaaaaacacttttcctgagggatttctaaccatgtatctaatcctcccatttgggcagtataggtgtttgcttttttgttttctttttttaagaaaaaccttgaaacctttgacactgacagatgtgtttgcaaggatacggctgcagtattactaatttccatgtgtatctggaagtatttttaaatggcataccaaaatccagaagtttaaagatgcctataaaagtaaacaacatttatttaaaaagaactctgaatatgccttcttttttaattagaaatatcttcgagacttgggtgtttgttaataactaataactggagtaagctacaggatctaaagcagccctttttacagtctagttaggagagagaaaataattgcaaatatccacttagaggcaaagaacaattttttattatcaaaaaggtttctgcacattgttgtggcaatattgtatctgtttagaaaatgggcttttccaaaagcaaacaaagataggttcctcaggtgaccaaaactgaaaatcaatatttccatgtttcattaatcaaggcataaaatacaattaaagcaaaatattttacattaaaatcttggttgtgtatttttttaaaagaagggaaatagtttagtttggggtggaaattaccagtgatttctatttttattaaaccattcactacaacaaataagtataaaaattccaattccacttttatacctatttatttgttgtagtgaatggtttaataaatggcagatttatgtccagaagtcactctattttgtcgtgtattaggggaacacattttgacatttttcgtaccaatcatcaatcatattcccttatcttgaagtttttgccttatattcaaaaagttcagtttgaattctcctttgccaggtgtgaggatttccgcaccttagagtcagcgcaaaacacgctgcaacttgaatcaagtcagcaacagagcacactatgggttagataagtccctgtgtagcaagttttcagaataagaaataaaatctaattcttagggtattaactgacttgacttgaactccgttggtttaccatgttagtaaactgtgctttctattattatcatctatacataaaacctgagcagcaactgtgtgctgaagcaaccgtgtgtgaagtcttcacaaaagaaagaaagacttcaaagccaaagaatgtcctatttgctaatatgagcaaatattttgtttcacaatgtactatcatttattggtgactgcaataatttactgtcagtaaatgccaataactagttagttagaaattgtaaagtaggccaaataagaagcagagagagaaaaaaaatcacctccctaagaaaagggttttc

SEQ ID NO: 424582 - DNA, 5032 bp, Homo sapiens
  misc_feature (3)..(3): n is a, c, g, or t
gtngcactcagagagctgggctggagctccaagcggaaaccgcgggagccgagcccagctaggaatgcagacctcctgaaaaccaagccgaggactgcggggtccggtgtccacgcagagtgtcagcttcctctggtgcaaccagcaagtcttccagtatgaatcccacagaaaccaaggctgtaaaaacagaacctgagaagaagtcacagtcaaccaagctgtctgtggttcatgagaaaaaatcccaagaaggaaagccaaaagaacacacagagccaaaaagcctacccaagcaggcatcagatacaggaagtaacgatgctcacaataaaaaagcagtttccagatcagctgaacagcagccatcagagaaatcaacagaaccaaagactaaaccacaagacatgatttctgctggtggagagagtgttgctggtatcactgcaatatctggcaagccgggtgacaagaaaaaagaaaagaaatcattaaccccagctgtgccagttgaatctaaaccggataaaccatcgggaaagtcaggcatggatgctgctttggatgacttaatagatactttaggaggacctgaagaaactgaagaagaaaatacaacgtatactggaccagaagtttcagatccaatgagttccacctacatagaggaattgggtaaaagagaagtcacaattcctccaaaatatagggaactattggctaaacccatagggccagatgatgctatagacgccttgtcatctgacttcacctgtgggtcgcctacagctgctggaaagaaaactgaaaaagaggaatctacagaagttttaaaagctcagtcagcagggacagtcagaagtgctgctccaccccaagagaagaaaagaaaggtggagaaggatacaatgagtgatcaagcactcgaggctctgtcggcttcactgggcacccggcaagcagaacctgagctcgacctccgctcaattaaggaagtcgatgaggcaaaagctaaagaagaaaaactagagaagtgtggtgaggatgatgaaacaatcccatctgagtacagattaaaaccagccacggataaagatggaaaaccactattgccagagcctgaagaaaaacccaagcctcggagtgaatcagaactcattgatgaactttcagaagattttgaccggtctgaatgtaaagagaaaccatctaagccaactgaaaagacagaagaatctaaggccgctgctccagctcctgtgtcggaggctgtgtgtcggacctccatgtgtagtatacagtcagcaccccctgagccggctaccttgaagggcacagtgccagatgatgctgtagaagccttggctgatagcctggggaaaaaggaagcagatccagaagatggaaaacctgtgatggataaagtcaaggagaaggccaaagaagaagaccgtgaaaagcttggtgaaaaagaagaaacaattcctcctgattatagattagaagaggtcaaggataaagatggaaagccactcctgccaaaagagtctaaggaacagcttccacccatgagtgaagacttccttctggatgctttgtctgaggacttctctggtccacaaaatgcttcatctcttaaatttgaagatgctaaacttgctgctgccatctctgaagtggtttcccaaaccccagcttcaacgacccaagctggagccccaccccgtgatacctcgcagagtgacaaagacctcgatgatgccttggataaactctctgacagtctaggacaaaggcagcctgacccagatgagaacaaaccaatggaagataaagtaaaggaaaaagctaaagctgaacatagagacaagcttggagaaagagatgacactatcccacctgaatacagacatctcctggatgataatggacaggacaaaccagtgaagccacctacaaagaaatcagaggattcaaagaaacctgcagatgaccaagaccccattgatgctctctcaggagatctggacagctgtccctccactacagaaacctcacagaacacagcaaaggataagtgcaagaaggctgcttccagctccaaagcacctaagaatggaggtaaagcgaaggattcagcaaagacaacagaggaaacttccaagccaaaagatgactaaagaaatacaagttaaggtatctggtatctgcatgtaaaatcttcagctggtggatggtgacttttgaagaacaaaaggctttggcaacagaaaacaattgttctgggtgatttctagaatggtttttgttgagtctctgaacatcctaaatattggtttgttattcttttccagaaagaaaatgaatttgactggttcacctgtgtactgagtattgataaactttgaatttttttaattgccttcaattgggagagaaagctttatatttgtaagaaatatatttgataaagtttcttaaagcaacaccaaaaaaacaaaagaaaagctaagtgaatttttgcacattctacacacagtgcctgtaaatctcatttgtattttcagtttgcccttaattttttttgttagtgtttagaaaacaatgttttaaacattcttcagtgttctgatttcttattaccccctttcctcttgggcttttgaactgtatttgatgttgctttgggataatgtttataagtcaaacataagatattgtacattgggcacatatctcctcttgggctgctaataataaattaataacaggtaacctggacaaaccaggaagcaccaaaccccttttcagtttgaactcttctttgccaggtgtgaggacttctgcatcttacagtcagcacagaacacactgagacttgaatcaagtcagcaacagagcaaaataaaggttagataagtccttgtgtagcaaatttcgagcataagaaataaaatctaattaattcttagggtactcatctgacttgaactctgttggtttactgtgttagtaaactgtgctttctattatctatacataaaacctgagcagcaactgtgtctttagagctattgccacattagcctttgcactgtatagcgtctggctttatggaacttaagtttaccaaatataaaaagaaacttctgcttttaaaaaaattatatatatatattaaatttgaaacctgcatttctcccacagcaatgtaagaagtaggctctgatgtcctaccactttgaatggttttctaatatcttaatgaatagttcctgaacattgcactgatatcatcgattagaattttgatatttaatttcatctttatttcctggtagagaatgcaggaaaagatgtcaggtacataacataaaacagattgggaatttattgtttccaaagggcatggccttccttagcatcagtttgaagcttttgttatgacttagctgacttgtggcagcggggcaagcaaaaacaataacactgcttataaatggcaccacatcttgttaacctcccccccaaatactctctgaaagtcatgcacatacctatgggattttacacaccaccagcttaaaatgctatgtctctatccatcagaaatagtcattattctatttttaaggcagcaacaagaaaagaaaaaacacttttcctgagggatttctaaccatgtatctaatcctcccatttgggcagtataggtgtttgcttttttgttttctttttttaagaaaaaccttgaaacctttgacactgacagatgtgtttgcaaggatacggctgcagtattactaatttccatgtgtatctggaagtatttttaaatggcataccaaaatccagaagtttaaagatgcctataaaagtaaacaacatttatttaaaaagaactctgaatatgccttcttttttaattagaaatatcttcgagacttgggtgtttgttaataactaataactggagtaagctacaggatctaaagcagccctttttacagtctagttaggagagagaaaataattgcaaatatccacttagaggcaaagaacaattttttattatcaaaaaggtttctgcacattgttgtggcaatattgtatctgtttagaaaatgggcttttccaaaagcaaacaaagataggttcctcaggtgaccaaaactgaaaatcaatatttccatgtttcattaatcaaggcataaaatacaattaaagcaaaatattttacattaaaatcttggttgtgtatttttttaaaagaagggaaatagtttagtttggggtggaaattaccagtgatttctatttttattaaaccattcactacaacaaataagtataaaaattccaattccacttttatacctatttatttgttgtagtgaatggtttaataaatggcagatttatgtccagaagtcactctattttgtcgtgtattaggggaacacattttgacatttttcgtaccaatcatcaatcatattcccttatcttgaagtttttgccttatattcaaaaagttcagtttgaattctcctttgccaggtgtgaggatttccgcaccttagagtcagcgcaaaacacgctgcaacttgaatcaagtcagcaacagagcacactatgggttagataagtccctgtgtagcaagttttcagaataagaaataaaatctaattcttagggtattaactgacttgacttgaactccgttggtttaccatgttagtaaactgtgctttctattattatcatctatacataaaacctgagcagcaactgtgtgctgaagcaaccgtgtgtgaagtcttcacaaaagaaagaaagacttcaaagccaaagaatgtcctatttgctaatatgagcaaatattttgtttcacaatgtactatcatttattggtgactgcaataatttactgtcagtaaatgccaataactagttagttagaaattgtaaagtaggccaaataagaagcagagagagaaaaaaaatcacctccctaagaaaagggttttc

SEQ ID NO: 424583 - DNA, 4535 bp, Homo sapiens
aggagcccgggtccctccgcgggcaggaaggggagggcccatcggggctaggggaaccccggcgcagacctggggtggggtcggaaaagctgtttcatcgcccgctcccgggccctccgctcctcctgcctccctccctctctccctggcaggactccccgccaggcctccccgccactctccgcggcgcattccgggaggcagcggccgcagcggcctcgccatgtcccagcccggccagaagcccgccgcctccccgcggccccggcgagcagccgccgcccgccgcacccatgagcatgtcagtgaaaaaaccagtgaatcgccttccaaaccaggagaaaagaaaggatcagatgagaaaaaagcagcaagcctcggcagcagtcaatcctccagaacctatgctggtggaacagcctcggccaccaaggtgtcagcttcctctggtgcaaccagcaagtcttccagtatgaatcccacagaaaccaaggctgtaaaaacagaacctgagaagaagtcacagtcaaccaagccaaaaagcctacccaagcaggcatcagatacaggaagtaacgatgctcacaataaaaaagcagtttccagatcagctgaacagcagccatcagagaaatcaacagaaccaaagactaaaccacaagacatgatttctgctggtggagagagtgttgctggtatcactgcaatatctggcaagccgggtgacaagaaaaaagaaaagaaatcattaaccccagctgtgccagttgaatctaaaccggataaaccatcgggaaagtcaggcatggatgctgctttggatgacttaatagatactttaggaggacctgaagaaactgaagaagaaaatacaacgtatactggaccagaagtttcagatccaatgagttccacctacatagaggaattgggtaaaagagaagtcacaattcctccaaaatatagggaactattggctaaaaaggaagggatcacagggcctcctgcagactcttcgaaacccatagggccagatgatgctatagacgccttgtcatctgacttcacctgtgggtcgcctacagctgctggaaagaaaactgaaaaagaggaatctacagaagttttaaaagctcagtcagcagggacagtcagaagtgctgctccaccccaagagaagaaaagaaaggtggagaaggatacaatgagtgatcaagcactcgaggctctgtcggcttcactgggcacccggcaagcagaacctgagctcgacctccgctcaattaaggaagtcgatgaggcaaaagctaaagaagaaaaactagagaagtgtggtgaggatgatgaaacaatcccatctgagtacagattaaaaccagccacggataaagatggaaaaccactattgccagagcctgaagaaaaacccaagcctcggagtgaatcagaactcattgatgaactttcagaagattttgaccggtctgaatgtaaagagaaaccatctaagccaactgaaaagacagaagaatctaaggccgctgctccagctcctgtgtcggaggctgtgtgtcggacctccatgtgtagtatacagtcagcaccccctgagccggctaccttgaagggcacagtgccagatgatgctgtagaagccttggctgatagcctggggaaaaaggaagcagatccagaagatggaaaacctgtgatggataaagtcaaggagaaggccaaagaagaagaccgtgaaaagcttggtgaaaaagaagaaacaattcctcctgattatagattagaagaggtcaaggataaagatggaaagccactcctgccaaaagagtctaaggaacagcttccacccatgagtgaagacttccttctggatgctttgtctgaggacttctctggtccacaaaatgcttcatctcttaaatttgaagatgctaaacttgctgctgccatctctgaagtggtttcccaaaccccagcttcaacgacccaagctggagccccaccccgtgatacctcgcagagtgacaaagacctcgatgatgccttggataaactctctgacagtctaggacaaaggcagcctgacccagatgagaacaaaccaatggaagataaagtaaaggaaaaagctaaagctgaacatagagacaagcttggagaaagagatgacactatcccacctgaatacagacatctcctggatgataatggacaggacaaaccagtgaagccacctacaaagaaatcagaggattcaaagaaacctgcagatgaccaagaccccattgatgctctctcaggagatctggacagctgtccctccactacagaaacctcacagaacacagcaaaggataagtgcaagaaggctgcttccagctccaaagcacctaagaatggaggtaaagcgaaggattcagcaaagacaacagaggaaacttccaagccaaaagatgactaaagaaatacaagttaaggtatctggtatctgcatgtaaaatcttcagctggtggatggtgacttttgaagaacaaaaggctttggcaacagaaaacaattgttctgggtgatttctagaatggtttttgttgagtctctgaacatcctaaatattggtttgttattcttttccagaaagaaaatgaatttgactggttcacctgtgtactgagtattgataaactttgaatttttttaattgccttcaattgggagagaaagctttatatttgtaagaaatatatttgataaagtttcttaaagcaacaccaaaaaaacaaaagaaaagctaagtgaatttttgcacattctacacacagtgcctgtaaatctcatttgtattttcagtttgcccttaattttttttgttagtgtttagaaaacaatgttttaaacattcttcagtgttctgatttcttattaccccctttcctcttgggcttttgaactgtatttgatgttgctttgggataatgtttataagtcaaacataagatattgtacattgggcacatatctcctcttgggctgctaataataaattaataacaggtaacctggacaaaccaggaagcaccaaaccccttttcagtttgaactcttctttgccaggtgtgaggacttctgcatcttacagtcagcacagaacacactgagacttgaatcaagtcagcaacagagcaaaataaaggttagataagtccttgtgtagcaaatttcgagcataagaaataaaatctaattaattcttagggtactcatctgacttgaactctgttggtttactgtgttagtaaactgtgctttctattatctatacataaaacctgagcagcaactgtgtctttagagctattgccacattagcctttgcactgtatagcgtctggctttatggaacttaagtttaccaaatataaaaagaaacttctgcttttaaaaaaattatatatatatattaaatttgaaacctgcatttctcccacagcaatgtaagaagtaggctctgatgtcctaccactttgaatggttttctaatatcttaatgaatagttcctgaacattgcactgatatcatcgattagaattttgatatttaatttcatctttatttcctggtagagaatgcaggaaaagatgtcaggtacataacataaaacagattgggaatttattgtttccaaagggcatggccttccttagcatcagtttgaagcttttgttatgacttagctgacttgtggcagcggggcaagcaaaaacaataacactgcttataaatggcaccacatcttgttaacctcccccccaaatactctctgaaagtcatgcacatacctatgggattttacacaccaccagcttaaaatgctatgtctctatccatcagaaatagtcattattctatttttaaggcagcaacaagaaaagaaaaaacacttttcctgagggatttctaaccatgtatctaatcctcccatttgggcagtataggtgtttgcttttttgttttctttttttaagaaaaaccttgaaacctttgacactgacagatgtgtttgcaaggatacggctgcagtattactaatttccatgtgtatctggaagtatttttaaatggcataccaaaatccagaagtttaaagatgcctataaaagtaaacaacatttatttaaaaagaactctgaatatgccttcttttttaattagaaatatcttcgagacttgggtgtttgttaataactaataactggagtaagctacaggatctaaagcagccctttttacagtctagttaggagagagaaaataattgcaaatatccacttagaggcaaagaacaattttttattatcaaaaaggtttctgcacattgttgtggcaatattgtatctgtttagaaaatgggcttttccaaaagcaaacaaagataggttcctcaggtgaccaaaactgaaaatcaatcctcccccctctccgtgggagcgccgtgtggggccgtcggcggggggagaaggg

SEQ ID NO: 424584 - DNA, 4898 bp, Homo sapiens
aggagcccgggtccctccgcgggcaggaaggggagggcccatcggggctaggggaaccccggcgcagacctggggtggggtcggaaaagctgtttcatcgcccgctcccgggccctccgctcctcctgcctccctccctctctccctggcaggactccccgccaggcctccccgccactctccgcggcgcattccgggaggcagcggccgcagcggcctcgccatgtcccagcccggccagaagcccgccgcctccccgcggccccggcgagcagccgccgcccgccgcacccatgagcatgtcagtgaaaaaaccagtgaatcgccttccaaaccaggagaaaagaaaggatcagatgagaaaaaagcagcaagcctcggcagcagtcaatcctccagaacctatgctggtggaacagcctcggccaccaaggtgtcagcttcctctggtgcaaccagcaagtcttccagtatgaatcccacagaaaccaaggctgtaaaaacagaacctgagaagaagtcacagtcaaccaagccaaaaagcctacccaagcaggcatcagatacaggaagtaacgatgctcacaataaaaaagcagtttccagatcagctgaacagcagccatcagagaaatcaacagaaccaaagactaaaccacaagacatgatttctgctggtggagagagtgttgctggtatcactgcaatatctggcaagccgggtgacaagaaaaaagaaaagaaatcattaaccccagctgtgccagttgaatctaaaccggataaaccatcgggaaagtcaggcatggatgctgctttggatgacttaatagatactttaggaggacctgaagaaactgaagaagaaaatacaacgtatactggaccagaagtttcagatccaatgagttccacctacatagaggaattgggtaaaagagaagtcacaattcctccaaaatatagggaactattggctaaaaaggaagggatcacagggcctcctgcagactcttcgaaacccatagggccagatgatgctatagacgccttgtcatctgacttcacctgtgggtcgcctacagctgctggaaagaaaactgaaaaagaggaatctacagaagttttaaaagctcagtcagcagggacagtcagaagtgctgctccaccccaagagaagaaaagaaaggtggagaaggatacaatgagtgatcaagcactcgaggctctgtcggcttcactgggcacccggcaagcagaacctgagctcgacctccgctcaattaaggaagtcgatgaggcaaaagctaaagaagaaaaactagagaagtgtggtgaggatgatgaaacaatcccatctgagtacagattaaaaccagccacggataaagatggaaaaccactattgccagagcctgaagaaaaacccaagcctcggagtgaatcagaactcattgatgaactttcagaagattttgaccggtctgaatgtaaagagaaaccatctaagccaactgaaaagacagaagaatctaaggccgctgctccagctcctgtgtcggaggctgtgtgtcggacctccatgtgtagtatacagtcagcaccccctgagccggctaccttgaagggcacagtgccagatgatgctgtagaagccttggctgatagcctggggaaaaaggaagcagatccagaagatggaaaacctgtgatggataaagtcaaggagaaggccaaagaagaagaccgtgaaaagcttggtgaaaaagaagaaacaattcctcctgattatagattagaagaggtcaaggataaagatggaaagccactcctgccaaaagagtctaaggaacagcttccacccatgagtgaagacttccttctggatgctttgtctgaggacttctctggtccacaaaatgcttcatctcttaaatttgaagatgctaaacttgctgctgccatctctgaagtggtttcccaaaccccagcttcaacgacccaagctggagccccaccccgtgatacctcgcagagtgacaaagacctcgatgatgccttggataaactctctgacagtctaggacaaaggcagcctgacccagatgagaacaaaccaatggaagataaagtaaaggaaaaagctaaagctgaacatagagacaagcttggagaaagagatgacactatcccacctgaatacagacatctcctggatgataatggacaggacaaaccagtgaagccacctacaaagaaatcagaggattcaaagaaacctgcagatgaccaagaccccattgatgctctctcaggagatctggacagctgtccctccactacagaaacctcacagaacacagcaaaggataagtgcaagaaggctgcttccagctccaaagcacctaagaatggaggtaaagcgaaggattcagcaaagacaacagaggaaacttccaagccaaaagatgactaaagaaatacaagttaaggtatctggtatctgcatgtaaaatcttcagctggtggatggtgacttttgaagaacaaaaggctttggcaacagaaaacaattgttctgggtgatttctagaatggtttttgttgagtctctgaacatcctaaatattggtttgttattcttttccagaaagaaaatgaatttgactggttcacctgtgtactgagtattgataaactttgaatttttttaattgccttcaattgggagagaaagctttatatttgtaagaaatatatttgataaagtttcttaaagcaacaccaaaaaaacaaaagaaaagctaagtgaatttttgcacattctacacacagtgcctgtaaatctcatttgtattttcagtttgcccttaattttttttgttagtgtttagaaaacaatgttttaaacattcttcagtgttctgatttcttattaccccctttcctcttgggcttttgaactgtatttgatgttgctttgggataatgtttataagtcaaacataagatattgtacattgggcacatatctcctcttgggctgctaataataaattaataacaggtaacctggacaaaccaggaagcaccaaaccccttttcatttgaatggttttctaatatcttaatgaatagttcctgaacattgcactgatatcatcgattagaattttgatatttaatttcatctttatttcctggtagagaatgcaggaaaagatgtcaggtacataacataaaacagattgggaatttattgtttccaaagggcatggccttccttagcatcagtttgaagcttttgttatgacttagctgacttgtggcagcggggcaagcaaaaacaataacactgcttataaatggcaccacatcttgttaacctcccccccaaatactctctgaaagtcatgcacatacctatgggattttacacaccaccagcttaaaatgctatgtctctatccatcagaaatagtcattattctatttttaaggcagcaacaagaaaagaaaaaacacttttcctgagggatttctaaccatgtatctaatcctcccatttgggcagtataggtgtttgcttttttgttttctttttttaagaaaaaccttgaaacctttgacactgacagatgtgtttgcaaggatacggctgcagtattactaatttccatgtgtatctggaagtatttttaaatggcataccaaaatccagaagtttaaagatgcctataaaagtaaacaacatttatttaaaaagaactctgaatatgccttcttttttaattagaaatatcttcgagacttgggtgtttgttaataactaataactggagtaagctacaggatctaaagcagccctttttacagtctagttaggagagagaaaataattgcaaatatccacttagaggcaaagaacaattttttattatcaaaaaggtttctgcacattgttgtggcaatattgtatctgtttagaaaatgggcttttccaaaagcaaacaaagataggttcctcaggtgaccaaaactgaaaatcaatatttccatgtttcattaatcaaggcataaaatacaattaaagcaaaatattttacattaaaatcttggttgtgtatttttttaaaagaagggaaatagtttagtttggggtggaaattaccagtgatttctatttttattaaaccattcactacaacaaataagtataaaaattccaattccacttttatacctatttatttgttgtagtgaatggtttaataaatggcagatttatgtccagaagtcactctattttgtcgtgtattaggggaacacattttgacatttttcgtaccaatcatcaatcatattcccttatcttgaagtttttgccttatattcaaaaagttcagtttgaattctcctttgccaggtgtgaggatttccgcaccttagagtcagcgcaaaacacgctgcaacttgaatcaagtcagcaacagagcacactatgggttagataagtccctgtgtagcaagttttcagaataagaaataaaatctaattcttagggtattaactgacttgacttgaactccgttggtttaccatgttagtaaactgtgctttctattattatcatctatacataaaacctgagcagcaactgtgtgctgaagcaaccgtgtgtgaagtcttcacaaaagaaagaaagacttcaaagccaaagaatgtcctatttgctaatatgagcaaatattttgtttcacaatgtactatcatttattggtgactgcaataatttactgtcagtaaatgccaataactagttagttagaaattgtaaagtaggccaaataagaagcagagagagaaaaaaaatcacctccctaagaaaagggttttc

SEQ ID NO: 424585 - DNA, 4240 bp, Homo sapiens
  misc_feature (4123)..(4123): n is a, c, g, or t
aggagcccgggtccctccgcgggcaggaaggggagggcccatcggggctaggggaaccccggcgcagacctggggtggggtcggaaaagctgtttcatcgcccgctcccgggccctccgctcctcctgcctccctccctctctccctggcaggactccccgccaggcctccccgccactctccgcggcgcattccgggaggcagcggccgcagcggcctcgccatgtcccagcccggccagaagcccgccgcctccccgcggccccggcgagcagccgccgcccgccgcacccatgagcatgtcagtgaaaaaaccagtgaatcgccttccaaaccaggagaaaagaaaggatcagatgagaaaaaagcagcaagcctcggcagcagtcaatcctccagaacctatgctggtggaacagcctcggccaccaaggtgtcagcttcctctggtgcaaccagcaagtcttccagtatgaatcccacagaaaccaaggctgtaaaaacagaacctgagaagaagtcacagtcaaccaagccaaaaagcctacccaagcaggcatcagatacaggaagtaacgatgctcacaataaaaaagcagtttccagatcagctgaacagcagccatcagagaaatcaacagaaccaaagactaaaccacaagacatgatttctgctggtggagagagtgttgctggtatcactgcaatatctggcaagccgggtgacaagaaaaaagaaaagaaatcattaaccccagctgtgccagttgaatctaaaccggataaaccatcgggaaagtcaggcatggatgctgctttggatgacttaatagatactttaggaggacctgaagaaactgaagaagaaaatacaacgtatactggaccagaagtttcagatccaatgagttccacctacatagaggaattgggtaaaagagaagtcacaattcctccaaaatatagggaactattggctaaaaaggaagggatcacagggcctcctgcagactcttcgaaacccatagggccagatgatgctatagacgccttgtcatctgacttcacctgtgggtcgcctacagctgctggaaagaaaactgaaaaagaggaatctacagaagttttaaaagctcagtcagcagggacagtcagaagtgctgctccaccccaagagaagaaaagaaaggtggagaaggatacaatgagtgatcaagcactcgaggctctgtcggcttcactgggcacccggcaagcagaacctgagctcgacctccgctcaattaaggaagtcgatgaggcaaaagctaaagaagaaaaactagagaagtgtggtgaggatgatgaaacaatcccatctgagtacagattaaaaccagccacggataaagatggaaaaccactattgccagagcctgaagaaaaacccaagcctcggagtgaatcagaactcattgatgaactttcagaagattttgaccggtctgaatgtaaagagaaaccatctaagccaactgaaaagacagaagaatctaaggccgctgctccagctcctgtgtcggaggctgtgtgtcggacctccatgtgtagtatacagtcagcaccccctgagccggctaccttgaagggcacagtgccagatgatgctgtagaagccttggctgatagcctggggaaaaaggaagcagatccagaagatggaaaacctgtgatggataaagtcaaggagaaggccaaagaagaagaccgtgaaaagcttggtgaaaaagaagaaacaattcctcctgattatagattagaagaggtcaaggataaagatggaaagccactcctgccaaaagagtctaaggaacagcttccacccatgagtgaagacttccttctggatgctttgtctgaggacttctctggtccacaaaatgcttcatctcttaaatttgaagatgctaaacttgctgctgccatctctgaagtggtttcccaaaccccagcttcaacgacccaagctggagccccaccccgtgatacctcgcagagtgacaaagacctcgatgatgccttggataaactctctgacagtctaggacaaaggcagcctgacccagatgagaacaaaccaatggaagataaagtaaaggaaaaagctaaagctgaacatagagacaagcttggagaaagagatgacactatcccacctgaatacagacatctcctggatgataatggacaggacaaaccagtgaagccacctacaaagaaatcagaggattcaaagaaacctgcagatgaccaagaccccattgatgctctctcaggagatctggacagctgtccctccactacagaaacctcacagaacacagcaaaggataagtgcaagaaggctgcttccagctccaaagcacctaagaatggaggtaaagcgaaggattcagcaaagacaacagaggaaacttccaagccaaaagatgactaaagaaatacaagttaaggtatctggtatctgcatgtaaaatcttcagctggtggatggtgacttttgaagaacaaaaggctttggcaacagaaaacaattgttctgggtgatttctagaatggtttttgttgagtctctgaacatcctaaatattggtttgttattcttttccagaaagaaaatgaatttgactggttcacctgtgtactgagtattgataaactttgaatttttttaattgccttcaattgggagagaaagctttatatttgtaagaaatatatttgataaagtttcttaaagcaacaccaaaaaaacaaaagaaaagctaagtgaatttttgcacattctacacacagtgcctgtaaatctcatttgtattttcagtttgcccttaattttttttgttagtgtttagaaaacaatgttttaaacattcttcagtgttctgatttcttattaccccctttcctcttgggcttttgaactgtatttgatgttgctttgggataatgtttataagtcaaacataagatattgtacattgggcacatatctcctcttgggctgctaataataaattaataacaggtaacctggacaaaccaggaagcaccaaaccccttttcagtttgaactcttctttgccaggtgtgaggacttctgcatcttacagtcagcacagaacacactgagacttgaatcaagtcagcaacagagcaaaataaaggttagataagtccttgtgtagcaaatttcgagcataagaaataaaatctaattaattcttagggtactcatctgacttgaactctgttggtttactgtgttagtaaactgtgctttctattatctatacataaaacctgagcagcaactgtgtctttagagctattgccacattagcctttgcactgtatagcgtctggctttatggaacttaagtttaccaaatataaaaagaaacttctgcttttaaaaaaattatatatatatattaaatttgaaacctgcatttctcccacagcaatgtaagaagtaggctctgatgtcctaccactttgaatggttttctaatatcttaatgaatagttcctgaacattgcactgatatcatcgattagaattttgatatttaatttcatctttatttcctggtagagaatgcaggaaaagatgtcaggtacataacataaaacagattgggaatttattgtttccaaagggcatggccttccttagcatcagtttgaagcttttgttatgacttagctgacttgtggcagcggggcaagcaaaaacaataacactgcttataaatggcaccacatcttgttaacctcccccccaaatactctctgaaagtcatgcacatacctatgggattttacacaccaccagcttaaaatgctatgtctctatccatcagaaatagtcattattctatttttaaggcagcaacaagaaaagaaaaaacacttttcctgagggatttctaaccatgtatctaatcctcccatttgggcagtataggtgtttgcttttttgttttctttttttaagaaaaaccttgaaacctttgacactgacagatgtgtttgcaaggatacggctgcagtattactaatttccatgtgtatctggganctttttatggctaccacaccgagataaagcctataagacccttttaaaggacggaattccttaaaaaatctgcaggggggggcccacacggggagaaaccctctcgggacgaaagac

SEQ ID NO: 424586 - DNA, 5163 bp, Homo sapiens
  misc_feature (4626)..(4626): n is a, c, g, or t
  misc_feature (4631)..(4631): n is a, c, g, or t
  misc_feature (4664)..(4664): n is a, c, g, or t
  misc_feature (4693)..(4693): n is a, c, g, or t
aggagcccgggtccctccgcgggcaggaaggggagggcccatcggggctaggggaaccccggcgcagacctggggtggggtcggaaaagctgtttcatcgcccgctcccgggccctccgctcctcctgcctccctccctctctccctggcaggactccccgccaggcctccccgccactctccgcggcgcattccgggaggcagcggccgcagcggcctcgccatgtcccagcccggccagaagcccgccgcctccccgcggccccggcgagcagccgccgcccgccgcacccatgagcatgtcagtgaaaaaaccagtgaatcgccttccaaaccaggagaaaagaaaggatcagatgagaaaaaagcagcaagcctcggcagcagtcaatcctccagaacctatgctggtggaacagcctcggccaccaaggtgtcagcttcctctggtgcaaccagcaagtcttccagtatgaatcccacagaaaccaaggctgtaaaaacagaacctgagaagaagtcacagtcaaccaagccaaaaagcctacccaagcaggcatcagatacaggaagtaacgatgctcacaataaaaaagcagtttccagatcagctgaacagcagccatcagagaaatcaacagaaccaaagactaaaccacaagacatgatttctgctggtggagagagtgttgctggtatcactgcaatatctggcaagccgggtgacaagaaaaaagaaaagaaatcattaaccccagctgtgccagttgaatctaaaccggataaaccatcgggaaagtcaggcatggatgctgctttggatgacttaatagatactttaggaggacctgaagaaactgaagaagaaaatacaacgtatactggaccagaagtttcagatccaatgagttccacctacatagaggaattgggtaaaagagaagtcacaattcctccaaaatatagggaactattggctaaaaaggaagggatcacagggcctcctgcagactcttcgaaacccatagggccagatgatgctatagacgccttgtcatctgacttcacctgtgggtcgcctacagctgctggaaagaaaactgaaaaagaggaatctacagaagttttaaaagctcagtcagcagggacagtcagaagtgctgctccaccccaagagaagaaaagaaaggtggagaaggatacaatgagtgatcaagcactcgaggctctgtcggcttcactgggcacccggcaagcagaacctgagctcgacctccgctcaattaaggaagtcgatgaggcaaaagctaaagaagaaaaactagagaagtgtggtgaggatgatgaaacaatcccatctgagtacagattaaaaccagccacggataaagatggaaaaccactattgccagagcctgaagaaaaacccaagcctcggagtgaatcagaactcattgatgaactttcagaagattttgaccggtctgaatgtaaagagaaaccatctaagccaactgaaaagacagaagaatctaaggccgctgctccagctcctgtgtcggaggctgtgtgtcggacctccatgtgtagtatacagtcagcaccccctgagccggctaccttgaagggcacagtgccagatgatgctgtagaagccttggctgatagcctggggaaaaaggaagcagatccagaagatggaaaacctgtgatggataaagtcaaggagaaggccaaagaagaagaccgtgaaaagcttggtgaaaaagaagaaacaattcctcctgattatagattagaagaggtcaaggataaagatggaaagccactcctgccaaaagagtctaaggaacagcttccacccatgagtgaagacttccttctggatgctttgtctgaggacttctctggtccacaaaatgcttcatctcttaaatttgaagatgctaaacttgctgctgccatctctgaagtggtttcccaaaccccagcttcaacgacccaagctggagccccaccccgtgatacctcgcagagtgacaaagacctcgatgatgccttggataaactctctgacagtctaggacaaaggcagcctgacccagatgagaacaaaccaatggaagataaagtaaaggaaaaagctaaagctgaacatagagacaagcttggagaaagagatgacactatcccacctgaatacagacatctcctggatgataatggacaggacaaaccagtgaagccacctacaaagaaatcagaggattcaaagaaacctgcagatgaccaagaccccattgatgctctctcaggagatctggacagctgtccctccactacagaaacctcacagaacacagcaaaggataagtgcaagaaggctgcttccagctccaaagcacctaagaatggaggtaaagcgaaggattcagcaaagacaacagaggaaacttccaagccaaaagatgactaaagaaatacaagttaaggtatctggtatctgcatgtaaaatcttcagctggtggatggtgacttttgaagaacaaaaggctttggcaacagaaaacaattgttctgggtgatttctagaatggtttttgttgagtctctgaacatcctaaatattggtttgttattcttttccagaaagaaaatgaatttgactggttcacctgtgtactgagtattgataaactttgaatttttttaattgccttcaattgggagagaaagctttatatttgtaagaaatatatttgataaagtttcttaaagcaacaccaaaaaaacaaaagaaaagctaagtgaatttttgcacattctacacacagtgcctgtaaatctcatttgtattttcagtttgcccttaattttttttgttagtgtttagaaaacaatgttttaaacattcttcagtgttctgatttcttattaccccctttcctcttgggcttttgaactgtatttgatgttgctttgggataatgtttataagtcaaacataagatattgtacattgggcacatatctcctcttgggctgctaataataaattaataacaggtaacctggacaaaccaggaagcaccaaaccccttttcagtttgaactcttctttgccaggtgtgaggacttctgcatcttacagtcagcacagaacacactgagacttgaatcaagtcagcaacagagcaaaataaagatgcaaacttcgttttttaaaaacatgatatctaaaaagcagaatgtgcagagtcttttctttgccaagcaaaacagtttccaccacgacggagtcttgctctgtcacccaggctggagtgccgtggctcgatatcggttcctgcaagctccgccctcccgggttcacgccattctcctacctcagcctcccgagtagctgggactacaggcgcccgccaccatgcccggctcattttttgtattttagtagagacggggtttcaccgtcttagccaggatggtcttgatcccctgacctcgtgatccacccacctcagcctcccaaagtgctgggattacaggcgtgagccaccgcgcctgtgctaaaatatattttctagagtgggattagctgtcaacaaactcagtagtcacatggctcatgtgttatctgtgtacatttgtgaaaaacaacagtaatttagagacatacgtgtatttgaaaatattattcagatgaaatactgaatttttcattattctgataatcaccattctcagagactgctgacagggttactattgacctgataccacatgtctacttctgtgatcctaaagagtgggcctgagtgggcctaagcgggcttttcctgaaaaaggcagaatgttttagtggaattctgttcttgtccttgtttgaaagtattacaagttggattccagtgtaatcaagtttaatcttttgaaattgacagctgtctgtggttcatgagaaaaaatcccaagaaggaaagccaaaagaacacacagagccaaaaagcctacccaagcaggcatcagatacaggaagtaacgatgctcacaataaaaaagcagtttccagatcagctgaacagcagccatcagagaaatcaacagaaccaaagactaaaccacaagacatgatttctgctggtggagagagtgttgctggtatcactgcaatatctggcaagccgggtgacaagaaaaaagaaaagaaatcattaaccccagctgtgccagttgaatctaaaccggataaaccatcgggaaagtcaggcatggatgctgctttggatgacttaatagatactttaggaggacctgaagaaactgaagaagaaaatacaacgtatactggaccagaagtttcagatccaatgagttccacctacatagaggaattgggtaaaagagaagtcacaattcctccaaaatatagggaactattggctaaaaaggaagggatcacagggcctcctgcagactcttcgaaacccatagggccagatgatgctatagacgccttgtcatctgacttcacctgtgggtcgcctacagctgctggaaagaaaactgaaaaagaggaatctacagaagttttaaaagctcagtcagcagggacagtcagaagngctgntccacccaagagaagaaaagaaaggtggagaangatacaatgagtgatcaagcactcgaggntctgtcggcttcactgggcacccggcaagcagaacctgagctcgacctccgctccattaaggaagtcgatgaggcaaaagctaaagaagaaaaactagagaagtgtggtgaggatgatgaaacaatcccatctgagtacagattcaaaccagccacggataaagatggaaaaccactattgccagagcccctatattaggccataaaacaagaattaatataattaaaaggatttaaaccataccaagtatattctctaactaggatggactcaaattaccaagccaccatataaggaaatttgaagaatccagtatgtagaaactgaataacacatgcgtaacccatccatgagtccaaggggatgtcagaaaattaaaacacagcaggccatcgcggtggctatacacctgtaatcccagcactttgggagccgaggcgggcggatcacctgaggcgaagttcgagac

SEQ ID NO: 424587 - DNA, 4289 bp, Homo sapiens
  misc_feature (3752)..(3752): n is a, c, g, or t
  misc_feature (3757)..(3757): n is a, c, g, or t
  misc_feature (3790)..(3790): n is a, c, g, or t
  misc_feature (3819)..(3819): n is a, c, g, or t
aggagcccgggtccctccgcgggcaggaaggggagggcccatcggggctaggggaaccccggcgcagacctggggtggggtcggaaaagctgtttcatcgcccgctcccgggccctccgctcctcctgcctccctccctctctccctggcaggactccccgccaggcctccccgccactctccgcggcgcattccgggaggcagcggccgcagcggcctcgccatgtcccagcccggccagaagcccgccgcctccccgcggccccggcgagcagccgccgcccgccgcacccatgagcatgtcagtgaaaaaaccagtgaatcgccttccaaaccaggagaaaagaaaggatcagatgagaaaaaagcagcaagcctcggcagcagtcaatcctccagaacctatgctggtggaacagcctcggccaccaaggtgtcagcttcctctggtgcaaccagcaagtcttccagtatgaatcccacagaaaccaaggctgtaaaaacagaacctgagaagaagtcacagtcaaccaagccaaaaagcctacccaagcaggcatcagatacaggaagtaacgatgctcacaataaaaaagcagtttccagatcagctgaacagcagccatcagagaaatcaacagaaccaaagactaaaccacaagacatgatttctgctggtggagagagtgttgctggtatcactgcaatatctggcaagccgggtgacaagaaaaaagaaaagaaatcattaaccccagctgtgccagttgaatctaaaccggataaaccatcgggaaagtcaggcatggatgctgctttggatgacttaatagatactttaggaggacctgaagaaactgaagaagaaaatacaacgtatactggaccagaagtttcagatccaatgagttccacctacatagaggaattgggtaaaagagaagtcacaattcctccaaaatatagggaactattggctaaaaaggaagggatcacagggcctcctgcagactcttcgaaacccatagggccagatgatgctatagacgccttgtcatctgacttcacctgtgggtcgcctacagctgctggaaagaaaactgaaaaagaggaatctacagaagttttaaaagctcagtcagcagggacagtcagaagtgctgctccaccccaagagaagaaaagaaaggtggagaaggatacaatgagtgatcaagcactcgaggctctgtcggcttcactgggcacccggcaagcagaacctgagctcgacctccgctcaattaaggaagtcgatgaggcaaaagctaaagaagaaaaactagagaagtgtggtgaggatgatgaaacaatcccatctgagtacagattaaaaccagccacggataaagatggaaaaccactattgccagagcctgaagaaaaacccaagcctcggagtgaatcagaactcattgatgaactttcagaagattttgaccggtctgaatgtaaagagaaaccatctaagccaactgaaaagacagaagaatctaaggccgctgctccagctcctgtgtcggaggctgtgtgtcggacctccatgtgtagtatacagtcagcaccccctgagccggctaccttgaagggcacagtgccagatgatgctgtagaagccttggctgatagcctggggaaaaaggaagcagatccagaagatggaaaacctgtgatggataaagtcaaggagaaggccaaagaagaagaccgtgaaaagcttggtgaaaaagaagaaacaattcctcctgattatagattagaagaggtcaaggataaagatggaaagccactcctgccaaaagagtctaaggaacagcttccacccatgagtgaagacttccttctggatgctttgtctgaggacttctctggtccacaaaatgcttcatctcttaaatttgaagatgctaaacttgctgctgccatctctgaagtggtttcccaaaccccagcttcaacgacccaagctggagccccaccccgtgatacctcgcagagtgacaaagacctcgatgatgccttggataaactctctgacagtctaggacaaaggcagcctgacccagatgagaacaaaccaatggaagataaagtaaaggaaaaagctaaagctgaacatagagacaagcttggagaaagagatgacactatcccacctgaatacagacatctcctggatgataatggacaggacaaaccagtgaagccacctacaaagaaatcagaggattcaaagaaacctgcagatgaccaagaccccattgatgctctctcaggagatctggacagctgtccctccactacagaaacctcacagaacacagcaaaggataagtgcaagaaggctgcttccagctccaaagcacctaagaatggaggtaaagcgaaggattcagcaaagacaacagaggaaacttccaagccaaaagatgactaaagaaatacaagttaaggtatctggtatctgcatgtaaaatcttcagctggtggatggtgacttttgaagaacaaaaggctttggcaacagaaaacaattgttctgggtgatttctagaatggtttttgttgagtctctgaacatcctaaatattggtttgttattcttttccagaaagaaaatgaatttgactggttcacctgtgtactgagtattgataaactttgaatttttttaattgccttcaattgggagagaaagctttatatttgtaagaaatatatttgataaagtttcttaaagcaacaccaaaaaaacaaaagaaaagctaagtgaatttttgcacattctacacacagtgcctgtaaatctcatttgtattttcagtttgcccttaattttttttgttagtgtttagaaaacaatgttttaaacattcttcagtgttctgatttcttattaccccctttcctcttgggcttttgaactgtatttgatgttgctttgggataatgtttataagtcttccagtatgaatcccacagaaaccaaggctgtaaaaacagaacctgagaagaagtcacagtcaaccaagctgtctgtggttcatgagaaaaaatcccaagaaggaaagccaaaagaacacacagagccaaaaagcctacccaagcaggcatcagatacaggaagtaacgatgctcacaataaaaaagcagtttccagatcagctgaacagcagccatcagagaaatcaacagaaccaaagactaaaccacaagacatgatttctgctggtggagagagtgttgctggtatcactgcaatatctggcaagccgggtgacaagaaaaaagaaaagaaatcattaaccccagctgtgccagttgaatctaaaccggataaaccatcgggaaagtcaggcatggatgctgctttggatgacttaatagatactttaggaggacctgaagaaactgaagaagaaaatacaacgtatactggaccagaagtttcagatccaatgagttccacctacatagaggaattgggtaaaagagaagtcacaattcctccaaaatatagggaactattggctaaaaaggaagggatcacagggcctcctgcagactcttcgaaacccatagggccagatgatgctatagacgccttgtcatctgacttcacctgtgggtcgcctacagctgctggaaagaaaactgaaaaagaggaatctacagaagttttaaaagctcagtcagcagggacagtcagaagngctgntccacccaagagaagaaaagaaaggtggagaangatacaatgagtgatcaagcactcgaggntctgtcggcttcactgggcacccggcaagcagaacctgagctcgacctccgctccattaaggaagtcgatgaggcaaaagctaaagaagaaaaactagagaagtgtggtgaggatgatgaaacaatcccatctgagtacagattcaaaccagccacggataaagatggaaaaccactattgccagagcccctatattaggccataaaacaagaattaatataattaaaaggatttaaaccataccaagtatattctctaactaggatggactcaaattaccaagccaccatataaggaaatttgaagaatccagtatgtagaaactgaataacacatgcgtaacccatccatgagtccaaggggatgtcagaaaattaaaacacagcaggccatcgcggtggctatacacctgtaatcccagcactttgggagccgaggcgggcggatcacctgaggcgaagttcgagac

SEQ ID NO: 424588 - DNA, 5423 bp, Homo sapiens
  misc_feature (2349)..(2350): n is a, c, g, or t
aggagcccgggtccctccgcgggcaggaaggggagggcccatcggggctaggggaaccccggcgcagacctggggtggggtcggaaaagctgtttcatcgcccgctcccgggccctccgctcctcctgcctccctccctctctccctggcaggactccccgccaggcctccccgccactctccgcggcgcattccgggaggcagcggccgcagcggcctcgccatgtcccagcccggccagaagcccgccgcctccccgcggccccggcgagcagccgccgcccgccgcacccatgagcatgtcagtgaaaaaaccagtgaatcgccttccaaaccaggagaaaagaaaggatcagatgagaaaaaagcagcaagcctcggcagcagtcaatcctccagaacctatgctggtggaacagcctcggccaccaaggtgtcagcttcctctggtgcaaccagcaagtcttccagtatgaatcccacagaaaccaaggctgtaaaaacagaacctgagaagaagtcacagtcaaccaagctgtctgtggttcatgagaaaaaatcccaagaaggaaagccaaaagaacacacagagccaaaaagcctacccaagcaggcatcagatacaggaagtaacgatgctcacaataaaaaagcagtttccagatcagctgaacagcagccatcagagaaatcaacagaaccaaagactaaaccacaagacatgatttctgctggtggagagagtgttgctggtatcactgcaatatctggcaagccgggtgacaagaaaaaagaaaagaaatcattaaccccagctgtgccagttgaatctaaaccggataaaccatcgggaaagtcaggcatggatgctgctttggatgacttaatagatactttaggaggacctgaagaaactgaagaagaaaatacaacgtatactggaccagaagtttcagatccaatgagttccacctacatagaggaattgggtaaaagagaagtcacaattcctccaaaatatagggaactattggctaaaaaggaagggatcacagggcctcctgcagactcttcgaaacccatagggccagatgatgctatagacgccttgtcatctgacttcacctgtgggtcgcctacagctgctggaaagaaaactgaaaaagaggaatctacagaagttttaaaagctcagtcagcagggacagtcagaagtgctgctccaccccaagagaagaaaagaaaggtggagaaggatacaatgagtgatcaagcactcgaggctctgtcggcttcactgggcacccggcaagcagaacctgagctcgacctccgctcaattaaggaagtcgatgaggcaaaagctaaagaagaaaaactagagaagtgtggtgaggatgatgaaacaatcccatctgagtacagattaaaaccagccacggataaagatggaaaaccactattgccagagcctgaagaaaaacccaagcctcggagtgaatcagaactcattgatgaactttcagaagattttgaccggtctgaatgtaaagagaaaccatctaagccaactgaaaagacagaagaatctaaggccgctgctccagctcctgtgtcggaggctgtgtgtcggacctccatgtgtagtatacagtcagcaccccctgagccggctaccttgaagggcacagtgccagatgatgctgtagaagccttggctgatagcctggggaaaaaggaagcagatccagaagatggaaaacctgtgatggataaagtcaaggagaaggccaaagaagaagaccgtgaaaagcttggtgaaaaagaagaaacaattcctcctgattatagattagaagaggtcaaggataaagatggaaagccactcctgccaaaagagtctaaggaacagcttccacccatgagtgaagacttccttctggatgctttgtctgaggacttctctggtccacaaaatgcttcatctcttaaatttgaagatgctaaacttgctgctgccatctctgaagtggtttcccaaaccccagcttcaacgacccaagctggagccccaccccgtgatacctcgcagagtgacaaagacctcgatgatgccttggataaactctctgacagtctaggacaaaggcagcctgacccagatgagaacaaaccaatggaagataaagtaaaggaaaaagctaaagctgaacatagagacaagcttggagaaagagatgacactatcccacctgaatacagacatctcctggatgataatggacaggacaaaccagtgaagccacctacaaagaaatcagaggattcaaagaaaccggcagatgaccnngaccccattgatgctcttactgcagaggaccaggctggatgagtagttgctcgcacttacatgaacaactcaaaaaagacaggagaaggatcaggtggtagagggctgcattccaaggattcgcagatagtgcacgtgacgaaatgggggtcatattccgaagaggttctgcaagcggacgaatcacaacagaggaaacttccaagccaaaagatgactaaagaaatacaagttaaggtatctggtatctgcatgtaaaatcttcagctggtggatggtgacttttgaagaacaaaaggctttggcaacagaaaacaattgttctgggtgatttctagaatggtttttgttgagtctctgaacatcctaaatattggtttgttattcttttccagaaagaaaatgaatttgactggttcacctgtgtactgagtattgataaactttgaatttttttaattgccttcaattgggagagaaagctttatatttgtaagaaatatatttgataaagtttcttaaagcaacaccaaaaaaacaaaagaaaagctaagtgaatttttgcacattctacacacagtgcctgtaaatctcatttgtattttcagtttgcccttaattttttttgttagtgtttagaaaacaatgttttaaacattcttcagtgttctgatttcttattaccccctttcctcttgggcttttgaactgtatttgatgttgctttgggataatgtttataagtcaaacataagatattgtacattgggcacatatctcctcttgggctgctaataataaattaataacaggtaacctggacaaaccaggaagcaccaaaccccttttcagtttgaactcttctttgccaggtgtgaggacttctgcatcttacagtcagcacagaacacactgagacttgaatcaagtcagcaacagagcaaaataaaggttagataagtccttgtgtagcaaatttcgagcataagaaataaaatctaattaattcttagggtactcatctgacttgaactctgttggtttactgtgttagtaaactgtgctttctattatctatacataaaacctgagcagcaactgtgtctttagagctattgccacattagcctttgcactgtatagcgtctggctttatggaacttaagtttaccaaatataaaaagaaacttctgcttttaaaaaaattatatatatatattaaatttgaaacctgcatttctcccacagcaatgtaagaagtaggctctgatgtcctaccactttgaatggttttctaatatcttaatgaatagttcctgaacattgcactgatatcatcgattagaattttgatatttaatttcatctttatttcctggtagagaatgcaggaaaagatgtcaggtacataacataaaacagattgggaatttattgtttccaaagggcatggccttccttagcatcagtttgaagcttttgttatgacttagctgacttgtggcagcggggcaagcaaaaacaataacactgcttataaatggcaccacatcttgttaacctcccccccaaatactctctgaaagtcatgcacatacctatgggattttacacaccaccagcttaaaatgctatgtctctatccatcagaaatagtcattattctatttttaaggcagcaacaagaaaagaaaaaacacttttcctgagggatttctaaccatgtatctaatcctcccatttgggcagtataggtgtttgcttttttgttttctttttttaagaaaaaccttgaaacctttgacactgacagatgtgtttgcaaggatacggctgcagtattactaatttccatgtgtatctggaagtatttttaaatggcataccaaaatccagaagtttaaagatgcctataaaagtaaacaacatttatttaaaaagaactctgaatatgccttcttttttaattagaaatatcttcgagacttgggtgtttgttaataactaataactggagtaagctacaggatctaaagcagccctttttacagtctagttaggagagagaaaataattgcaaatatccacttagaggcaaagaacaattttttattatcaaaaaggtttctgcacattgttgtggcaatattgtatctgtttagaaaatgggcttttccaaaagcaaacaaagataggttcctcaggtgaccaaaactgaaaatcaatatttccatgtttcattaatcaaggcataaaatacaattaaagcaaaatattttacattaaaatcttggttgtgtatttttttaaaagaagggaaatagtttagtttggggtggaaattaccagtgatttctatttttattaaaccattcactacaacaaataagtataaaaattccaattccacttttatacctatttatttgttgtagtgaatggtttaataaatggcagatttatgtccagaagtcactctattttgtcgtgtattaggggaacacattttgacatttttcgtaccaatcatcaatcatattcccttatcttgaagtttttgccttatattcaaaaagttcagtttgaattctcctttgccaggtgtgaggatttccgcaccttagagtcagcgcaaaacacgctgcaacttgaatcaagtcagcaacagagcacactatgggttagataagtccctgtgtagcaagttttcagaataagaaataaaatctaattcttagggtattaactgacttgacttgaactccgttggtttaccatgttagtaaactgtgctttctattattatcatctatacataaaacctgagcagcaactgtgtgctgaagcaaccgtgtgtgaagtcttcacaaaagaaagaaagacttcaaagccaaagaatgtcctatttgctaatatgagcaaatattttgtttcacaatgtactatcatttattggtgactgcaataatttactgtcagtaaatgccaataactagttagttagaaattgtaaagtaggccaaataagaagcagagagagaaaaaaaatcacctccctaagaaaagggttttc

SEQ ID NO: 424589 - DNA, 5365 bp, Homo sapiens
  misc_feature (2291)..(2292): n is a, c, g, or t
aggagcccgggtccctccgcgggcaggaaggggagggcccatcggggctaggggaaccccggcgcagacctggggtggggtcggaaaagctgtttcatcgcccgctcccgggccctccgctcctcctgcctccctccctctctccctggcaggactccccgccaggcctccccgccactctccgcggcgcattccgggaggcagcggccgcagcggcctcgccatgtcccagcccggccagaagcccgccgcctccccgcggccccggcgagcagccgccgcccgccgcacccatgagcatgtcagtgaaaaaaccagtgaatcgccttccaaaccaggagaaaagaaaggatcagatgagaaaaaagcagcaagcctcggcagcagtcaatcctccagaacctatgctggtggaacagcctcggccaccaaggtgtcagcttcctctggtgcaaccagcaagtcttccagtatgaatcccacagaaaccaaggctgtaaaaacagaacctgagaagaagtcacagtcaaccaagctgtctgtggttcatgagaaaaaatcccaagaaggaaagccaaaagaacacacagagccaaaaagcctacccaagcaggcatcagatacaggaagtaacgatgctcacaataaaaaagcagtttccagatcagctgaacagcagccatcagagaaatcaacagaaccaaagactaaaccacaagacatgatttctgctggtggagagagtgttgctggtatcactgcaatatctggcaagccgggtgacaagaaaaaagaaaagaaatcattaaccccagctgtgccagttgaatctaaaccggataaaccatcgggaaagtcaggcatggatgctgctttggatgacttaatagatactttaggaggacctgaagaaactgaagaagaaaatacaacgtatactggaccagaagtttcagatccaatgagttccacctacatagaggaattgggtaaaagagaagtcacaattcctccaaaatatagggaactattggctaaaaaggaagggatcacagggcctcctgcagactcttcgaaacccatagggccagatgatgctatagacgccttgtcatctgacttcacctgtgggtcgcctacagctgctggaaagaaaactgaaaaagaggaatctacagaagttttaaaagctcagtcagcagggacagtcagaagtgctgctccaccccaagagaagaaaagaaaggtggagaaggatacaatgagtgatcaagcactcgaggctctgtcggcttcactgggcacccggcaagcagaacctgagctcgacctccgctcaattaaggaagtcgatgaggcaaaagctaaagaagaaaaactagagaagtgtggtgaggatgatgaaacaatcccatctgagtacagattaaaaccagccacggataaagatggaaaaccactattgccagagcctgaagaaaaacccaagcctcggagtgaatcagaactcattgatgaactttcagaagattttgaccggtctgaatgtaaagagaaaccatctaagccaactgaaaagacagaagaatctaaggccgctgctccagctcctgtgtcggaggctgtgtgtcggacctccatgtgtagtatacagtcagcaccccctgagccggctaccttgaagggcacagtgccagatgatgctgtagaagccttggctgatagcctggggaaaaaggaagcagatccagaagatggaaaacctgtgatggataaagtcaaggagaaggccaaagaagaagaccgtgaaaagcttggtgaaaaagaagaaacaattcctcctgattatagattagaagaggtcaaggataaagatggaaagccactcctgccaaaagagtctaaggaacagcttccacccatgagtgaagacttccttctggatgctttgtctgaggacttctctggtccacaaaatgcttcatctcttcttcaacgacccaagctggagccccaccccgtgatacctcgcagagtgacaaagacctcgatgatgccttggataaactctctgacagtctaggacaaaggcagcctgacccagatgagaacaaaccaatggaagataaagtaaaggaaaaagctaaagctgaacatagagacaagcttggagaaagagatgacactatcccacctgaatacagacatctcctggatgataatggacaggacaaaccagtgaagccacctacaaagaaatcagaggattcaaagaaaccggcagatgaccnngaccccattgatgctcttactgcagaggaccaggctggatgagtagttgctcgcacttacatgaacaactcaaaaaagacaggagaaggatcaggtggtagagggctgcattccaaggattcgcagatagtgcacgtgacgaaatgggggtcatattccgaagaggttctgcaagcggacgaatcacaacagaggaaacttccaagccaaaagatgactaaagaaatacaagttaaggtatctggtatctgcatgtaaaatcttcagctggtggatggtgacttttgaagaacaaaaggctttggcaacagaaaacaattgttctgggtgatttctagaatggtttttgttgagtctctgaacatcctaaatattggtttgttattcttttccagaaagaaaatgaatttgactggttcacctgtgtactgagtattgataaactttgaatttttttaattgccttcaattgggagagaaagctttatatttgtaagaaatatatttgataaagtttcttaaagcaacaccaaaaaaacaaaagaaaagctaagtgaatttttgcacattctacacacagtgcctgtaaatctcatttgtattttcagtttgcccttaattttttttgttagtgtttagaaaacaatgttttaaacattcttcagtgttctgatttcttattaccccctttcctcttgggcttttgaactgtatttgatgttgctttgggataatgtttataagtcaaacataagatattgtacattgggcacatatctcctcttgggctgctaataataaattaataacaggtaacctggacaaaccaggaagcaccaaaccccttttcagtttgaactcttctttgccaggtgtgaggacttctgcatcttacagtcagcacagaacacactgagacttgaatcaagtcagcaacagagcaaaataaaggttagataagtccttgtgtagcaaatttcgagcataagaaataaaatctaattaattcttagggtactcatctgacttgaactctgttggtttactgtgttagtaaactgtgctttctattatctatacataaaacctgagcagcaactgtgtctttagagctattgccacattagcctttgcactgtatagcgtctggctttatggaacttaagtttaccaaatataaaaagaaacttctgcttttaaaaaaattatatatatatattaaatttgaaacctgcatttctcccacagcaatgtaagaagtaggctctgatgtcctaccactttgaatggttttctaatatcttaatgaatagttcctgaacattgcactgatatcatcgattagaattttgatatttaatttcatctttatttcctggtagagaatgcaggaaaagatgtcaggtacataacataaaacagattgggaatttattgtttccaaagggcatggccttccttagcatcagtttgaagcttttgttatgacttagctgacttgtggcagcggggcaagcaaaaacaataacactgcttataaatggcaccacatcttgttaacctcccccccaaatactctctgaaagtcatgcacatacctatgggattttacacaccaccagcttaaaatgctatgtctctatccatcagaaatagtcattattctatttttaaggcagcaacaagaaaagaaaaaacacttttcctgagggatttctaaccatgtatctaatcctcccatttgggcagtataggtgtttgcttttttgttttctttttttaagaaaaaccttgaaacctttgacactgacagatgtgtttgcaaggatacggctgcagtattactaatttccatgtgtatctggaagtatttttaaatggcataccaaaatccagaagtttaaagatgcctataaaagtaaacaacatttatttaaaaagaactctgaatatgccttcttttttaattagaaatatcttcgagacttgggtgtttgttaataactaataactggagtaagctacaggatctaaagcagccctttttacagtctagttaggagagagaaaataattgcaaatatccacttagaggcaaagaacaattttttattatcaaaaaggtttctgcacattgttgtggcaatattgtatctgtttagaaaatgggcttttccaaaagcaaacaaagataggttcctcaggtgaccaaaactgaaaatcaatatttccatgtttcattaatcaaggcataaaatacaattaaagcaaaatattttacattaaaatcttggttgtgtatttttttaaaagaagggaaatagtttagtttggggtggaaattaccagtgatttctatttttattaaaccattcactacaacaaataagtataaaaattccaattccacttttatacctatttatttgttgtagtgaatggtttaataaatggcagatttatgtccagaagtcactctattttgtcgtgtattaggggaacacattttgacatttttcgtaccaatcatcaatcatattcccttatcttgaagtttttgccttatattcaaaaagttcagtttgaattctcctttgccaggtgtgaggatttccgcaccttagagtcagcgcaaaacacgctgcaacttgaatcaagtcagcaacagagcacactatgggttagataagtccctgtgtagcaagttttcagaataagaaataaaatctaattcttagggtattaactgacttgacttgaactccgttggtttaccatgttagtaaactgtgctttctattattatcatctatacataaaacctgagcagcaactgtgtgctgaagcaaccgtgtgtgaagtcttcacaaaagaaagaaagacttcaaagccaaagaatgtcctatttgctaatatgagcaaatattttgtttcacaatgtactatcatttattggtgactgcaataatttactgtcagtaaatgccaataactagttagttagaaattgtaaagtaggccaaataagaagcagagagagaaaaaaaatcacctccctaagaaaagggttttc

SEQ ID NO: 424590 - DNA, 3283 bp, Homo sapiens
  misc_feature (74)..(74): n is a, c, g, or t
  misc_feature (79)..(79): n is a, c, g, or t
  misc_feature (86)..(86): n is a, c, g, or t
  misc_feature (91)..(91): n is a, c, g, or t
ctgctgccgtccctcttcagcaagaaaagtggtggtgggatggtaggcagtgtggacccatatgaaacaaaccnatggnagataangtaanggaaaaagctaaagctgaacatagagacaagcttggagaaagagatgacactatcccacctgaatacagacatctcctggatgataatggacaggacaaaccagtgaagccacctacaaagaaatcagaggattcaaagaaacctgcagatgaccaagaccccattgatgctctctcaggagatctggacagctgtccctccactacagaaacctcacagaacacagcaaaggataagtgcaagaaggctgcttccagctccaaagcacctaagaatggaggtaaagcgaaggattcagcaaagacaacagaggaaacttccaagccaaaagatgactaaagaaatacaagttaaggtatctggtatctgcatgtaaaatcttcagctggtggatggtgacttttgaagaacaaaaggctttggcaacagaaaacaattgttctgggtgatttctagaatggtttttgttgagtctctgaacatcctaaatattggtttgttattcttttccagaaagaaaatgaatttgactggttcacctgtgtactgagtattgataaactttgaatttttttaattgccttcaattgggagagaaagctttatatttgtaagaaatatatttgataaagtttcttaaagcaacaccaaaaaaacaaaagaaaagctaagtgaatttttgcacattctacacacagtgcctgtaaatctcatttgtattttcagtttgcccttaattttttttgttagtgtttagaaaacaatgttttaaacattcttcagtgttctgatttcttattaccccctttcctcttgggcttttgaactgtatttgatgttgctttgggataatgtttataagtcaaacataagatattgtacattgggcacatatctcctcttgggctgctaataataaattaataacaggtaacctggacaaaccaggaagcaccaaaccccttttcagtttgaactcttctttgccaggtgtgaggacttctgcatcttacagtcagcacagaacacactgagacttgaatcaagtcagcaacagagcaaaataaaggttagataagtccttgtgtagcaaatttcgagcataagaaataaaatctaattaattcttagggtactcatctgacttgaactctgttggtttactgtgttagtaaactgtgctttctattatctatacataaaacctgagcagcaactgtgtctttagagctattgccacattagcctttgcactgtatagcgtctggctttatggaacttaagtttaccaaatataaaaagaaacttctgcttttaaaaaaattatatatatatattaaatttgaaacctgcatttctcccacagcaatgtaagaagtaggctctgatgtcctaccactttgaatggttttctaatatcttaatgaatagttcctgaacattgcactgatatcatcgattagaattttgatatttaatttcatctttatttcctggtagagaatgcaggaaaagatgtcaggtacataacataaaacagattgggaatttattgtttccaaagggcatggccttccttagcatcagtttgaagcttttgttatgacttagctgacttgtggcagcggggcaagcaaaaacaataacactgcttataaatggcaccacatcttgttaacctcccccccaaatactctctgaaagtcatgcacatacctatgggattttacacaccaccagcttaaaatgctatgtctctatccatcagaaatagtcattattctatttttaaggcagcaacaagaaaagaaaaaacacttttcctgagggatttctaaccatgtatctaatcctcccatttgggcagtataggtgtttgcttttttgttttctttttttaagaaaaaccttgaaacctttgacactgacagatgtgtttgcaaggatacggctgcagtattactaatttccatgtgtatctggaagtatttttaaatggcataccaaaatccagaagtttaaagatgcctataaaagtaaacaacatttatttaaaaagaactctgaatatgccttcttttttaattagaaatatcttcgagacttgggtgtttgttaataactaataactggagtaagctacaggatctaaagcagccctttttacagtctagttaggagagagaaaataattgcaaatatccacttagaggcaaagaacaattttttattatcaaaaaggtttctgcacattgttgtggcaatattgtatctgtttagaaaatgggcttttccaaaagcaaacaaagataggttcctcaggtgaccaaaactgaaaatcaatatttccatgtttcattaatcaaggcataaaatacaattaaagcaaaatattttacattaaaatcttggttgtgtatttttttaaaagaagggaaatagtttagtttggggtggaaattaccagtgatttctatttttattaaaccattcactacaacaaataagtataaaaattccaattccacttttatacctatttatttgttgtagtgaatggtttaataaatggcagatttatgtccagaagtcactctattttgtcgtgtattaggggaacacattttgacatttttcgtaccaatcatcaatcatattcccttatcttgaagtttttgccttatattcaaaaagttcagtttgaattctcctttgccaggtgtgaggatttccgcaccttagagtcagcgcaaaacacgctgcaacttgaatcaagtcagcaacagagcacactatgggttagataagtccctgtgtagcaagttttcagaataagaaataaaatctaattcttagggtattaactgacttgacttgaactccgttggtttaccatgttagtaaactgtgctttctattattatcatctatacataaaacctgagcagcaactgtgtgctgaagcaaccgtgtgtgaagtcttcacaaaagaaagaaagacttcaaagccaaagaatgtcctatttgctaatatgagcaaatattttgtttcacaatgtactatcatttattggtgactgcaataatttactgtcagtaaatgccaataactagttagttagaaattgtaaagtaggccaaataagaagcagagagagaaaaaaaatcacctccctaagaaaagggttttc

SEQ ID NO: 424591 - DNA, 3106 bp, Homo sapiens
aggagcccgggtccctccgcgggcaggaaggggagggcccatcggggctaggggaaccccggcgcagacctggggtggggtcggaaaagctgtttcatcgcccgctcccgggccctccgctcctcctgcctccctccctctctccctggcaggactccccgccaggcctccccgccactctccgcggcgcattccgggaggcagcggccgcagcggcctcgccatgtcccagcccggccagaagcccgccgcctccccgcggccccggcgagcagccgccgcccgccgcacccatgagcatgtcagtgaaaaaaccagtgaatcgccttccaaaccaggagaaaagaaaggatcagatgagaaaaaagcagcaagcctcggcagcagtcaatcctccagaacctatgctggtggaacagcctcggccaccaaggtgtcagcttcctctggtgcaaccagcaagtcttccagtatgaatcccacagaaaccaaggctgtaaaaacagaacctgagaagaagtcacagtcaaccaagctgtctgtggttcatgagaaaaaatcccaagaaggaaagccaaaagaacacacagagccaaaaagcctacccaagcaggcatcagatacaggaagtaacgatgctcacaataaaaaagcagtttccagatcagctgaacagcagccatcagagaaatcaacagaaccaaagactaaaccacaagacatgatttctgctggtggagagagtgttgctggtatcactgcaatatctggcaagccgggtgacaagaaaaaagaaaagaaatcattaaccccagctgtgccagttgaatctaaaccggataaaccatcgggaaagtcaggcatggatgctgctttggatgacttaatagatactttaggaggacctgaagaaactgaagaagaaaatacaacgtatactggaccagaagtttcagatccaatgagttccacctacatagaggaattgggtaaaagagaagtcacaattcctccaaaatatagggaactattggctaaaaaggaagggatcacagggcctcctgcagactcttcgaaacccatagggccagatgatgctatagacgccttgtcatctgacttcacctgtgggtcgcctacagctgctggaaagaaaactgaaaaagaggaatctacagaagttttaaaagctcagtcagcagggacagtcagaagtgctgctccaccccaagagaagaaaagaaaggtggagaaggatacaatgagtgatcaagcactcgaggctctgtcggcttcactgggcacccggcaagcagaacctgagctcgacctccgctcaattaaggaagtcgatgaggcaaaagctaaagaagaaaaactagagaagtgtggtgaggatgatgaaacaatcccatctgagtacagattaaaaccagccacggataaagatggaaaaccactattgccagagcctgaagaaaaacccaagcctcggagtgaatcagaactcattgatgaactttcagaagattttgaccggtctgaatgtaaagagaaaccatctaagccaactgaaaagacagaagaatctaaggccgctgctccagctcctgtgtcggaggctgtgtgtcggacctccatgtgtagtatacagtcagcaccccctgagccggctaccttgaagggcacagtgccagatgatgctgtagaagccttggctgatagcctggggaaaaaggaagcagatccagaagatggaaaacctgtgatggataaagtcaaggagaaggccaaagaagaagaccgtgaaaagcttggtgaaaaagaagaaacaattcctcctgattatagattagaagaggtcaaggataaagatggaaagccactcctgccaaaagagtctaaggaacagcttccacccatgagtgaagacttccttctggatgctttgtctgaggacttctctggtccacaaaatgcttcatctcttaaatttgaagatgctaaacttgctgctgccatctctgaagtggtttcccaaaccccagcttcaacgacccaagctggagccccaccccgtgatacctcgcagagtgacaaagacctcgatgatgccttggataaactctctgacagtctaggacaaaggcagcctgacccagatgagaacaaaccaatggaagataaagtaaaggaaaaagctaaagctgaacatagagacaagcttggagaaagagatgacactatcccacctgaatacagacatctcctggatgataatggacaggacaaaccagtgaagccacctacaaagaaatcagaggattcaaagaaacctgcagatgaccaagaccccattgatgctctctcaggagatctggacagctgtccctccactacagaaacctcacagaacacagcaaaggataagtgcaagaaggctgcttccagctccaaagcacctaagaatggaggtaaagcgaaggattcagcaaagacaacagaggaaacttccaagccaaaagatgactaaagaaatacaagttaaggtatctggtatctgcatgtaaaatcttcagctggtggatggtgacttttgaagaacaaaaggctttggcaacagaaaacaattgttctgggtgatttctagaatggtttttgttgagtctctgaacatcctaaatattggtttgttattcttttccagaaagaaaatgaatttgactggttcacctgtgtactgagtattgataaactttgaatttttttaattgccttcaattgggagagaaagctttatatttgtgtgaggacttctgcatcttacagtcagcacagaacacactgagacttgaatcaagtcagcaacagagcaaaataaagatgcaaacttcgttttttaaaaacatgatatctaaaaagcagaatgtgcagagtcttttctttgccaagcaaaacagtttccaccacatgtgtgctgacttgcagtatgttcccagcaggataggcaattcctggccaagaaaacaaaaatagatgccagaatgatctaatctaatctaatttcccttggccacatgaacatgaatgaatgacggactcacca

SEQ ID NO: 424592 - DNA, 3218 bp, Homo sapiens
tataagagaaacagcgcctggggtgaccgtgcgtactgaatagatccagatggtgttctgatgtcatcttagagttatcgtatcttacatcacgtgaggtccatagctgagactcggatatcaacattagccgcgccgcctatgaagaaatcagaggattcaaagaaacctgcagatgaccaagaccccattgatgctctctcaggagatctggacagctgtccctccactacagaaacctcacagaacacagcaaaggataagtgcaagaaggctgcttccagctccaaagcacctaagaatggaggtaaagcgaaggattcagcaaagacaacagaggaaacttccaagccaaaagatgactaaagaaatacaagttaaggtatctggtatctgcatgtaaaatcttcagctggtggatggtgacttttgaagaacaaaaggctttggcaacagaaaacaattgttctgggtgatttctagaatggtttttgttgagtctctgaacatcctaaatattggtttgttattcttttccagaaagaaaatgaatttgactggttcacctgtgtactgagtattgataaactttgaatttttttaattgccttcaattgggagagaaagctttatatttgtaagaaatatatttgataaagtttcttaaagcaacaccaaaaaaacaaaagaaaagctaagtgaatttttgcacattctacacacagtgcctgtaaatctcatttgtattttcagtttgcccttaattttttttgttagtgtttagaaaacaatgttttaaacattcttcagtgttctgatttcttattaccccctttcctcttgggcttttgaactgtatttgatgttgctttgggataatgtttataagtcaaacataagatattgtacattgggcacatatctcctcttgggctgctaataataaattaataacaggtaacctggacaaaccaggaagcaccaaaccccttttcagtttgaactcttctttgccaggtgtgaggacttctgcatcttacagtcagcacagaacacactgagacttgaatcaagtcagcaacagagcaaaataaaggttagataagtccttgtgtagcaaatttcgagcataagaaataaaatctaattaattcttagggtactcatctgacttgaactctgttggtttactgtgttagtaaactgtgctttctattatctatacataaaacctgagcagcaactgtgtctttagagctattgccacattagcctttgcactgtatagcgtctggctttatggaacttaagtttaccaaatataaaaagaaacttctgcttttaaaaaaattatatatatatattaaatttgaaacctgcatttctcccacagcaatgtaagaagtaggctctgatgtcctaccactttgaatggttttctaatatcttaatgaatagttcctgaacattgcactgatatcatcgattagaattttgatatttaatttcatctttatttcctggtagagaatgcaggaaaagatgtcaggtacataacataaaacagattgggaatttattgtttccaaagggcatggccttccttagcatcagtttgaagcttttgttatgacttagctgacttgtggcagcggggcaagcaaaaacaataacactgcttataaatggcaccacatcttgttaacctcccccccaaatactctctgaaagtcatgcacatacctatgggattttacacaccaccagcttaaaatgctatgtctctatccatcagaaatagtcattattctatttttaaggcagcaacaagaaaagaaaaaacacttttcctgagggatttctaaccatgtatctaatcctcccatttgggcagtataggtgtttgcttttttgttttctttttttaagaaaaaccttgaaacctttgacactgacagatgtgtttgcaaggatacggctgcagtattactaatttccatgtgtatctggaagtatttttaaatggcataccaaaatccagaagtttaaagatgcctataaaagtaaacaacatttatttaaaaagaactctgaatatgccttcttttttaattagaaatatcttcgagacttgggtgtttgttaataactaataactggagtaagctacaggatctaaagcagccctttttacagtctagttaggagagagaaaataattgcaaatatccacttagaggcaaagaacaattttttattatcaaaaaggtttctgcacattgttgtggcaatattgtatctgtttagaaaatgggcttttccaaaagcaaacaaagataggttcctcaggtgaccaaaactgaaaatcaatatttccatgtttcattaatcaaggcataaaatacaattaaagcaaaatattttacattaaaatcttggttgtgtatttttttaaaagaagggaaatagtttagtttggggtggaaattaccagtgatttctatttttattaaaccattcactacaacaaataagtataaaaattccaattccacttttatacctatttatttgttgtagtgaatggtttaataaatggcagatttatgtccagaagtcactctattttgtcgtgtattaggggaacacattttgacatttttcgtaccaatcatcaatcatattcccttatcttgaagtttttgccttatattcaaaaagttcagtttgaattctcctttgccaggtgtgaggatttccgcaccttagagtcagcgcaaaacacgctgcaacttgaatcaagtcagcaacagagcacactatgggttagataagtccctgtgtagcaagttttcagaataagaaataaaatctaattcttagggtattaactgacttgacttgaactccgttggtttaccatgttagtaaactgtgctttctattattatcatctatacataaaacctgagcagcaactgtgtgctgaagcaaccgtgtgtgaagtcttcacaaaagaaagaaagacttcaaagccaaagaatgtcctatttgctaatatgagcaaatattttgtttcacaatgtactatcatttattggtgactgcaataatttactgtcagtaaatgccaataactagttagttagaaattgtaaagtaggccaaataagaagcagagagagaaaaaaaatcacctccctaagaaaagggttttc

SEQ ID NO: 424593 - DNA, 2770 bp, Homo sapiens
aggagcccgggtccctccgcgggcaggaaggggagggcccatcggggctaggggaaccccggcgcagacctggggtggggtcggaaaagctgtttcatcgcccgctcccgggccctccgctcctcctgcctccctccctctctccctggcaggactccccgccaggcctccccgccactctccgcggcgcattccgggaggcagcggccgcagcggcctcgccatgtcccagcccggccagaagcccgccgcctccccgcggccccggcgagcagccgccgcccgccgcacccatgagcatgtcagtgaaaaaaccagtgaatcgccttccaaaccaggagaaaagaaaggatcagatgagaaaaaagcagcaagcctcggcagcagtcaatcctccagaacctatgctggtggaacagcctcggccaccaaggtgtcagcttcctctggtgcaaccagcaagtcttccagtatgaatcccacagaaaccaaggctgtaaaaacagaacctgagaagaagtcacagtcaaccaagctgtctgtggttcatgagaaaaaatcccaagaaggaaagccaaaagaacacacagagccaaaaagcctacccaagcaggcatcagatacaggaagtaacgatgctcacaataaaaaagcagtttccagatcagctgaacagcagccatcagagaaatcaacagaaccaaagactaaaccacaagacatgatttctgctggtggagagagtgttgctggtatcactgcaatatctggcaagccgggtgacaagaaaaaagaaaagaaatcattaaccccagctgtgccagttgaatctaaaccggataaaccatcgggaaagtcaggcatggatgctgctttggatgacttaatagatactttaggaggacctgaagaaactgaagaagaaaatacaacgtatactggaccagaagtttcagatccaatgagttccacctacatagaggaattgggtaaaagagaagtcacaattcctccaaaatatagggaactattggctaaaaaggaagggatcacagggcctcctgcagactcttcgaaacccatagggccagatgatgctatagacgccttgtcatctgacttcacctgtgggtcgcctacagctgctggaaagaaaactgaaaaagaggaatctacagaagttttaaaagctcagtcagcagggacagtcagaagtgctgctccaccccaagagaagaaaagaaaggtggagaaggatacaatgagtgatcaagcactcgaggctctgtcggcttcactgggcacccggcaagcagaacctgagctcgacctccgctcaattaaggaagtcgatgaggcaaaagctaaagaagaaaaactagagaagtgtggtgaggatgatgaaacaatcccatctgagtacagattaaaaccagccacggataaagatggaaaaccactattgccagagcctgaagaaaaacccaagcctcggagtgaatcagaactcattgatgaactttcagaagattttgaccggtctgaatgtaaagagaaaccatctaagccaactgaaaagacagaagaatctaaggccgctgctccagctcctgtgtcggaggctgtgtgtcggacctccatgtgtagtatacagtcagcaccccctgagccggctaccttgaagggcacagtgccagatgatgctgtagaagccttggctgatagcctggggaaaaaggaagcagatccagaagatggaaaacctgtgatggataaagtcaaggagaaggccaaagaagaagaccgtgaaaagcttggtgaaaaagaagaaacaattcctcctgattatagattagaagaggtcaaggataaagatggaaagccactcctgccaaaagagtctaaggaacagcttccacccatgagtgaagacttccttctggatgctttgtctgaggacttctctggtccacaaaatgcttcatctcttaaatttgaagatgctaaacttgctgctgccatctctgaagtggtttcccaaaccccagcttcaacgacccaagctggagccccaccccgtgatacctcgcagagtgacaaagacctcgatgatgccttggataaactctctgacagtctaggacaaaggcagcctgacccagatgagaacaaaccaatggaagataaagtaaaggaaaaagctaaagctgaacatagagacaagcttggagaaagagatgacactatcccacctgaatacagacatctcctggatgataatggacaggacaaaccagtgaagccacctacaaagaaatcagaggattcaaagaaacctgcagatgaccaagaccccattgatgctctctcaggagatctggacagctgtccctccactacagaaacctcacagaacacagcaaaggataagtgcaagaaggctgcttccagctccaaagcacctaagaatggaggtaaagcgaaggattcagcaaagacaacagaggaaacttccaagccaaaagatgactaaagaaatacaagttaaggtatctggtatctgcatgtaaaatcttcagctggtggatggtgacttttgaagaacaaaaggctttggcaacagaaaacaattgttctgggtgatttctagaatggtttttgttgagtctctgaacatcctaaatattggtttgttattcttttccagaaagaaaatgaatttgactggttcacctacgtctaggtcggggagcctctagtgtcgaccgct

SEQ ID NO: 424594 - DNA, 2802 bp, Homo sapiens
  misc_feature (2769)..(2769): n is a, c, g, or t
aggagcccgggtccctccgcgggcaggaaggggagggcccatcggggctaggggaaccccggcgcagacctggggtggggtcggaaaagctgtttcatcgcccgctcccgggccctccgctcctcctgcctccctccctctctccctggcaggactccccgccaggcctccccgccactctccgcggcgcattccgggaggcagcggccgcagcggcctcgccatgtcccagcccggccagaagcccgccgcctccccgcggccccggcgagcagccgccgcccgccgcacccatgagcatgtcagtgaaaaaaccagtgaatcgccttccaaaccaggagaaaagaaaggatcagatgagaaaaaagcagcaagcctcggcagcagtcaatcctccagaacctatgctggtggaacagcctcggccaccaaggtgtcagcttcctctggtgcaaccagcaagtcttccagtatgaatcccacagaaaccaaggctgtaaaaacagaacctgagaagaagtcacagtcaaccaagctgtctgtggttcatgagaaaaaatcccaagaaggaaagccaaaagaacacacagagccaaaaagcctacccaagcaggcatcagatacaggaagtaacgatgctcacaataaaaaagcagtttccagatcagctgaacagcagccatcagagaaatcaacagaaccaaagactaaaccacaagacatgatttctgctggtggagagagtgttgctggtatcactgcaatatctggcaagccgggtgacaagaaaaaagaaaagaaatcattaaccccagctgtgccagttgaatctaaaccggataaaccatcgggaaagtcaggcatggatgctgctttggatgacttaatagatactttaggaggacctgaagaaactgaagaagaaaatacaacgtatactggaccagaagtttcagatccaatgagttccacctacatagaggaattgggtaaaagagaagtcacaattcctccaaaatatagggaactattggctaaaaaggaagggatcacagggcctcctgcagactcttcgaaacccatagggccagatgatgctatagacgccttgtcatctgacttcacctgtgggtcgcctacagctgctggaaagaaaactgaaaaagaggaatctacagaagttttaaaagctcagtcagcagggacagtcagaagtgctgctccaccccaagagaagaaaagaaaggtggagaaggatacaatgagtgatcaagcactcgaggctctgtcggcttcactgggcacccggcaagcagaacctgagctcgacctccgctcaattaaggaagtcgatgaggcaaaagctaaagaagaaaaactagagaagtgtggtgaggatgatgaaacaatcccatctgagtacagattaaaaccagccacggataaagatggaaaaccactattgccagagcctgaagaaaaacccaagcctcggagtgaatcagaactcattgatgaactttcagaagattttgaccggtctgaatgtaaagagaaaccatctaagccaactgaaaagacagaagaatctaaggccgctgctccagctcctgtgtcggaggctgtgtgtcggacctccatgtgtagtatacagtcagcaccccctgagccggctaccttgaagggcacagtgccagatgatgctgtagaagccttggctgatagcctggggaaaaaggaagcagatccagaagatggaaaacctgtgatggataaagtcaaggagaaggccaaagaagaagaccgtgaaaagcttggtgaaaaagaagaaacaattcctcctgattatagattagaagaggtcaaggataaagatggaaagccactcctgccaaaagagtctaaggaacagcttccacccatgagtgaagacttccttctggatgctttgtctgaggacttctctggtccacaaaatgcttcatctcttaaatttgaagatgctaaacttgctgctgccatctctgaagtggtttcccaaaccccagcttcaacgacccaagctggagccccaccccgtgatacctcgcagagtgacaaagacctcgatgatgccttggataaactctctgacagtctaggacaaaggcagcctgacccagatgagaacaaaccaatggaagataaagtaaaggaaaaagctaaagctgaacatagagacaagcttggagaaagagatgacactatcccacctgaatacagacatctcctggatgataatggacaggacaaaccagtgaagccacctacaaagaaatcagaggattcaaagaaacctgcagatgaccaagaccccattgatgctctctcaggagatctggacagctgtccctccactacagaaacctcacagaacacagcaaaggataagtgcaagaaggctgcttccagctccaaagcacctaagaatggaggtaaagcgaaggattcagcaaagacaacagaggaaacttccaagccaaaagatgactaaagaaatacaagttaaggtatctggtatctgcatgtaaaatcttcagctggtggatggtgacttttgaagaacaaaaggctttggcaacagaaaacaattgttctgggtgatttctagaatggtttttgttgagtctctgaacatcctaaatattggtttgttattcttttccagaaagaaaatgaatttgactggttcaccaaaaaaaaaaaaaaaaaaaaaaaaaaaaaaaaaanaaaaacaaaaaaaaaaaaaaaaaaaagaacaaa

SEQ ID NO: 424595 - DNA, 1812 bp, Homo sapiens
aggagcccgggtccctccgcgggcaggaaggggagggcccatcggggctaggggaaccccggcgcagacctggggtggggtcggaaaagctgtttcatcgcccgctcccgggccctccgctcctcctgcctccctccctctctccctggcaggactccccgccaggcctccccgccactctccgcggcgcattccgggaggcagcggccgcagcggcctcgccatgtcccagcccggccagaagcccgccgcctccccgcggccccggcgagcagccgccgcccgccgcacccatgagcatgtcagtgaaaaaaccagtgaatcgccttccaaaccaggagaaaagaaaggatcagatgagaaaaaagcagcaagcctcggcagcagtcaatcctccagaacctatgctggtggaacagcctcggccaccaaggtgtcagcttcctctggtgcaaccagcaagtcttccagtatgaatcccacagaaaccaaggctgtaaaaacagaacctgagaagaagtcacagtcaaccaagctgtctgtggttcatgagaaaaaatcccaagaaggaaagccaaaagaacacacagagccaaaaagcctacccaagcaggcatcagatacaggaagtaacgatgctcacaataaaaaagcagtttccagatcagctgaacagcagccatcagagaaatcaacagaaccaaagactaaaccacaagacatgatttctgctggtggagagagtgttgctggtatcactgcaatatctggcaagccgggtgacaagaaaaaagaaaagaaatcattaaccccagctgtgccagttgaatctaaaccggataaaccatcgggaaagtcaggcatggatgctgctttggatgacttaatagatactttaggaggacctgaagaaactgaagaagaaaatacaacgtatactggaccagaagtttcagatccaatgagttccacctacatagaggaattgggtaaaagagaagtcacaattcctccaaaatatagggaactattggctaaaaaggaagggatcacagggcctcctgcagactcttcgaaacccatagggccagatgatgctatagacgccttgtcatctgacttcacctgtgggtcgcctacagctgctggaaagaaaactgaaaaagaggaatctacagaagttttaaaagctcagtcagcagggacagtcagaagtgctgctccaccccaagagaagaaaagaaaggtggagaaggatacaatgagtgatcaagcactcgaggctctgtcggcttcactgggcacccggcaagcagaacctgagctcgacctccgctcaattaaggaagtcgatgaggcaaaagctaaagaagaaaaactagagaagtgtggtgaggatgatgaaacaatcccatctgagtacagattaaaaccagccacggataaagatggaaaaccactattgccagagcctgaagaaaaacccaagcctcggagtgaatcagaactcattgatgaactttcagaagattttgaccggtctgaatgtaaagagaaaccatctaagccaactgaaaagacagaagaatctaaggccgctgctccagctcctgtgtcggaggctgtgtgtcggacctccatgtgtagtatacagtcagcaccccctgagccggctaccttggtgagtgactccctgggcatttgagcagtggcttgagaaagttttctgcctcctcctgtcactctctgctgtgtattaccatcattttatcttatcctgacaaattaaaaataaaatctgatatcattata

SEQ ID NO: 424596 - DNA, 1688 bp, Homo sapiens
aggagcccgggtccctccgcgggcaggaaggggagggcccatcggggctaggggaaccccggcgcagacctggggtggggtcggaaaagctgtttcatcgcccgctcccgggccctccgctcctcctgcctccctccctctctccctggcaggactccccgccaggcctccccgccactctccgcggcgcattccgggaggcagcggccgcagcggcctcgccatgtcccagcccggccagaagcccgccgcctccccgcggccccggcgagcagccgccgcccgccgcacccatgagcatgtcagtgaaaaaaccagtgaatcgccttccaaaccaggagaaaagaaaggatcagatgagaaaaaagcagcaagcctcggcagcagtcaatcctccagaacctatgctggtggaacagcctcggccaccaaggtgtcagcttcctctggtgcaaccagcaagtcttccagtatgaatcccacagaaaccaaggctgtaaaaacagaacctgagaagaagtcacagtcaaccaagctgtctgtggttcatgagaaaaaatcccaagaaggaaagccaaaagaacacacagagccaaaaagcctacccaagcaggcatcagatacaggaagtaacgatgctcacaataaaaaagcagtttccagatcagctgaacagcagccatcagagaaatcaacagaaccaaagactaaaccacaagacatgatttctgctggtggagagagtgttgctggtatcactgcaatatctggcaagccgggtgacaagaaaaaagaaaagaaatcattaaccccagctgtgccagttgaatctaaaccggataaaccatcgggaaagtcaggcatggatgctgctttggatgacttaatagatactttaggaggacctgaagaaactgaagaagaaaatacaacgtatactggaccagaagtttcagatccaatgagttccacctacatagaggaattgggtaaaagagaagtcacaattcctccaaaatatagggaactattggctaaaaaggaagggatcacagggcctcctgcagactcttcgaaacccatagggccagatgatgctatagacgccttgtcatctgacttcacctgtgggtcgcctacagctgctggaaagaaaactgaaaaagaggaatctacagaagttttaaaagctcagtcagcagggacagtcagaagtgctgctccaccccaagagaagaaaagaaaggtggagaaggatacaatgagtgatcaagcactcgaggctctgtcggcttcactgggcacccggcaagcagaacctgagctcgacctccgctcaattaaggaagtcgatgaggcaaaagctaaagaagaaaaactagagaagtgtggtgaggatgatgaaacaatcccatctgagtacagattaaaaccagccacggataaagatggaaaaccactattgccagagcctgaagaaaaacccaagcctcggagtgaatcagaactcattgatgaactttcagaagattttgaccggtctgaatgtaaagagaaaccatctaagccaactgaaaagacagaagtatgtttctaaacatataaatctctagttttgaggtttgtgatcttaaaaaaaaattgtgagacagactgttttagcatcaagcagtctgttagaaagccca

SEQ ID NO: 424597 - DNA, 1357 bp, Homo sapiens
aggagcccgggtccctccgcgggcaggaaggggagggcccatcggggctaggggaaccccggcgcagacctggggtggggtcggaaaagctgtttcatcgcccgctcccgggccctccgctcctcctgcctccctccctctctccctggcaggactccccgccaggcctccccgccactctccgcggcgcattccgggaggcagcggccgcagcggcctcgccatgtcccagcccggccagaagcccgccgcctccccgcggccccggcgagcagccgccgcccgccgcacccatgagcatgtcagtgaaaaaaccagtgaatcgccttccaaaccaggagaaaagaaaggatcagatgagaaaaaagcagcaagcctcggcagcagtcaatcctccagaacctatgctggtggaacagcctcggccaccaaggtgtcagcttcctctggtgcaaccagcaagtcttccagtatgaatcccacagaaaccaaggctgtaaaaacagaacctgagaagaagtcacagtcaaccaagctgtctgtggttcatgagaaaaaatcccaagaaggaaagccaaaagaacacacagagccaaaaagcctacccaagcaggcatcagatacaggaagtaacgatgctcacaataaaaaagcagtttccagatcagctgaacagcagccatcagagaaatcaacagaaccaaagactaaaccacaagacatgatttctgctggtggagagagtgttgctggtatcactgcaatatctggcaagccgggtgacaagaaaaaagaaaagaaatcattaaccccagctgtgccagttgaatctaaaccggataaaccatcgggaaagtcaggcatggatgctgctttggatgacttaatagatactttaggaggacctgaagaaactgaagaagaaaatacaacgtatactggaccagaagtttcagatccaatgagttccacctacatagaggaattgggtaaaagagaagtcacaattcctccaaaatatagggaactattggctaaaaaggaagggatcacagggcctcctgcagactcttcgaaacccatagggccagatgatgctatagacgccttgtcatctgacttcacctgtgggtcgcctacagctgctggaaagaaaactgaaaaagaggaatctacagaagttttaaaagctcagtcagcagggacagtcagaagtgctgctccaccccaagagaagaaaagaaaggtggagaaggatacaatgagtgatcaagcactcgaggctctgtcggcttcactgggcacccggcaagcagaacctgagctcgacctccgctcaattaaggaagtcgatgag

SEQ ID NO: 424598 - DNA, 419 bp, Homo sapiens
gcggccgcagcggcctcgccatgtcccagcccggccagaagcccgccgcctccccgcggccccggcgagcagccgccgcccgccgcacccatgaggtgagtggcgctcctgtcggcgtcgcggggctgggcgatggggtaccgggtcccggagctgtggccgccctccctgggcgttgccaggctggcgggtctgcagtccccggcgcccccgcggggcagggagagggctaggggcttggccgctgccaggcaggtggctgcaggtggcttcggttccccggccgggtccagtgcgctgggcgtggcgttggccgggtagagtggagggggggacgcgtcaagaaaagttggctggtaagacgtgggtgaatgaggatgaggatgaacggggaatgaggttcactcaggacccccgag

SEQ ID NO: 424599 - DNA, 363 bp, Homo sapiens
agtgggagttcctacaacgatcagccattgtgccttgagagaagaaggcagcaggggccacttcaagcttccctgcttcctaagcttaggttgtcagaagcctttttagagatacatttttagaaaaagaaaaatagtgtggtaacagtttactacttgcttctttttttttgtttgtttagagtattttatagtaatattactatagctttatgtctagcttaccaaataaggggtgaagtgtgccccagagaacgctgttactgtagaaacgtgtcttagccccaatttccactcattggtaagttctttttcctttctctcttttgcaaggtttcaaataaaattgcctttctagagcac

SEQ ID NO: 424600 - DNA, 380 bp, Homo sapiens
gctatattaggtagaactgctctaacatttttcccaaaattaaaaaaaattctattaatccactttcatgtttacttataggaaattccttctgtctgttatacaatgcttttgctaagtggtatatttactatgtctgtaacaagaaaattacatattaaatgattcactgcattttttatttgaaatttttaaggtatctgcatgtaaaatcttcagctggtggatggtgacttttgaagaacaaaaggctttggcaacagaaaacaattgttctgggtgatttctagaatggtttttgttgagtctctgaacatcctaaatattggtttgttattcttttccagaaagaaaatgaatttgactggttcacctgtgta

SEQ ID NO: 424601 - DNA, 519 bp, Homo sapiens
gagccccaccccgtgatacctcggtaagcagcacatcttatttgggagataaatgtttttgcgcagccacaactagaaagaaaatagggcgcctgtttaaagcaaatgaaaataggcagaattattaggaagatcaggcaccttctatttcagaagagccgagactgatgatttagcgagatggcagagattaactttgaaatgattaaatgaaactatatatgtgaaaacattgtacacatagtcaaggaccttaatattattgttgctttataagaattgaaagtgcaataaagtgcattgtgtctatattcaaattactagatttgaaaagttctttagctttcctgataattgattttctcctttatattttttcttatacattctataatttactacccattatttaacctcaagtttattttatggaatcgtcatgtttgagcttttacaaacattttacaaacgtcatggaatagcattgttttcttcccaattcacaccagtaaaaatttg

SEQ ID NO: 424602 - DNA, 3271 bp, Homo sapiens
aggagcccgggtccctccgcgggcaggaaggggagggcccatcggggctaggggaaccccggcgcagacctggggtggggtcggaaaagctgtttcatcgcccgctcccgggccctccgctcctcctgcctccctccctctctccctggcaggactccccgccaggcctccccgccactctccgcggcgcattccgggaggcagcggccgcagcggcctcgccatgtcccagcccggccagaagcccgccgcctccccgcggccccggcgagcagccgccgcccgccgcacccatgagcatgtcagtgaaaaaaccagtgaatcgccttccaaaccaggagaaaagaaaggatcagatgagaaaaaagcagcaagcctcggcagcagtcaatcctccagaacctatgctggtggaacagcctcggccaccaaggtgtcagcttcctctggtgcaaccagcaagtcttccagtatgaatcccacagaaaccaaggctgtaaaaacagaacctgagaagaagtcacagtcaaccaagccaaaaagcctacccaagcaggcatcagatacaggaagtaacgatgctcacaataaaaaagcagtttccagatcagctgaacagcagccatcagagaaatcaacagaaccaaagactaaaccacaagacatgatttctgctggtggagagagtgttgctggtatcactgcaatatctggcaagccgggtgacaagaaaaaagaaaagaaatcattaaccccagctgtgccagttgaatctaaaccggataaaccatcgggaaagtcaggcatggatgctgctttggatgacttaatagatactttaggaggacctgaagaaactgaagaagaaaatacaacgtatactggaccagaagtttcagatccaatgagttccacctacatagaggaattgggtaaaagagaagtcacaattcctccaaaatatagggaactattggctaaaaaggaagggatcacagggcctcctgcagactcttcgaaacccatagggccagatgatgctatagacgccttgtcatctgacttcacctgtgggtcgcctacagctgctggaaagaaaactgaaaaagaggaatctacagaagttttaaaagctcagtcagcagggacagtcagaagtgctgctccaccccaagagaagaaaagaaaggtggagaaggatacaatgagtgatcaagcactcgaggctctgtcggcttcactgggcacccggcaagcagaacctgagctcgacctccgctcaattaaggaagtcgatgaggcaaaagctaaagaagaaaaactagagaagtgtggtgaggatgatgaaacaatcccatctgagtacagattaaaaccagccacggataaagatggaaaaccactattgccagagcctgaagaaaaacccaagcctcggagtgaatcagaactcattgatgaactttcagaagattttgaccggtctgaatgtaaagagaaaccatctaagccaactgaaaagacagaagaatctaaggccgctgctccagctcctgtgtcggaggctgtgtgtcggacctccatgtgtagtatacagtcagcaccccctgagccggctaccttgaagggcacagtgccagatgatgctgtagaagccttggctgatagcctggggaaaaaggaagcagatccagaagatggaaaacctgtgatggataaagtcaaggagaaggccaaagaagaagaccgtgaaaagcttggtgaaaaagaagaaacaattcctcctgattatagattagaagaggtcaaggataaagatggaaagccactcctgccaaaagagtctaaggaacagcttccacccatgagtgaagacttccttctggatgctttgtctgaggacttctctggtccacaaaatgcttcatctcttaaatttgaagatgctaaacttgctgctgccatctctgaagtggtttcccaaaccccagcttcaacgacccaagctggagccccaccccgtgatacctcgcagagtgacaaagacctcgatgatgccttggataaactctctgacagtctaggacaaaggcagcctgacccagatgagaacaaaccaatggaagataaagtaaaggaaaaagctaaagctgaacatagagacaagcttggagaaagagatgacactatcccacctgaatacagacatctcctggatgataatggacaggacaaaccagtgaagccacctacaaagaaatcagaggattcaaagaaacctgcagatgaccaagaccccattgatgctctctcaggagatctggacagctgtccctccactacagaaacctcacagaacacagcaaaggataagtgcaagaaggctgcttccagctccaaagcacctaagaatggaggtaaagcgaaggattcagcaaagacaacagaggaaacttccaagccaaaagatgactaaagaaatacaagttaaggtatctggtatctgcatgtaaaatcttcagctggtggatggtgacttttgaagaacaaaaggctttggcaacagaaaacaattgttctgggtgatttctagaatggtttttgttgagtctctgaacatcctaaatattggtttgttattcttttccagaaagaaaatgaatttgactggttcacctgtgtactgagtattgataaactttgaatttttttaattgccttcaattgggagagaaagctttatatttgtaagaaatatatttgataaagtttcttaaagcaacaccaaaaaaacaaaagaaaagctaagtgaatttttgcacattctacacacagtgcctgtaaatctcatttgtattttcagtttgcccttaattttttttgttagtgtttagaaaacaatgttttaaacattcttcagtgttctgatttcttattaccccctttcctcttgggcttttgaactgtatttgatgttgctttgggataatgtttataagtcaaacataagatattgtacattgggcacatatctcctcttgggctgctaataataaattaataacaggtaacctggacaaaccaggaagcaccaaaccccttttcagtttgaactcttctttgccaggtgtgaggacttctgcatcttacagtcagcacagaacacactgagacttgaatcaagtcagcaacagagcaaaataaaggttagataagtccttgtgtagcaaatttcgagcataagaaataaaatctaattaattcttagggt

SEQ ID NO: 424603 - DNA, 6427 bp, Homo sapiens
aggagcccgggtccctccgcgggcaggaaggggagggcccatcggggctaggggaaccccggcgcagacctggggtggggtcggaaaagctgtttcatcgcccgctcccgggccctccgctcctcctgcctccctccctctctccctggcaggactccccgccaggcctccccgccactctccgcggcgcattccgggaggcagcggccgcagcggcctcgccatgtcccagcccggccagaagcccgccgcctccccgcggccccggcgagcagccgccgcccgccgcacccatgagcatgtcagtgaaaaaaccagtgaatcgccttccaaaccaggagaaaagaaaggatcagatgagaaaaaagcagcaagcctcggcagcagtcaatcctccagaacctatgctggtggaacagcctcggccaccaaggtgtcagcttcctctggtgcaaccagcaagtcttccagtatgaatcccacagaaaccaaggctgtaaaaacagaacctgagaagaagtcacagtcaaccaagctgtctgtggttcatgagaaaaaatcccaagaaggaaagccaaaagaacacacagagccaaaaagcctacccaagcaggcatcagatacaggaagtaacgatgctcacaataaaaaagcagtttccagatcagctgaacagcagccatcagagaaatcaacagaaccaaagactaaaccacaagacatgatttctgctggtggagagagtgttgctggtatcactgcaatatctggcaagccgggtgacaagaaaaaagaaaagaaatcattaaccccagctgtgccagttgaatctaaaccggataaaccatcgggaaagtcaggcatggatgctgctttggatgacttaatagatactttaggaggacctgaagaaactgaagaagaaaatacaacgtatactggaccagaagtttcagatccaatgagttccacctacatagaggaattgggtaaaagagaagtcacaattcctccaaaatatagggaactattggctaaaaaggaagggatcacagggcctcctgcagactcttcgaaacccatagggccagatgatgctatagacgccttgtcatctgacttcacctgtgggtcgcctacagctgctggaaagaaaactgaaaaagaggaatctacagaagttttaaaagctcagtcagcagggacagtcagaagtgctgctccaccccaagagaagaaaagaaaggtggagaaggatacaatgagtgatcaagcactcgaggctctgtcggcttcactgggcacccggcaagcagaacctgagctcgacctccgctcaattaaggaagtcgatgaggcaaaagctaaagaagaaaaactagagaagtgtggtgaggatgatgaaacaatcccatctgagtacagattaaaaccagccacggataaagatggaaaaccactattgccagagcctgaagaaaaacccaagcctcggagtgaatcagaactcattgatgaactttcagaagattttgaccggtctgaatgtaaagagaaaccatctaagccaactgaaaagacagaagaatctaaggccgctgctccagctcctgtgtcggaggctgtgtgtcggacctccatgtgtagtatacagtcagcaccccctgagccggctaccttgaagggcacagtgccagatgatgctgtagaagccttggctgatagcctggggaaaaaggaagcagatccagaagatggaaaacctgtgatggataaagtcaaggagaaggccaaagaagaagaccgtgaaaagcttggtgaaaaagaagaaacaattcctcctgattatagattagaagaggtcaaggataaagatggaaagccactcctgccaaaagagtctaaggaacagcttccacccatgagtgaagacttccttctggatgctttgtctgaggacttctctggtccacaaaatgcttcatctcttaaatttgaagatgctaaacttgctgctgccatctctgaagtggtttcccaaaccccagcttcaacgacccaagctggagccccaccccgtgatacctcgcagagtgacaaagacctcgatgatgccttggataaactctctgacagtctaggacaaaggcagcctgacccagatgagaacaaaccaatggaagataaagtaaaggaaaaagctaaagctgaacatagagacaagcttggagaaagagatgacactatcccacctgaatacagacatctcctggatgataatggacaggacaaaccagtgaagccacctacaaagaaatcagaggattcaaagaaacctgcagatgaccaagaccccattgatgctctctcaggagatctggacagctgtccctccactacagaaacctcacagaacacagcaaaggataagtgcaagaaggctgcttccagctccaaagcacctaagaatggaggtaaagcgaaggattcagcaaagggtaaatggagcagtaaatatactacaaattagtttagcagttacacagagtagggtttatcatttcagtcatttagtttcctactggaatctatttagaataaaatttcttaaagtactatctatcccatagcatcgcttggtaaagtaattgaatttgtataaatacatatatttttaagtaactggtgctttaaaatcctaaatgaatgttcttgacacaacccaatttgcctgtgttttgcctgtctttcttgccctaattaaaataccaccatagtatgtggtttatatagattttagaacatggaagttggaaacttcctattattaaaattactcaagctgtgatgagaaatgaaaattggattagacaacttctaggtcccttccaattccaagaacatatgatttaaatgattattactatgatcccctggctataaggaggagttaaaggtgtagctttaaagacaatagtccagttacaccaaagcttttaaaacaatatattaaaatcttcctgtagtagattcccttaagggatataggaaacagcattgataattggcagttatgccattatatctcagtttaaatacttatttgcctattatttaatttcagttatacgaagtacttaatcagccctttaacaaataatagaaagcataataaccctttatgatgagtggatttactggacagccatgaccctatgtacaggaaaggaaggatcaccacagaatgaaacattgccatttaagaacacctatgcatattttataacctaccctagccttaaaaaaataaagctgagagtgatacatttaggatcaggatcacttaaggttatttttagcttataagcttgaggaggaagaactcacaatattgtggccagatgaagaagagaaactgaaaggaccatcttatttttccccactgactgccatcttttgtcccctaattctgagaaggccatctcctcatacttaatacagaaaagaaagctcacggatggttttgctttcccttttagacaacagaggaaacttccaagccaaaagatgactaaagaaatacaagttaaggtatctggtatctgcatgtaaaatcttcagctggtggatggtgacttttgaagaacaaaaggctttggcaacagaaaacaattgttctgggtgatttctagaatggtttttgttgagtctctgaacatcctaaatattggtttgttattcttttccagaaagaaaatgaatttgactggttcacctgtgtactgagtattgataaactttgaatttttttaattgccttcaattgggagagaaagctttatatttgtaagaaatatatttgataaagtttcttaaagcaacaccaaaaaaacaaaagaaaagctaagtgaatttttgcacattctacacacagtgcctgtaaatctcatttgtattttcagtttgcccttaattttttttgttagtgtttagaaaacaatgttttaaacattcttcagtgttctgatttcttattaccccctttcctcttgggcttttgaactgtatttgatgttgctttgggataatgtttataagtcaaacataagatattgtacattgggcacatatctcctcttgggctgctaataataaattaataacaggtaacctggacaaaccaggaagcaccaaaccccttttcagtttgaactcttctttgccaggtgtgaggacttctgcatcttacagtcagcacagaacacactgagacttgaatcaagtcagcaacagagcaaaataaaggttagataagtccttgtgtagcaaatttcgagcataagaaataaaatctaattaattcttagggtactcatctgacttgaactctgttggtttactgtgttagtaaactgtgctttctattatctatacataaaacctgagcagcaactgtgtctttagagctattgccacattagcctttgcactgtatagcgtctggctttatggaacttaagtttaccaaatataaaaagaaacttctgcttttaaaaaaattatatatatatattaaatttgaaacctgcatttctcccacagcaatgtaagaagtaggctctgatgtcctaccactttgaatggttttctaatatcttaatgaatagttcctgaacattgcactgatatcatcgattagaattttgatatttaatttcatctttatttcctggtagagaatgcaggaaaagatgtcaggtacataacataaaacagattgggaatttattgtttccaaagggcatggccttccttagcatcagtttgaagcttttgttatgacttagctgacttgtggcagcggggcaagcaaaaacaataacactgcttataaatggcaccacatcttgttaacctcccccccaaatactctctgaaagtcatgcacatacctatgggattttacacaccaccagcttaaaatgctatgtctctatccatcagaaatagtcattattctatttttaaggcagcaacaagaaaagaaaaaacacttttcctgagggatttctaaccatgtatctaatcctcccatttgggcagtataggtgtttgcttttttgttttctttttttaagaaaaaccttgaaacctttgacactgacagatgtgtttgcaaggatacggctgcagtattactaatttccatgtgtatctggaagtatttttaaatggcataccaaaatccagaagtttaaagatgcctataaaagtaaacaacatttatttaaaaagaactctgaatatgccttcttttttaattagaaatatcttcgagacttgggtgtttgttaataactaataactggagtaagctacaggatctaaagcagccctttttacagtctagttaggagagagaaaataattgcaaatatccacttagaggcaaagaacaattttttattatcaaaaaggtttctgcacattgttgtggcaatattgtatctgtttagaaaatgggcttttccaaaagcaaacaaagataggttcctcaggtgaccaaaactgaaaatcaatatttccatgtttcattaatcaaggcataaaatacaattaaagcaaaatattttacattaaaatcttggttgtgtatttttttaaaagaagggaaatagtttagtttggggtggaaattaccagtgatttctatttttattaaaccattcactacaacaaataagtataaaaattccaattccacttttatacctatttatttgttgtagtgaatggtttaataaatggcagatttatgtccagaagtcactctattttgtcgtgtattaggggaacacattttgacatttttcgtaccaatcatcaatcatattcccttatcttgaagtttttgccttatattcaaaaagttcagtttgaattctcctttgccaggtgtgaggatttccgcaccttagagtcagcgcaaaacacgctgcaacttgaatcaagtcagcaacagagcacactatgggttagataagtccctgtgtagcaagttttcagaataagaaataaaatctaattcttagggtattaactgacttgacttgaactccgttggtttaccatgttagtaaactgtgctttctattattatcatctatacataaaacctgagcagcaactgtgtgctgaagcaaccgtgtgtgaagtcttcacaaaagaaagaaagacttcaaagccaaagaatgtcctatttgctaatatgagcaaatattttgtttcacaatgtactatcatttattggtgactgcaataatttactgtcagtaaatgccaataactagttagttagaaattgtaaagtaggccaaataagaagcagagagagaaaaaaaatcacctccctaagaaaagggttttc

SEQ ID NO: 424604 - DNA, 3638 bp, Homo sapiens
gtggtgttctagaggatcccgtctacatagtgttaggagaaggccaaagaagaagaccgtgaaaagcttggtgaaaaagaagaaacaattcctcctgattatagattagaagaggtcaaggataaagatggaaagccactcctgccaaaagagtctaaggaacagcttccacccatgagtgaagacttccttctggatgctttgtctgaggacttctctggtccacaaaatgcttcatctcttaaatttgaagatgctaaacttgctgctgccatctctgaagtggtttcccaaaccccagcttcaacgacccaagctggagccccaccccgtgatacctcgcagagtgacaaagacctcgatgatgccttggataaactctctgacagtctaggacaaaggcagcctgacccagatgagaacaaaccaatggaagataaagtaaaggaaaaagctaaagctgaacatagagacaagcttggagaaagagatgacactatcccacctgaatacagacatctcctggatgataatggacaggacaaaccagtgaagccacctacaaagaaatcagaggattcaaagaaacctgcagatgaccaagaccccattgatgctctctcaggagatctggacagctgtccctccactacagaaacctcacagaacacagcaaaggataagtgcaagaaggctgcttccagctccaaagcacctaagaatggaggtaaagcgaaggattcagcaaagacaacagaggaaacttccaagccaaaagatgactaaagaaatacaagttaaggtatctggtatctgcatgtaaaatcttcagctggtggatggtgacttttgaagaacaaaaggctttggcaacagaaaacaattgttctgggtgatttctagaatggtttttgttgagtctctgaacatcctaaatattggtttgttattcttttccagaaagaaaatgaatttgactggttcacctgtgtactgagtattgataaactttgaatttttttaattgccttcaattgggagagaaagctttatatttgtaagaaatatatttgataaagtttcttaaagcaacaccaaaaaaacaaaagaaaagctaagtgaatttttgcacattctacacacagtgcctgtaaatctcatttgtattttcagtttgcccttaattttttttgttagtgtttagaaaacaatgttttaaacattcttcagtgttctgatttcttattaccccctttcctcttgggcttttgaactgtatttgatgttgctttgggataatgtttataagtcaaacataagatattgtacattgggcacatatctcctcttgggctgctaataataaattaataacaggtaacctggacaaaccaggaagcaccaaaccccttttcagtttgaactcttctttgccaggtgtgaggacttctgcatcttacagtcagcacagaacacactgagacttgaatcaagtcagcaacagagcaaaataaaggttagataagtccttgtgtagcaaatttcgagcataagaaataaaatctaattaattcttagggtactcatctgacttgaactctgttggtttactgtgttagtaaactgtgctttctattatctatacataaaacctgagcagcaactgtgtctttagagctattgccacattagcctttgcactgtatagcgtctggctttatggaacttaagtttaccaaatataaaaagaaacttctgcttttaaaaaaattatatatatatattaaatttgaaacctgcatttctcccacagcaatgtaagaagtaggctctgatgtcctaccactttgaatggttttctaatatcttaatgaatagttcctgaacattgcactgatatcatcgattagaattttgatatttaatttcatctttatttcctggtagagaatgcaggaaaagatgtcaggtacataacataaaacagattgggaatttattgtttccaaagggcatggccttccttagcatcagtttgaagcttttgttatgacttagctgacttgtggcagcggggcaagcaaaaacaataacactgcttataaatggcaccacatcttgttaacctcccccccaaatactctctgaaagtcatgcacatacctatgggattttacacaccaccagcttaaaatgctatgtctctatccatcagaaatagtcattattctatttttaaggcagcaacaagaaaagaaaaaacacttttcctgagggatttctaaccatgtatctaatcctcccatttgggcagtataggtgtttgcttttttgttttctttttttaagaaaaaccttgaaacctttgacactgacagatgtgtttgcaaggatacggctgcagtattactaatttccatgtgtatctggaagtatttttaaatggcataccaaaatccagaagtttaaagatgcctataaaagtaaacaacatttatttaaaaagaactctgaatatgccttcttttttaattagaaatatcttcgagacttgggtgtttgttaataactaataactggagtaagctacaggatctaaagcagccctttttacagtctagttaggagagagaaaataattgcaaatatccacttagaggcaaagaacaattttttattatcaaaaaggtttctgcacattgttgtggcaatattgtatctgtttagaaaatgggcttttccaaaagcaaacaaagataggttcctcaggtgaccaaaactgaaaatcaatatttccatgtttcattaatcaaggcataaaatacaattaaagcaaaatattttacattaaaatcttggttgtgtatttttttaaaagaagggaaatagtttagtttggggtggaaattaccagtgatttctatttttattaaaccattcactacaacaaataagtataaaaattccaattccacttttatacctatttatttgttgtagtgaatggtttaataaatggcagatttatgtccagaagtcactctattttgtcgtgtattaggggaacacattttgacatttttcgtaccaatcatcaatcatattcccttatcttgaagtttttgccttatattcaaaaagttcagtttgaattctcctttgccaggtgtgaggatttccgcaccttagagtcagcgcaaaacacgctgcaacttgaatcaagtcagcaacagagcacactatgggttagataagtccctgtgtagcaagttttcagaataagaaataaaatctaattcttagggtattaactgacttgacttgaactccgttggtttaccatgttagtaaactgtgctttctattattatcatctatacataaaacctgagcagcaactgtgtgctgaagcaaccgtgtgtgaagtcttcacaaaagaaagaaagacttcaaagccaaagaatgtcctatttgctaatatgagcaaatattttgtttcacaatgtactatcatttattggtgactgcaataatttactgtcagtaaatgccaataactagttagttagaaattgtaaagtaggccaaataagaagcagagagagaaaaaaaatcacctccctaagaaaagggttttc

SEQ ID NO: 424605 - DNA, 3628 bp, Homo sapiens
aggagcccgggtccctccgcgggcaggaaggggagggcccatcggggctaggggaaccccggcgcagacctggggtggggtcggaaaagctgtttcatcgcccgctcccgggccctccgctcctcctgcctccctccctctctccctggcaggactccccgccaggcctccccgccactctccgcggcgcattccgggaggcagcggccgcagcggcctcgccatgtcccagcccggccagaagcccgccgcctccccgcggccccggcgagcagccgccgcccgccgcacccatgagcatgtcagtgaaaaaaccagtgaatcgccttccaaaccaggagaaaagaaaggatcagatgagaaaaaagcagcaagcctcggcagcagtcaatcctccagaacctatgctggtggaacagcctcggccaccaaggtgtcagcttcctctggtgcaaccagcaagtcttccagtatgaatcccacagaaaccaaggctgtaaaaacagaacctgagaagaagtcacagtcaaccaagctgtctgtggttcatgagaaaaaatcccaagaaggaaagccaaaagaacacacagagccaaaaagcctacccaagcaggcatcagatacaggaagtaacgatgctcacaataaaaaagcagtttccagatcagctgaacagcagccatcagagaaatcaacagaaccaaagactaaaccacaagacatgatttctgctggtggagagagtgttgctggtatcactgcaatatctggcaagccgggtgacaagaaaaaagaaaagaaatcattaaccccagctgtgccagttgaatctaaaccggataaaccatcgggaaagtcaggcatggatgctgctttggatgacttaatagatactttaggaggacctgaagaaactgaagaagaaaatacaacgtatactggaccagaagtttcagatccaatgagttccacctacatagaggaattgggtaaaagagaagtcacaattcctccaaaatatagggaactattggctaaaaaggaagggatcacagggcctcctgcagactcttcgaaacccatagggccagatgatgctatagacgccttgtcatctgacttcacctgtgggtcgcctacagctgctggaaagaaaactgaaaaagaggaatctacagaagttttaaaagctcagtcagcagggacagtcagaagtgctgctccaccccaagagaagaaaagaaaggtggagaaggatacaatgagtgatcaagcactcgaggctctgtcggcttcactgggcacccggcaagcagaacctgagctcgacctccgctcaattaaggaagtcgatgaggcaaaagctaaagaagaaaaactagagaagtgtggtgaggatgatgaaacaatcccatctgagtacagattaaaaccagccacggataaagatggaaaaccactattgccagagcctgaagaaaaacccaagcctcggagtgaatcagaactcattgatgaactttcagaagattttgaccggtctgaatgtaaagagaaaccatctaagccaactgaaaagacagaagaatctaaggccgctgctccagctcctgtgtcggaggctgtgtgtcggacctccatgtgtagtatacagtcagcaccccctgagccggctaccttgaagggcacagtgccagatgatgctgtagaagccttggctgatagcctggggaaaaaggaagcagatccagaagatggaaaacctgtgatggataaagtcaaggagaaggccaaagaagaagaccgtgaaaagcttggtgaaaaagaagaaacaattcctcctgattatagattagaagaggtcaaggataaagatggaaagccactcctgccaaaagagtctaaggaacagcttccacccatgagtgaagacttccttctggatgctttgtctgaggacttctctggtccacaaaatgcttcatctcttaaatttgaagatgctaaacttgctgctgccatctctgaagtggtttcccaaaccccagcttcaacgacccaagctggagccccaccccgtgatacctcgcagagtgacaaagacctcgatgatgccttggataaactctctgacagtctaggacaaaggcagcctgacccagatgagaacaaaccaatggaagataaagtaaaggaaaaagctaaagctgaacatagagacaagcttggagaaagagatgacactatcccacctgaatacagacatctcctggatgataatggacaggacaaaccagtgaagccacctacaaagaaatcagaggattcaaagaaacctgcagatgaccaagaccccattgatgctctctcaggagatctggacagctgtccctccactacagaaacctcacagaacacagcaaaggataagtgcaagaaggctgcttccagctccaaagcacctaagaatggaggtaaagcgaaggattcagcaaagacaacagaggaaacttccaagccaaaagatgactaaagaaatacaagttaaggtatctggtatctgcatgtaaaatcttcagctggtggatggtgacttttgaagaacaaaaggctttggcaacagaaaacaattgttctgggtgatttctagaatggtttttgttgagtctctgaacatcctaaatattggtttgttattcttttccagaaagaaaatgaatttgactggttcacctgtgtactgagtattgataaactttgaatttttttaattgccttcaattgggagagaaagctttatatttgtgtgaggacttctgcatcttacagtcagcacagaacacactgagacttgaatcaagtcagcaacagagcaaaataaagatgcaaacttcgttttttaaaaacatgatatctaaaaagcagaatgtgcagagtcttttctttgccaagcaaaacagtttccaccacatcttgtctatagatgactacctttctggtcaaggctttggacatctcttcagtcatcagacagagtatctctgctctagacctcgctggagttcaagcttgaattattatatgcaagttaattttacaagcctggatgaggctactgaaaactggaaaaaagctacgagactgtaacaacccttcattctttttcatttccaaagctctctccccatctcaagctagaaaatagtgtaaccagactacacaatggaaccactcctaaaaaaattaatattagcctctcagcttttatctaaatgtaccacagtttaagagccttgtaaaatttgttccacaactttactataggaaaccttattatagaagggacaccacagaactcaatggcccacacatcaaagtcctcgagtttaggactgaagaaaagtctgcttttgtagaaaatgtgtatgcttcatgttctcttttaccagacaatgagaataactcatactgattcctcatttttccttgacttccaggaatgtctgtgataaattcaggggacaattgcgagaattatcctcagccataagtccctcacatggttatcacctgtccattatgtatctttttgtccttcattttaacatttcttttatacatggatctt

SEQ ID NO: 424606 - DNA, 2695 bp, Homo sapiens
aggagcccgggtccctccgcgggcaggaaggggagggcccatcggggctaggggaaccccggcgcagacctggggtggggtcggaaaagctgtttcatcgcccgctcccgggccctccgctcctcctgcctccctccctctctccctggcaggactccccgccaggcctccccgccactctccgcggcgcattccgggaggcagcggccgcagcggcctcgccatgtcccagcccggccagaagcccgccgcctccccgcggccccggcgagcagccgccgcccgccgcacccatgagcatgtcagtgaaaaaaccagtgaatcgccttccaaaccaggagaaaagaaaggatcagatgagaaaaaagcagcaagcctcggcagcagtcaatcctccagaacctatgctggtggaacagcctcggccaccaaggtgtcagcttcctctggtgcaaccagcaagtcttccagtatgaatcccacagaaaccaaggctgtaaaaacagaacctgagaagaagtcacagtcaaccaagctgtctgtggttcatgagaaaaaatcccaagaaggaaagccaaaagaacacacagagccaaaaagcctacccaagcaggcatcagatacaggaagtaacgatgctcacaataaaaaagcagtttccagatcagctgaacagcagccatcagagaaatcaacagaaccaaagactaaaccacaagacatgatttctgctggtggagagagtgttgctggtatcactgcaatatctggcaagccgggtgacaagaaaaaagaaaagaaatcattaaccccagctgtgccagttgaatctaaaccggataaaccatcgggaaagtcaggcatggatgctgctttggatgacttaatagatactttaggaggacctgaagaaactgaagaagaaaatacaacgtatactggaccagaagtttcagatccaatgagttccacctacatagaggaattgggtaaaagagaagtcacaattcctccaaaatatagggaactattggctaaacccatagggccagatgatgctatagacgccttgtcatctgacttcacctgtgggtcgcctacagctgctggaaagaaaactgaaaaagaggaatctacagaagttttaaaagctcagtcagcagggacagtcagaagtgctgctccaccccaagagaagaaaagaaaggtggagaaggatacaatgagtgatcaagcactcgaggctctgtcggcttcactgggcacccggcaagcagaacctgagctcgacctccgctcaattaaggaagtcgatgaggcaaaagctaaagaagaaaaactagagaagtgtggtgaggatgatgaaacaatcccatctgagtacagattaaaaccagccacggataaagatggaaaaccactattgccagagcctgaagaaaaacccaagcctcggagtgaatcagaactcattgatgaactttcagaagattttgaccggtctgaatgtaaagagaaaccatctaagccaactgaaaagacagaagaatctaaggccgctgctccagctcctgtgtcggaggctgtgtgtcggacctccatgtgtagtatacagtcagcaccccctgagccggctaccttgaagggcacagtgccagatgatgctgtagaagccttggctgatagcctggggaaaaaggaagcagatccagaagatggaaaacctgtgatggataaagtcaaggagaaggccaaagaagaagaccgtgaaaagcttggtgaaaaagaagaaacaattcctcctgattatagattagaagaggtcaaggataaagatggaaagccactcctgccaaaagagtctaaggaacagcttccacccatgagtgaagacttccttctggatgctttgtctgaggacttctctggtccacaaaatgcttcatctcttaaatttgaagatgctaaacttgctgctgccatctctgaagtggtttcccaaaccccagcttcaacgacccaagctggagccccaccccgtgatacctcgcagagtgacaaagacctcgatgatgccttggataaactctctgacagtctaggacaaaggcagcctgacccagatgagaacaaaccaatggaagataaagtaaaggaaaaagctaaagctgaacatagagacaagcttggagaaagagatgacactatcccacctgaatacagacatctcctggatgataatggacaggacaaaccagtgaagccacctacaaagaaatcagaggattcaaagaaacctgcagatgaccaagaccccattgatgctctctcaggagatctggacagctgtccctccactacagaaacctcacagaacacagcaaaggataagtgcaagaaggctgcttccagctccaaagcacctaagaatggaggtaaagcgaaggattcagcaaagacaacagaggaaacttccaagccaaaagatgactaaagaaatacaagttaaggtatctggtatctgcatgtaaaatcttcagctggtggatggtgacttttgaagaacaaaaggctttggcaacagaaaacaattgttctgggtgatttctagaatggtttttgttgagtctctgaacatcctaaatattggtttgttattcttttccagaaagaaaatgaatttgactggttcacc

SEQ ID NO: 424607 - DNA, 3129 bp, Homo sapiens
gcgcgaattcatcatcctgctgcgcgaattcatcatcctgctgcgcgaattcatcatcctgctagaggattcaaagaaacctgcagatgaccaagaccccattgatgctctctcaggagatctggacagctgtccctccactacagaaacctcacagaacacagcaaaggataagtgcaagaaggctgcttccagctccaaagcacctaagaatggaggtaaagcgaaggattcagcaaagacaacagaggaaacttccaagccaaaagatgactaaagaaatacaagttaaggtatctggtatctgcatgtaaaatcttcagctggtggatggtgacttttgaagaacaaaaggctttggcaacagaaaacaattgttctgggtgatttctagaatggtttttgttgagtctctgaacatcctaaatattggtttgttattcttttccagaaagaaaatgaatttgactggttcacctgtgtactgagtattgataaactttgaatttttttaattgccttcaattgggagagaaagctttatatttgtaagaaatatatttgataaagtttcttaaagcaacaccaaaaaaacaaaagaaaagctaagtgaatttttgcacattctacacacagtgcctgtaaatctcatttgtattttcagtttgcccttaattttttttgttagtgtttagaaaacaatgttttaaacattcttcagtgttctgatttcttattaccccctttcctcttgggcttttgaactgtatttgatgttgctttgggataatgtttataagtcaaacataagatattgtacattgggcacatatctcctcttgggctgctaataataaattaataacaggtaacctggacaaaccaggaagcaccaaaccccttttcagtttgaactcttctttgccaggtgtgaggacttctgcatcttacagtcagcacagaacacactgagacttgaatcaagtcagcaacagagcaaaataaaggttagataagtccttgtgtagcaaatttcgagcataagaaataaaatctaattaattcttagggtactcatctgacttgaactctgttggtttactgtgttagtaaactgtgctttctattatctatacataaaacctgagcagcaactgtgtctttagagctattgccacattagcctttgcactgtatagcgtctggctttatggaacttaagtttaccaaatataaaaagaaacttctgcttttaaaaaaattatatatatatattaaatttgaaacctgcatttctcccacagcaatgtaagaagtaggctctgatgtcctaccactttgaatggttttctaatatcttaatgaatagttcctgaacattgcactgatatcatcgattagaattttgatatttaatttcatctttatttcctggtagagaatgcaggaaaagatgtcaggtacataacataaaacagattgggaatttattgtttccaaagggcatggccttccttagcatcagtttgaagcttttgttatgacttagctgacttgtggcagcggggcaagcaaaaacaataacactgcttataaatggcaccacatcttgttaacctcccccccaaatactctctgaaagtcatgcacatacctatgggattttacacaccaccagcttaaaatgctatgtctctatccatcagaaatagtcattattctatttttaaggcagcaacaagaaaagaaaaaacacttttcctgagggatttctaaccatgtatctaatcctcccatttgggcagtataggtgtttgcttttttgttttctttttttaagaaaaaccttgaaacctttgacactgacagatgtgtttgcaaggatacggctgcagtattactaatttccatgtgtatctggaagtatttttaaatggcataccaaaatccagaagtttaaagatgcctataaaagtaaacaacatttatttaaaaagaactctgaatatgccttcttttttaattagaaatatcttcgagacttgggtgtttgttaataactaataactggagtaagctacaggatctaaagcagccctttttacagtctagttaggagagagaaaataattgcaaatatccacttagaggcaaagaacaattttttattatcaaaaaggtttctgcacattgttgtggcaatattgtatctgtttagaaaatgggcttttccaaaagcaaacaaagataggttcctcaggtgaccaaaactgaaaatcaatatttccatgtttcattaatcaaggcataaaatacaattaaagcaaaatattttacattaaaatcttggttgtgtatttttttaaaagaagggaaatagtttagtttggggtggaaattaccagtgatttctatttttattaaaccattcactacaacaaataagtataaaaattccaattccacttttatacctatttatttgttgtagtgaatggtttaataaatggcagatttatgtccagaagtcactctattttgtcgtgtattaggggaacacattttgacatttttcgtaccaatcatcaatcatattcccttatcttgaagtttttgccttatattcaaaaagttcagtttgaattctcctttgccaggtgtgaggatttccgcaccttagagtcagcgcaaaacacgctgcaacttgaatcaagtcagcaacagagcacactatgggttagataagtccctgtgtagcaagttttcagaataagaaataaaatctaattcttagggtattaactgacttgacttgaactccgttggtttaccatgttagtaaactgtgctttctattattatcatctatacataaaacctgagcagcaactgtgtgctgaagcaaccgtgtgtgaagtcttcacaaaagaaagaaagacttcaaagccaaagaatgtcctatttgctaatatgagcaaatattttgtttcacaatgtactatcatttattggtgactgcaataatttactgtcagtaaatgccaataactagttagttagaaattgtaaagtaggccaaataagaagcagagagagaaaaaaaatcacctccctaagaaaagggttttc

SEQ ID NO: 424608 - DNA, 2064 bp, Homo sapiens
aggagcccgggtccctccgcgggcaggaaggggagggcccatcggggctaggggaaccccggcgcagacctggggtggggtcggaaaagctgtttcatcgcccgctcccgggccctccgctcctcctgcctccctccctctctccctggcaggactccccgccaggcctccccgccactctccgcggcgcattccgggaggcagcggccgcagcggcctcgccatgtcccagcccggccagaagcccgccgcctccccgcggccccggcgagcagccgccgcccgccgcacccatgagcatgtcagtgaaaaaaccagtgaatcgccttccaaaccaggagaaaagaaaggatcagatgagaaaaaagcagcaagcctcggcagcagtcaatcctccagaacctatgctggtggaacagcctcggccaccaaggtgtcagcttcctctggtgcaaccagcaagtcttccagtatgaatcccacagaaaccaaggctgtaaaaacagaacctgagaagaagtcacagtcaaccaagctgtctgtggttcatgagaaaaaatcccaagaaggaaagccaaaagaacacacagagccaaaaagcctacccaagcaggcatcagatacaggaagtaacgatgctcacaataaaaaagcagtttccagatcagctgaacagcagccatcagagaaatcaacagaaccaaagactaaaccacaagacatgatttctgctggtggagagagtgttgctggtatcactgcaatatctggcaagccgggtgacaagaaaaaagaaaagaaatcattaaccccagctgtgccagttgaatctaaaccggataaaccatcgggaaagtcaggcatggatgctgctttggatgacttaatagatactttaggaggacctgaagaaactgaagaagaaaatacaacgtatactggaccagaagtttcagatccaatgagttccacctacatagaggaattgggtaaaagagaagtcacaattcctccaaaatatagggaactattggctaaaaaggaagggatcacagggcctcctgcagactcttcgaaacccatagggccagatgatgctatagacgccttgtcatctgacttcacctgtgggtcgcctacagctgctggaaagaaaactgaaaaagaggaatctacagaagttttaaaagctcagtcagcagggacagtcagaagtgctgctccaccccaagagaagaaaagaaaggtggagaaggatacaatgagtgatcaagcactcgaggctctgtcggcttcactgggcacccggcaagcagaacctgagctcgacctccgctcaattaaggaagtcgatgaggcaaaagctaaagaagaaaaactagagaagtgtggtgaggatgatgaaacaatcccatctgagtacagattaaaaccagccacggataaagatggaaaaccactattgccagagcctgaagaaaaacccaagcctcggagtgaatcagaactcattgatgaactttcagaagattttgaccggtctgaatgtaaagagaaaccatctaagccaactgaaaagacagaagaatctaaggccgctgctccagctcctgtgtcggaggctgtgtgtcggacctccatgtgtagtatacagtcagcaccccctgagccggctaccttgaagggcacagtgccagatgatgctgtagaagccttggctgatagcctggggaaaaaggaagcagatccagaagatggaaaacctgtgatggataaagtcaaggagaaggccaaagaagaagaccgtgaaaagcttggtgaaaaagaagaaacaattcctcctgattatagattagaagaggtcaaggtaagatggaaagccactcctgcccaaaagagtcttaggaacagcgttccacccatgagtgaagacttccctctggatgcttgtcgtgacgacttctctggtcccaatgcgtctctcttaattgaagaatgttaatgtgtggtgccactcttagtgggttccccaccccgtttagaccaatgggcccccgggaaccg

SEQ ID NO: 424609 - DNA, 1318 bp, Homo sapiens
aggagcccgggtccctccgcgggcaggaaggggagggcccatcggggctaggggaaccccggcgcagacctggggtggggtcggaaaagctgtttcatcgcccgctcccgggccctccgctcctcctgcctccctccctctctccctggcaggactccccgccaggcctccccgccactctccgcggcgcattccgggaggcagcggccgcagcggcctcgccatgtcccagcccggccagaagcccgccgcctccccgcggccccggcgagcagccgccgcccgccgcacccatgagcatgtcagtgaaaaaaccagtgaatcgccttccaaaccaggagaaaagaaaggatcagatgagaaaaaagcagcaagcctcggcagcagtcaatcctccagaacctatgctggtggaacagcctcggccaccaaggtgtcagcttcctctggtgcaaccagcaagtcttccagtatgaatcccacagaaaccaaggctgtaaaaacagaacctgagaagaagtcacagtcaaccaagctgtctgtggttcatgagaaaaaatcccaagaaggaaagccaaaagaacacacagagccaaaaagcctacccaagcaggcatcagatacaggaagtaacgatgctcacaataaaaaagcagtttccagatcagctgaacagcagccatcagagaaatcaacagaaccaaagactaaaccacaagacatgatttctgctggtggagagagtgttgctggtatcactgcaatatctggcaagccgggtgacaagaaaaaagaaaagaaatcattaaccccagctgtgccagttgaatctaaaccggataaaccatcgggaaagtcaggcatggatgctgctttggatgacttaatagatactttaggaggacctgaagaaactgaagaagaaaatacaacgtatactggaccagaagtttcagatccaatgagttccacctacatagaggaattgggtaaaagagaagtcacaattcctccaaaatatagggaactattggctaaacccatagggccagatgatgctatagacgccttgtcatctgacttcacctgtgggtcgcctacagctgctggaaagaaaactgaaaaagaggaatctacagaagttttaaaagctcagtcagcagggacagtcagaagtgctgctccaccccaagagaagaaaagaaaggtggagaaggatacaatgagtgatcaagcactcgaggctctgtcggcttcactgggcacccggcaagcagaacctgagctcgacctccgctcaattaaggaagtcgatgag

SEQ ID NO: 424610 - DNA, 499 bp, Homo sapiens
tttttattgtctgcatggtctaaataagctcttagaacagggcctaactcatagtaagcactgaagaaatgttagccattgttgttagttaacaattgtttcattgcagatacccattgacaacatgaccaatgagatggagcaaagggttgaacctcataatgattacttcagtactcaatttctgttgaactttgctatccttggaacacacaacattacagtggaatcttctgtgaaagatgccaatggtatagtatggaagactggtcccagaactaccatatttgtaaaatccctggaagacccttattcccagcaaattcgcttacaacagcagcaagcccagcagccattacagcagcagcagcaacgcaatgcctacacacggttttaaccatggaatgaatgcactgcagactctcaagagatcaatcaaattgccagaaacagtttggtttttcatatggaataagtattaaagttacagtgtagttca

SEQ ID NO: 424611 - DNA, 4448 bp, Homo sapiens
gcctggtggcgaattcggcacgaggcggaagaaaaaccagcaagaaggcggcgggggaagatggcggtcctggggtagagtttgcaagctttctgactaggctagtcgagtaactattcgggtcatggcgtcaaactcaactaagtctttcctggcagatgccggctatggcgaacaggaactggatgccaactctgcccttatggaattggacaaaggcctaagatctggcaaacttggtgaacagtgtgaagcagttgttcgctttcccagactttttcagaagtatccattccctattcttatcaattctgcattcctaaagttagctgatgttttcagagttggaaataatttcctgaggctatgtgttcttaaagttacccaacaaagtgagaaacatttggagaagattctaaatgtggatgaatttgtgaagagaattttttctgtgattcatagtaatgatcctgtggcaagagccatcaccctccggatgttgggaagtctggcatcaataattcctgagaggaagaatgctcatcatagtattcgtcagagtttagattcacatgataatgtagaagttgaagctgctgtttttgctgctgcaaacttctctgcacagtcaaaggattttgctgtaggaatctgtaacaaaatcagtgaaatgattcaaggtttagcgacaccagtagacttgaagctaaaattgatacccattctacagcacatgcaccatgatgcaatcttggcttccagtgctcgtcagcttttacaacagctggtcacatcctatccgtccaccaaaatggtgattgtgtctttgcacactttcactctgcttgcagcgtcatctttggttgatacacctaagcagattcagcttctgttgcagtatttgaagaatgatcccaggaaggcagtaaagagacttgctattcaagatctgaaattacttgctaataaaacaccacatacttggagtagggagaatattcaggcactttgtgagtgtgccctccagactccttatgacagcttaaaactagggatgttgtctgtcctttccacactatcagggaccatcgccatcaaacattacttcagtatagttccaggaaatgtgagttcttctcccagatcttctgatttagtcaaattagcccaagagtgctgttaccataataacaggggcattgcagctcatggagttagagtcctaactaatataactgtttcttgtcaagaaaaggatcttttggcactggaacaagatgctgtctttggcctggaatccctactggtactttgtagtcaagatgatagtccaggtgctcaggccactttaaagattgctctaaactgtatggtgaagttggccaagggcaggccccatcttagccagtcagtagttgagaccttgttgactcaattgcacagtgctcaagacgctgcccggattttgatgtgccattgcctggcagccattgccatgcaactgccggtgctgggtgatgggatgcttggtgacctcatggagctgtacaaggtgattggacgatcagccacagacaagcaacaagaacttctggtgagtttggctactgtgatttttgttgcaagtcagaaggcattgtctgtggaaagtaaggcagtaattaagcagcagcttgaaagtgtctccaatggatggactgtataccgtattgccagacaggcttccagaatgggtaatcatgacatggccaaagagctttatcagagtttgctgactcaggttgcctcagaacatttctacttctggctaaatagtttgaaggagttttcacatgcagaacagtgtctcactgggttgcaagaggaaaattatagttcagcactttcttgcattgctgaatctttaaaattctatcacaaagggattgcttccttaacagcagctagtacaccactgaatcctttaagctttcagtgtgaatttgtaaaactcaggattgaccttttacaagccttctctcaacttatctgtacttgtaatagcctgaagacaagcccaccacctgcaattgccacaacaattgccatgaccttaggaaatgacctccagaggtgtggtcgcatctccaatcagatgaaacagtccatggaagaatttcgaagccttgcttctcgatatggagatctttaccaggcatcttttgatgctgactcagcaactttgaggaatgttgaactacagcagcagagctgtttactgatatctcatgcaatagaagccctgattttggatccagaatcagcaagtttccaggaatatggatctactggaacagcccatgctgatagtgaatatgaaagaagaatgatgtctgtatataatcatgtcttggaggaggtagaatcactcaatcggaaatatacccctgtttcttatatgcacacagcatgcctctgcaatgccatcattgctttgctgaaagttcccctttctttccagagatattttttccagaaactacagtctaccagcatcaagcttgctctgtcaccatcgccccggaatcctgcagagcccattgctgtccagaataaccagcagctggcgctaaaggtagagggagtggttcagcacggatctaaaccaggactcttccgcaaaattcagtctgtctgtctgaatgtttcttccacactgcagagtaaatctggacaagactacaagatacccattgacaacatgaccaatgagatggagcaaagggttgaacctcataatgattacttcagtactcaatttctgttgaactttgctatccttggaacacacaacattacagtggaatcttctgtgaaagatgccaatggtatagtatggaagactggtcccagaactaccatatttgtaaaatccctggaagacccttattcccagcaaattcgcttacaacagcagcaagcccagcagccattacagcagcagcagcaacgcaatgcctacacacggttttaaccatggaatgaatgcactgcagactctcaagagatcaatcaaattgccagaaacagtttggtttttcatatggaataagtattaaagttacagtgtagttcatttattcattgatttttgtaatgtaatattctggaaaaaattttgttttcttaaaaattttgtctgacagctgggcgtggttgctcacgcctgtaatcccagcactttgggaggctgaggtgggcggctcacgaggagatcaagaccatcctggctaacacagtgaaaccccgtctccactaaaaaatacaaaaaaattagccaagcatggtggcaggcgcctgtagtcccagctacttgggaggctgaggcaggagaatggtgtgaacctgggaggcggagcttgcagtgagccgagactgtgctccagcctgggcgacagagcgagactccgtctcaaaaaaataaataaatacattttgtctgaaaaataactgggatcctggccagaaagattgttctttcttgttttattattagttttttctgttgccaagcttttttttctttcaagaatagtcacatgttgagatcactgaattggtaaatttgaccgctactcttccaaaatacatcatttgctgcctgacttagacctaggattctgagttgttcattgggaggttctgaccagtcactacaaggtttatccatggtagcagaacctgagtccttctgtagatggacttgaaagtgttccgtgcaacatccagccttctggattatgaaagcccacagtctaacagtattgaaacatcctgctgtattagttcaaccacatatttatctcttcctgtgctaaagcagtctttattattttcatatttaattgaaacaaagagcagctagcaatttcatagaaaattaatttgttttttctgatgtgtctgcaactgtgtataatacagacatttcacattgtttccaaaagtgaagaacactcatttaatatcttcaatgttttaagttagaaggggtggatcttttcctttggttggtgattggtttggtttatacttgatgagttatgctagactgattgtttagagagagcagtctctttattacacaggctcagtttgttgggatgctcagggaacagagttttctggttagccagaaaacccctttttttcctattttaattctggttgaaaaccatgataaaatagactttcttagcacagtatggtagatataacttaactgctttttgattggggatcatttagggcttcaggatcacgatttctaaacatcagggatcatatggttgcagatgccgatgctataagtaatttggccggatgcagctcctaaggtaaagcagggtactttccctggaatttcctttttaaataaatatctgtttctttgcttgtgttttgccttt

SEQ ID NO: 424612 - DNA, 3115 bp, Homo sapiens
gcctggtggcgaattcggcacgaggcggaagaaaaaccagcaagaaggcggcgggggaagatggcggtcctggggtagagtttgcaagctttctgactaggctagtcgagtaactattcgggtcatggcgtcaaactcaactaagtctttcctggcagatgccggctatggcgaacaggaactggatgccaactctgcccttatggaattggacaaaggcctaagatctggcaaacttggtgaacagtgtgaagcagttgttcgctttcccagactttttcagaagtatccattccctattcttatcaattctgcattcctaaagttagctgatgttttcagagttggaaataatttcctgaggctatgtgttcttaaagttacccaacaaagtgagaaacatttggagaagattctaaatgtggatgaatttgtgaagagaattttttctgtgattcatagtaatgatcctgtggcaagagccatcaccctccggatgttgggaagtctggcatcaataattcctgagaggaagaatgctcatcatagtattcgtcagagtttagattcacatgataatgtagaagttgaagctgctgtttttgctgctgcaaacttctctgcacagtcaaaggattttgctgtaggaatctgtaacaaaatcagtgaaatgattcaaggtttagcgacaccagtagacttgaagctaaaattgatacccattctacagcacatgcaccatgatgcaatcttggcttccagtgctcgtcagcttttacaacagctggtcacatcctatccgtccaccaaaatggtgattgtgtctttgcacactttcactctgcttgcagcgtcatctttggttgatacacctaagcagattcagcttctgttgcagtatttgaagaatgatcccaggaaggcagtaaagagacttgctattcaagatctgaaattacttgctaataaaacaccacatacttggagtagggagaatattcaggcactttgtgagtgtgccctccagactccttatgacagcttaaaactagggatgttgtctgtcctttccacactatcagggaccatcgccatcaaacattacttcagtatagttccaggaaatgtgagttcttctcccagatcttctgatttagtcaaattagcccaagagtgctgttaccataataacaggggcattgcagctcatggagttagagtcctaactaatataactgtttcttgtcaagaaaaggatcttttggcactggaacaagatgctgtctttggcctggaatccctactggtactttgtagtcaagatgatagtccaggtgctcaggccactttaaagattgctctaaactgtatggtgaagttggccaagggcaggccccatcttagccagtcagtagttgagaccttgttgactcaattgcacagtgctcaagacgctgcccggattttgatgtgccattgcctggcagccattgccatgcaactgccggtgctgggtgatgggatgcttggtgacctcatggagctgtacaaggtgattggacgatcagccacagacaagcaacaagaacttctggtgagtttggctactgtgatttttgttgcaagtcagaaggcattgtctgtggaaagtaaggcagtaattaagcagcagcttgaaagtgtctccaatggatggactgtataccgtattgccagacaggcttccagaatgggtaatcatgacatggccaaagagctttatcagagtttgctgactcaggttgcctcagaacatttctacttctggctaaatagtttgaaggagttttcacatgcagaacagtgtctcactgggttgcaagaggaaaattatagttcagcactttcttgcattgctgaatctttaaaattctatcacaaagggattgcttccttaacagcagctagtacaccactgaatcctttaagctttcagtgtgaatttgtaaaactcaggattgaccttttacaagccttctctcaacttatctgtacttgtaatagcctgaagacaagcccaccacctgcaattgccacaacaattgccatgaccttaggaaatgacctccagaggtgtggtcgcatctccaatcagatgaaacagtccatggaagaatttcgaagccttgcttctcgatatggagatctttaccaggcatcttttgatgctgactcagcaactttgaggaatgttgaactacagcagcagagctgtttactgatatctcatgcaatagaagccctgattttggatccagaatcagcaagtttccaggaatatggatctactggaacagcccatgctgatagtgaatatgaaagaagaatgatgtctgtatataatcatgtcttggaggaggtagaatcactcaatcggaaatatacccctgtttcttatatgcacacagcatgcctctgcaatgccatcattgctttgctgaaagttcccctttctttccagagatattttttccagaaactacagtctaccagcatcaagcttgctctgtcaccatcgccccggaatcctgcagagcccattgctgtccagaataaccagcagctggcgctaaaggtagagggagtggttcagcacggatctaaaccaggactcttccgcaaaattcagtctgtctgtctgaatgtttcttccacactgcagagtaaatctggacaagactacaagatacccattgacaacatgaccaatgagatggagcaaagggttgaacctcataatgattacttcagtactcaatttctgttgaactttgctatccttggaacacacaacattacagtggaatcttctgtgaaagatgccaatggtatagtatggaagactggtcccagaactaccatatttgtaaaatccctggaagacccttattcccagcaaattcgcttacaacagcagcaagcccagcagccattacagcagcagcagcaacgcaatgcctacacacggttttaaccatggaatgaatgcactgcagactctcaagagatcaatcaaattgccagaaacagtttggtttttcatatggaataagtattaaagttacagtgtagttca

SEQ ID NO: 424613 - DNA, 3421 bp, Homo sapiens
gcctggtggcgaattcggcacgaggcggaagaaaaaccagcaagaaggcggcgggggaagatggcggtcctggggtagagtttgcaagctttctgactaggctagtcgagtaactattcgggtcatggcgtcaaactcaactaagtctttcctggcagatgccggctatggcgaacaggaactggatgccaactctgcccttatggaattggacaaaggcctaagatctggcaaacttggtgaacagtgtgaagcagttgttcgctttcccagactttttcagaagtatccattccctattcttatcaattctgcattcctaaagttagctgatgttttcagagttggaaataatttcctgaggctatgtgttcttaaagttacccaacaaagtgagaaacatttggagaagattctaaatgtggatgaatttgtgaagagaattttttctgtgattcatagtaatgatcctgtggcaagagccatcaccctccggatgttgggaagtctggcatcaataattcctgagaggaagaatgctcatcatagtattcgtcagagtttagattcacatgataatgtagaagttgaagctgctgtttttgctgctgcaaacttctctgcacagtcaaaggattttgctgtaggaatctgtaacaaaatcagtgaaatgattcaaggtttagcgacaccagtagacttgaagctaaaattgatacccattctacagcacatgcaccatgatgcaatcttggcttccagtgctcgtcagcttttacaacagctggtcacatcctatccgtccaccaaaatggtgattgtgtctttgcacactttcactctgcttgcagcgtcatctttggttgatacacctaagcagattcagcttctgttgcagtatttgaagaatgatcccaggaaggcagtaaagagacttgctattcaagatctgaaattacttgctaataaaacaccacatacttggagtagggagaatattcaggcactttgtgagtgtgccctccagactccttatgacagcttaaaactagggatgttgtctgtcctttccacactatcagggaccatcgccatcaaacattacttcagtatagttccaggaaatgtgagttcttctcccagatcttctgatttagtcaaattagcccaagagtgctgttaccataataacaggggcattgcagctcatggagttagagtcctaactaatataactgtttcttgtcaagaaaaggatcttttggcactggaacaagatgctgtctttggcctggaatccctactggtactttgtagtcaagatgatagtccaggtgctcaggccactttaaagattgctctaaactgtatggtgaagttggccaagggcaggccccatcttagccagtcagtagttgagaccttgttgactcaattgcacagtgctcaagacgctgcccggattttgatgtgccattgcctggcagccattgccatgcaactgccggtgctgggtgatgggatgcttggtgacctcatggagctgtacaaggtgattggacgatcagccacagacaagcaacaagaacttctggtgagtttggctactgtgatttttgttgcaagtcagaaggcattgtctgtggaaagtaaggcagtaattaagcagcagcttgaaagtgtctccaatggatggactgtataccgtattgccagacaggcttccagaatgggtaatcatgacatggccaaagagctttatcagagtttgctgactcaggttgcctcagaacatttctacttctggctaaatagtttgaaggagttttcacatgcagaacagtgtctcactgggttgcaagaggaaaattatagttcagcactttcttgcattgctgaatctttaaaattctatcacaaagggattgcttccttaacagcagctagtacaccactgaatcctttaagctttcagtgtgaatttgtaaaactcaggattgaccttttacaagccttctctcaacttatctgtacttgtaatagcctgaagacaagcccaccacctgcaattgccacaacaattgccatgaccttaggaaatgacctccagaggtgtggtcgcatctccaatcagatgaaacagtccatggaagaatttcgaagccttgcttctcgatatggagatctttaccaggcatcttttgatgctgactcagcaactttgaggaatgttgaactacagcagcagagctgtttactgatatctcatgcaatagaagccctgattttggatccagaatcagcaagtttccaggaatatggatctactggaacagcccatgctgatagtgaatatgaaagaagaatgatgtctgtatataatcatgtcttggaggaggtagaatcactcaatcggaaatatacccctgtttcttatatgagatattttttccagaaactacagtctaccagcatcaagcttgctctgtcaccatcgccccggaatcctgcagagcccattgctgtccagaataaccagcagctggcgctaaaggtagagggagtggttcagcacggatctaaaccaggactcttccgcaaaattcagtctgtctgtctgaatgtttcttccacactgcagagtaaatctggacaagactacaagatacccattgacaacatgaccaatgagatggagcaaagggttgaacctcataatgattacttcagtactcaatttctgttgaactttgctatccttggaacacacaacattacagtggaatcttctgtgaaagatgccaatggtatagtatggaagactggtcccagaactaccatatttgtaaaatccctggaagacccttattcccagcaaattcgcttacaacagcagcaagcccagcagccattacagcagcagcagcaacgcaatgcctacacacggttttaaccatggaatgaatgcactgcagactctcaagagatcaatcaaattgccagaaacagtttggtttttcatatggaataagtattaaagttacagtgtagttcatttattcattgatttttgtaatgtaatattctggaaaaaattttgttttcttaaaaattttgtctgacagctgggcgtggttgctcacgcctgtaatcccagcactttgggaggctgaggtgggcggctcacgaggagatcaagaccatcctggctaacacagtgaaaccccgtctccactaaaaaatacaaaaaaattagccaagcatggtggcaggcgcctgtagtcccagctacttgggaggctgaggcaggagaatggtgtgaacctgggaggcggagcttgcagtgagccgagactgtgctccagcctgggcgacagagcgagactccgtctcaaaaaaataaataaatacattttgtctg

SEQ ID NO: 424614 - DNA, 3735 bp, Homo sapiens
gcctggtggcgaattcggcacgaggcggaagaaaaaccagcaagaaggcggcgggggaagatggcggtcctggggtagagtttgcaagctttctgactaggctagtcgagtaactattcgggtcatggcgtcaaactcaactaagtctttcctggcagatgccggctatggcgaacaggaactggatgccaactctgcccttatggaattggacaaaggcctaagatctggcaaacttggtgaacagtgtgaagcagttgttcgctttcccagactttttcagaagtatccattccctattcttatcaattctgcattcctaaagttagctgatgttttcagagttggaaataatttcctgaggctatgtgttcttaaagttacccaacaaagtgagaaacatttggagaagattctaaatgtggatgaatttgtgaagagaattttttctgtgattcatagtaatgatcctgtggcaagagccatcaccctccggatgttgggaagtctggcatcaataattcctgagaggaagaatgctcatcatagtattcgtcagagtttagattcacatgataatgtagaagttgaagctgctgtttttgctgctgcaaacttctctgcacagtcaaaggattttgctgtaggaatctgtaacaaaatcagtgaaatgattcaaggtttagcgacaccagtagacttgaagctaaaattgatacccattctacagcacatgcaccatgatgcaatcttggcttccagtgctcgtcagcttttacaacagctggtcacatcctatccgtccaccaaaatggtgattgtgtctttgcacactttcactctgcttgcagcgtcatctttggttgatacacctaagcagattcagcttctgttgcagtatttgaagaatgatcccaggaaggcagtaaagagacttgctattcaagatctgaaattacttgctaataaaacaccacatacttggagtagggagaatattcaggcactttgtgagtgtgccctccagactccttatgacagcttaaaactagggatgttgtctgtcctttccacactatcagggaccatcgccatcaaacattacttcagtatagttccaggaaatgtgagttcttctcccagatcttctgatttagtcaaattagcccaagagtgctgttaccataataacaggggcattgcagctcatggagttagagtcctaactaatataactgtttcttgtcaagaaaaggatcttttggcactggaacaagatgctgtctttggcctggaatccctactggtactttgtagtcaagatgatagtccaggtgctcaggccactttaaagattgctctaaactgtatggtgaagttggccaagggcaggccccatcttagccagtcagtagttgagaccttgttgactcaattgcacagtgctcaagacgctgcccggattttgatgtgccattgcctggcagccattgccatgcaactgccggtgctgggtgatgggatgcttggtgacctcatggagctgtacaaggtgattggacgatcagccacagacaagcaacaagaacttctgtttccaggaatatggatctactggaacagcccatgctgatagtgaatatgaaagaagaatgatgtctgtatataatcatgtcttggaggaggtagaatcactcaatcggaaatatacccctgtttcttatatgcacacagcatgcctctgcaatgccatcattgctttgctgaaagttcccctttctttccagagatattttttccagaaactacagtctaccagcatcaagcttgctctgtcaccatcgccccggaatcctgcagagcccattgctgtccagaataaccagcagctggcgctaaaggtagagggagtggttcagcacggatctaaaccaggactcttccgcaaaattcagtctgtctgtctgaatgtttcttccacactgcagagtaaatctggacaagactacaagatacccattgacaacatgaccaatgagatggagcaaagggttgaacctcataatgattacttcagtactcaatttctgttgaactttgctatccttggaacacacaacattacagtggaatcttctgtgaaagatgccaatggtatagtatggaagactggtcccagaactaccatatttgtaaaatccctggaagacccttattcccagcaaattcgcttacaacagcagcaagcccagcagccattacagcagcagcagcaacgcaatgcctacacacggttttaaccatggaatgaatgcactgcagactctcaagagatcaatcaaattgccagaaacagtttggtttttcatatggaataagtattaaagttacagtgtagttcatttattcattgatttttgtaatgtaatattctggaaaaaattttgttttcttaaaaattttgtctgacagctgggcgtggttgctcacgcctgtaatcccagcactttgggaggctgaggtgggcggctcacgaggagatcaagaccatcctggctaacacagtgaaaccccgtctccactaaaaaatacaaaaaaattagccaagcatggtggcaggcgcctgtagtcccagctacttgggaggctgaggcaggagaatggtgtgaacctgggaggcggagcttgcagtgagccgagactgtgctccagcctgggcgacagagcgagactccgtctcaaaaaaataaataaatacattttgtctgaaaaataactgggatcctggccagaaagattgttctttcttgttttattattagttttttctgttgccaagcttttttttctttcaagaatagtcacatgttgagatcactgaattggtaaatttgaccgctactcttccaaaatacatcatttgctgcctgacttagacctaggattctgagttgttcattgggaggttctgaccagtcactacaaggtttatccatggtagcagaacctgagtccttctgtagatggacttgaaagtgttccgtgcaacatccagccttctggattatgaaagcccacagtctaacagtattgaaacatcctgctgtattagttcaaccacatatttatctcttcctgtgctaaagcagtctttattattttcatatttaattgaaacaaagagcagctagcaatttcatagaaaattaatttgttttttctgatgtgtctgcaactgtgtataatacagacatttcacattgtttccaaaagtgaagaacactcatttaatatcttcaatgttttaagttagaaggggtggatcttttcctttggttggtgattggtttggtttatacttgatgagttatgctagactgattgtttagagagagcagtctctttattacacaggctcagtttgttgggatgctcagggaacagagttttctggttagccagaaaacccctttttttcctattttaattctggttgaaaaccatgataaaatagactttcttagcacagtatggtagatataacttaactgctttttgattggggatcatttagggcttcaggatcacgatttctaaacatcagggatcatatggttgcagatgccgatgctataagtaatttggccggatgcagctcctaaggtaaagcagggtactttccctggaatttcctttttaaataaatatctgtttctttgcttgtgttttgccttt

SEQ ID NO: 424615 - DNA, 2870 bp, Homo sapiens
cttgtgatccacccgcctcgacctcccgaagtgctgggattacaggcgtgagccaccgcacctggccgtgattatcttcttgatgatgttcttgacaattcacatattatggggtctttgtgaatgtaggcagtaaggaacctttgaatagtggttgtacatacagtttttcagagctggtgtttaataacaatatttttcattctaatattacattattctttttatcatttaggtctttatccgtcagtgtttttagagaactactgcacttgaccacaaactgataaatacttggtactgccccatctcactgttctgtttactttgtcttaaatatctctttttttttttttcccaggcagctagtacaccactgaatcctttaagctttcagtgtgaatttgtaaaactcaggattgaccttttacaagccttctctcaacttatctgtacttgtaatagcctgaagacaagcccaccacctgcaattgccacaacaattgccatgaccttaggaaatgacctccagaggtgtggtcgcatctccaatcagatgaaacagtccatggaagaatttcgaagccttgcttctcgatatggagatctttaccaggcatcttttgatgctgactcagcaactttgaggaatgttgaactacagcagcagagctgtttactgatatctcatgcaatagaagccctgattttggatccagaatcagcaagtttccaggaatatggatctactggaacagcccatgctgatagtgaatatgaaagaagaatgatgtctgtatataatcatgtcttggaggaggtagaatcactcaatcggaaatatacccctgtttcttatatgcacacagcatgcctctgcaatgccatcattgctttgctgaaagttcccctttctttccagagatattttttccagaaactacagtctaccagcatcaagcttgctctgtcaccatcgccccggaatcctgcagagcccattgctgtccagaataaccagcagctggcgctaaaggtagagggagtggttcagcacggatctaaaccaggactcttccgcaaaattcagtctgtctgtctgaatgtttcttccacactgcagagtaaatctggacaagactacaagatacccattgacaacatgaccaatgagatggagcaaagggttgaacctcataatgattacttcagtactcaatttctgttgaactttgctatccttggaacacacaacattacagtggaatcttctgtgaaagatgccaatggtatagtatggaagactggtcccagaactaccatatttgtaaaatccctggaagacccttattcccagcaaattcgcttacaacagcagcaagcccagcagccattacagcagcagcagcaacgcaatgcctacacacggttttaaccatggaatgaatgcactgcagactctcaagagatcaatcaaattgccagaaacagtttggtttttcatatggaataagtattaaagttacagtgtagttcatttattcattgatttttgtaatgtaatattctggaaaaaattttgttttcttaaaaattttgtctgacagctgggcgtggttgctcacgcctgtaatcccagcactttgggaggctgaggtgggcggctcacgaggagatcaagaccatcctggctaacacagtgaaaccccgtctccactaaaaaatacaaaaaaattagccaagcatggtggcaggcgcctgtagtcccagctacttgggaggctgaggcaggagaatggtgtgaacctgggaggcggagcttgcagtgagccgagactgtgctccagcctgggcgacagagcgagactccgtctcaaaaaaataaataaatacattttgtctgaaaaataactgggatcctggccagaaagattgttctttcttgttttattattagttttttctgttgccaagcttttttttctttcaagaatagtcacatgttgagatcactgaattggtaaatttgaccgctactcttccaaaatacatcatttgctgcctgacttagacctaggattctgagttgttcattgggaggttctgaccagtcactacaaggtttatccatggtagcagaacctgagtccttctgtagatggacttgaaagtgttccgtgcaacatccagccttctggattatgaaagcccacagtctaacagtattgaaacatcctgctgtattagttcaaccacatatttatctcttcctgtgctaaagcagtctttattattttcatatttaattgaaacaaagagcagctagcaatttcatagaaaattaatttgttttttctgatgtgtctgcaactgtgtataatacagacatttcacattgtttccaaaagtgaagaacactcatttaatatcttcaatgttttaagttagaaggggtggatcttttcctttggttggtgattggtttggtttatacttgatgagttatgctagactgattgtttagagagagcagtctctttattacacaggctcagtttgttgggatgctcagggaacagagttttctggttagccagaaaacccctttttttcctattttaattctggttgaaaaccatgataaaatagactttcttagcacagtatggtagatataacttaactgctttttgattggggatcatttagggcttcaggatcacgatttctaaacatcagggatcatatggttgcagatgccgatgctataagtaatttggccggatgcagctcctaaggtaaagcagggtactttccctggaatttcctttttaaataaatatctgtttctttgcttgtgttttgccttt

SEQ ID NO: 424616 - DNA, 2582 bp, Homo sapiens
gcctggtggcgaattcggcacgaggcggaagaaaaaccagcaagaaggcggcgggggaagatggcggtcctggggtagagtttgcaagctttctgactaggctagtcgagtaactattcgggtcatggcgtcaaactcaactaagtctttcctggcagatgccggctatggcgaacaggaactggatgccaactctgcccttatggaattggacaaaggcctaagatctggcaaacttggtgaacagtgtgaagcagttgttcgctttcccagactttttcagaagtatccattccctattcttatcaattctgcattcctaaagttagctgatgttttcagagttggaaataatttcctgaggctatgtgttcttaaagttacccaacaaagtgagaaacatttggagaagattctaaatgtggatgaatttgtgaagagaattttttctgtgattcatagtaatgatcctgtggcaagagccatcaccctccggatgttgggaagtctggcatcaataattcctgagaggaagaatgctcatcatagtattcgtcagagtttagattcacatgataatgtagaagttgaagctgctgtttttgctgctgcaaacttctctgcacagtcaaaggattttgctgtaggaatctgtaacaaaatcagtgaaatgattcaaggtttagcgacaccagtagacttgaagctaaaattgatacccattctacagcacatgcaccatgatgcaatcttggcttccagtgctcgtcagcttttacaacagctggtcacatcctatccgtccaccaaaatggtgattgtgtctttgcacactttcactctgcttgcagcgtcatctttggttgatacacctaagcagattcagcttctgttgcagtatttgaagaatgatcccaggaaggcagtaaagagacttgctattcaagatctgaaattacttgctaataaaacaccacatacttggagtagggagaatattcaggcactttgtgagtgtgccctccagactccttatgacagcttaaaactagggatgttgtctgtcctttccacactatcagggaccatcgccatcaaacattacttcagtatagttccaggaaatgtgagttcttctcccagatcttctgatttagtcaaattagcccaagagtgctgttaccataataacaggggcattgcagctcatggagttagagtcctaactaatataactgtttcttgtcaagaaaaggatcttttggcactggaacaagatgctgtctttggcctggaatccctactggtactttgtagtcaagatgatagtccaggtgctcaggccactttaaagattgctctaaactgtatggtgaagttggccaagggcaggccccatcttagccagtcagtagttgagaccttgttgactcaattgcacagtgctcaagacgctgcccggattttgatgtgccattgcctggcagccattgccatgcaactgccggtgctgggtgatgggatgcttggtgacctcatggagctgtacaaggtgattggacgatcagccacagacaagcaacaagaacttctggtgagtttggctactgtgatttttgttgcaagtcagaaggcattgtctgtggaaagtaaggcagtaattaagcagcagcttgaaagtgtctccaatggatggactgtataccgtattgccagacaggcttccagaatgggtaatcatgacatggccaaagagctttatcagagtttgctgactcaggttgcctcagaacatttctacttctggctaaatagtttgaaggagttttcacatgcagaacagtgtctcactgggttgcaagaggaaaattatagttcagcactttcttgcattgctgaatctttaaaattctatcacaaagggattgcttccttaacagcagctagtacaccactgaatcctttaagctttcagtgtgaatttgtaaaactcaggattgaccttttacaagccttctctcaacttatctgtacttgtaatagcctgaagacaagcccaccacctgcaattgccacaacaattgccatgaccttaggaaatgacctccagaggtgtggtcgcatctccaatcagatgaaacagtccatggaagaatttcgaagccttgcttctcgatatggagatctttaccaggcatcttttgatgctgactcagcaactttgaggaatgttgaactacagcagcagagctgtttactgatatctcatgcaatagaagccctgattttggatccagaatcagcaagtttccaggaatatggatctactggaacagcccatgctgatagtgaatatgaaagaagaatgatgtctgtatataatcatgtcttggaggaggtagaatcactcaatcggaaatatacccctgtttcttatatggcaagtggcatttgttttattgagcttttattgtatggatgtgggtttttcatacatttatggcacttactgtgtgagttcaacaaattaacctttctgtgcctgtttccttatccataaaacagggttaatacctacctca

SEQ ID NO: 424617 - DNA, 2186 bp, Homo sapiens
cgtctaatccacccaagattgccgccgttgtcccccccgggcccttttccaggaatatggatctactggaacagcccatgctgatagtgaatatgaaagaagaatgatgtctgtatataatcatgtcttggaggaggtagaatcactcaatcggaaatatacccctgtttcttatatgcacacagcatgcctctgcaatgccatcattgctttgctgaaagttcccctttctttccagagatattttttccagaaactacagtctaccagcatcaagcttgctctgtcaccatcgccccggaatcctgcagagcccattgctgtccagaataaccagcagctggcgctaaaggtagagggagtggttcagcacggatctaaaccaggactcttccgcaaaattcagtctgtctgtctgaatgtttcttccacactgcagagtaaatctggacaagactacaagatacccattgacaacatgaccaatgagatggagcaaagggttgaacctcataatgattacttcagtactcaatttctgttgaactttgctatccttggaacacacaacattacagtggaatcttctgtgaaagatgccaatggtatagtatggaagactggtcccagaactaccatatttgtaaaatccctggaagacccttattcccagcaaattcgcttacaacagcagcaagcccagcagccattacagcagcagcagcaacgcaatgcctacacacggttttaaccatggaatgaatgcactgcagactctcaagagatcaatcaaattgccagaaacagtttggtttttcatatggaataagtattaaagttacagtgtagttcatttattcattgatttttgtaatgtaatattctggaaaaaattttgttttcttaaaaattttgtctgacagctgggcgtggttgctcacgcctgtaatcccagcactttgggaggctgaggtgggcggctcacgaggagatcaagaccatcctggctaacacagtgaaaccccgtctccactaaaaaatacaaaaaaattagccaagcatggtggcaggcgcctgtagtcccagctacttgggaggctgaggcaggagaatggtgtgaacctgggaggcggagcttgcagtgagccgagactgtgctccagcctgggcgacagagcgagactccgtctcaaaaaaataaataaatacattttgtctgaaaaataactgggatcctggccagaaagattgttctttcttgttttattattagttttttctgttgccaagcttttttttctttcaagaatagtcacatgttgagatcactgaattggtaaatttgaccgctactcttccaaaatacatcatttgctgcctgacttagacctaggattctgagttgttcattgggaggttctgaccagtcactacaaggtttatccatggtagcagaacctgagtccttctgtagatggacttgaaagtgttccgtgcaacatccagccttctggattatgaaagcccacagtctaacagtattgaaacatcctgctgtattagttcaaccacatatttatctcttcctgtgctaaagcagtctttattattttcatatttaattgaaacaaagagcagctagcaatttcatagaaaattaatttgttttttctgatgtgtctgcaactgtgtataatacagacatttcacattgtttccaaaagtgaagaacactcatttaatatcttcaatgttttaagttagaaggggtggatcttttcctttggttggtgattggtttggtttatacttgatgagttatgctagactgattgtttagagagagcagtctctttattacacaggctcagtttgttgggatgctcagggaacagagttttctggttagccagaaaacccctttttttcctattttaattctggttgaaaaccatgataaaatagactttcttagcacagtatggtagatataacttaactgctttttgattggggatcatttagggcttcaggatcacgatttctaaacatcagggatcatatggttgcagatgccgatgctataagtaatttggccggatgcagctcctaaggtaaagcagggtactttccctggaatttcctttttaaataaatatctgtttctttgcttgtgttttgccttt

SEQ ID NO: 424618 - DNA, 2392 bp, Homo sapiens
gcctggtggcgaattcggcacgaggcggaagaaaaaccagcaagaaggcggcgggggaagatggcggtcctggggtagagtttgcaagctttctgactaggctagtcgagtaactattcgggtcatggcgtcaaactcaactaagtctttcctggcagatgccggctatggcgaacaggaactggatgccaactctgcccttatggaattggacaaaggcctaagatctggcaaacttggtgaacagtgtgaagcagttgttcgctttcccagactttttcagaagtatccattccctattcttatcaattctgcattcctaaagttagctgatgttttcagagttggaaataatttcctgaggctatgtgttcttaaagttacccaacaaagtgagaaacatttggagaagattctaaatgtggatgaatttgtgaagagaattttttctgtgattcatagtaatgatcctgtggcaagagccatcaccctccggatgttgggaagtctggcatcaataattcctgagaggaagaatgctcatcatagtattcgtcagagtttagattcacatgataatgtagaagttgaagctgctgtttttgctgctgcaaacttctctgcacagtcaaaggattttgctgtaggaatctgtaacaaaatcagtgaaatgattcaaggtttagcgacaccagtagacttgaagctaaaattgatacccattctacagcacatgcaccatgatgcaatcttggcttccagtgctcgtcagcttttacaacagctggtcacatcctatccgtccaccaaaatggtgattgtgtctttgcacactttcactctgcttgcagcgtcatctttggttgatacacctaagcagattcagcttctgttgcagtatttgaagaatgatcccaggaaggcagtaaagagacttgctattcaagatctgaaattacttgctaataaaacaccacatacttggagtagggagaatattcaggcactttgtgagtgtgccctccagactccttatgacagcttaaaactagggatgttgtctgtcctttccacactatcagggaccatcgccatcaaacattacttcagtatagttccaggaaatgtgagttcttctcccagatcttctgatttagtcaaattagcccaagagtgctgttaccataataacaggggcattgcagctcatggagttagagtcctaactaatataactgtttcttgtcaagaaaaggatcttttggcactggaacaagatgctgtctttggcctggaatccctactggtactttgtagtcaagatgatagtccaggtgctcaggccactttaaagattgctctaaactgtatggtgaagttggccaagggcaggccccatcttagccagtcagtagttgagaccttgttgactcaattgcacagtgctcaagacgctgcccggattttgatgtgccattgcctggcagccattgccatgcaactgccggtgctgggtgatgggatgcttggtgacctcatggagctgtacaaggtgattggacgatcagccacagacaagcaacaagaacttctggtgagtttggctactgtgatttttgttgcaagtcagaaggcattgtctgtggaaagtaaggcagtaattaagcagcagcttgaaagtgtctccaatggatggactgtataccgtattgccagacaggcttccagaatgggtaatcatgacatggccaaagagctttatcagagtttgctgactcaggttgcctcagaacatttctacttctggctaaatagtttgaaggagttttcacatgcagaacagtgtctcactgggttgcaagaggaaaattatagttcagcactttcttgcattgctgaatctttaaaattctatcacaaagggattgcttccttaacagtaagtcctcttaattcacctttggtggtgatgatttatgtgagagttctctcccttctctttttggattgtcctatttcaactaacttgagaaacctgctgatatgaaataggtcatggaaataaacccttaaccttttcccctttttaacattcttagattgataaaagtttatcactttcttgttaaaaataactgggtaccacatgtgaagaggattgctgaatccatgcagaatgggtaagtggtgtgtagacaggatgctccctctacagactaagattccagcctgtgtgcatcagtaccaccatcaaacataaacccctgacctcatctcatacctggcagctactgactaagtaactaaagtttcttgctttatagataaagagaaattatcgaagattctagtgtcccactttgtatctctctgtggtatcctcctactccac

SEQ ID NO: 424619 - DNA, 1832 bp, Homo sapiens
tttttattgtctgcatggtctaaataagctcttagaacagggcctaactcatagtaagcactgaagaaatgttagccattgttgttagttaacaattgtttcattgcagatacccattgacaacatgaccaatgagatggagcaaagggttgaacctcataatgattacttcagtactcaatttctgttgaactttgctatccttggaacacacaacattacagtggaatcttctgtgaaagatgccaatggtatagtatggaagactggtcccagaactaccatatttgtaaaatccctggaagacccttattcccagcaaattcgcttacaacagcagcaagcccagcagccattacagcagcagcagcaacgcaatgcctacacacggttttaaccatggaatgaatgcactgcagactctcaagagatcaatcaaattgccagaaacagtttggtttttcatatggaataagtattaaagttacagtgtagttcatttattcattgatttttgtaatgtaatattctggaaaaaattttgttttcttaaaaattttgtctgacagctgggcgtggttgctcacgcctgtaatcccagcactttgggaggctgaggtgggcggctcacgaggagatcaagaccatcctggctaacacagtgaaaccccgtctccactaaaaaatacaaaaaaattagccaagcatggtggcaggcgcctgtagtcccagctacttgggaggctgaggcaggagaatggtgtgaacctgggaggcggagcttgcagtgagccgagactgtgctccagcctgggcgacagagcgagactccgtctcaaaaaaataaataaatacattttgtctgaaaaataactgggatcctggccagaaagattgttctttcttgttttattattagttttttctgttgccaagcttttttttctttcaagaatagtcacatgttgagatcactgaattggtaaatttgaccgctactcttccaaaatacatcatttgctgcctgacttagacctaggattctgagttgttcattgggaggttctgaccagtcactacaaggtttatccatggtagcagaacctgagtccttctgtagatggacttgaaagtgttccgtgcaacatccagccttctggattatgaaagcccacagtctaacagtattgaaacatcctgctgtattagttcaaccacatatttatctcttcctgtgctaaagcagtctttattattttcatatttaattgaaacaaagagcagctagcaatttcatagaaaattaatttgttttttctgatgtgtctgcaactgtgtataatacagacatttcacattgtttccaaaagtgaagaacactcatttaatatcttcaatgttttaagttagaaggggtggatcttttcctttggttggtgattggtttggtttatacttgatgagttatgctagactgattgtttagagagagcagtctctttattacacaggctcagtttgttgggatgctcagggaacagagttttctggttagccagaaaacccctttttttcctattttaattctggttgaaaaccatgataaaatagactttcttagcacagtatggtagatataacttaactgctttttgattggggatcatttagggcttcaggatcacgatttctaaacatcagggatcatatggttgcagatgccgatgctataagtaatttggccggatgcagctcctaaggtaaagcagggtactttccctggaatttcctttttaaataaatatctgtttctttgcttgtgttttgccttt

SEQ ID NO: 424620 - DNA, 1308 bp, Homo sapiens
tgcctcccggattcaagcagttctctgcctcagcctcccgagtggctgggattacaggtgcccaccaccacgtccagcactttgggaggctgaggtgggcggctcacgaggagatcaagaccatcctggctaacacagtgaaaccccgtctccactaaaaaatacaaaaaaattagccaagcatggtggcaggcgcctgtagtcccagctacttgggaggctgaggcaggagaatggtgtgaacctgggaggcggagcttgcagtgagccgagactgtgctccagcctgggcgacagagcgagactccgtctcaaaaaaataaataaatacattttgtctgaaaaataactgggatcctggccagaaagattgttctttcttgttttattattagttttttctgttgccaagcttttttttctttcaagaatagtcacatgttgagatcactgaattggtaaatttgaccgctactcttccaaaatacatcatttgctgcctgacttagacctaggattctgagttgttcattgggaggttctgaccagtcactacaaggtttatccatggtagcagaacctgagtccttctgtagatggacttgaaagtgttccgtgcaacatccagccttctggattatgaaagcccacagtctaacagtattgaaacatcctgctgtattagttcaaccacatatttatctcttcctgtgctaaagcagtctttattattttcatatttaattgaaacaaagagcagctagcaatttcatagaaaattaatttgttttttctgatgtgtctgcaactgtgtataatacagacatttcacattgtttccaaaagtgaagaacactcatttaatatcttcaatgttttaagttagaaggggtggatcttttcctttggttggtgattggtttggtttatacttgatgagttatgctagactgattgtttagagagagcagtctctttattacacaggctcagtttgttgggatgctcagggaacagagttttctggttagccagaaaacccctttttttcctattttaattctggttgaaaaccatgataaaatagactttcttagcacagtatggtagatataacttaactgctttttgattggggatcatttagggcttcaggatcacgatttctaaacatcagggatcatatggttgcagatgccgatgctataagtaatttggccggatgcagctcctaaggtaaagcagggtactttccctggaatttcctttttaaataaatatctgtttctttgcttgtgttttgccttt

SEQ ID NO: 424621 - DNA, 4482 bp, Homo sapiens
gcctggtggcgaattcggcacgaggcggaagaaaaaccagcaagaaggcggcgggggaagatggcggtcctggggtagagtttgcaagctttctgactaggctagtcgagtaactattcgggtcatggcgtcaaactcaactaagtctttcctggcagatgccggctatggcgaacaggaactggatgccaactctgcccttatggaattggacaaaggcctaagatctggcaaacttggtgaacagtgtgaagcagttgttcgctttcccagactttttcagaagtatccattccctattcttatcaattctgcattcctaaagttagctgatgttttcagagttggcatgagatgtatgtctgtgaagtacctgaaacataaataatttcctgaggctatgtgttcttaaagttacccaacaaagtgagaaacatttggagaagattctaaatgtggatgaatttgtgaagagaattttttctgtgattcatagtaatgatcctgtggcaagagccatcaccctccggatgttgggaagtctggcatcaataattcctgagaggaagaatgctcatcatagtattcgtcagagtttagattcacatgataatgtagaagttgaagctgctgtttttgctgctgcaaacttctctgcacagtcaaaggattttgctgtaggaatctgtaacaaaatcagtgaaatgattcaaggtttagcgacaccagtagacttgaagctaaaattgatacccattctacagcacatgcaccatgatgcaatcttggcttccagtgctcgtcagcttttacaacagctggtcacatcctatccgtccaccaaaatggtgattgtgtctttgcacactttcactctgcttgcagcgtcatctttggttgatacacctaagcagattcagcttctgttgcagtatttgaagaatgatcccaggaaggcagtaaagagacttgctattcaagatctgaaattacttgctaataaaacaccacatacttggagtagggagaatattcaggcactttgtgagtgtgccctccagactccttatgacagcttaaaactagggatgttgtctgtcctttccacactatcagggaccatcgccatcaaacattacttcagtatagttccaggaaatgtgagttcttctcccagatcttctgatttagtcaaattagcccaagagtgctgttaccataataacaggggcattgcagctcatggagttagagtcctaactaatataactgtttcttgtcaagaaaaggatcttttggcactggaacaagatgctgtctttggcctggaatccctactggtactttgtagtcaagatgatagtccaggtgctcaggccactttaaagattgctctaaactgtatggtgaagttggccaagggcaggccccatcttagccagtcagtagttgagaccttgttgactcaattgcacagtgctcaagacgctgcccggattttgatgtgccattgcctggcagccattgccatgcaactgccggtgctgggtgatgggatgcttggtgacctcatggagctgtacaaggtgattggacgatcagccacagacaagcaacaagaacttctggtgagtttggctactgtgatttttgttgcaagtcagaaggcattgtctgtggaaagtaaggcagtaattaagcagcagcttgaaagtgtctccaatggatggactgtataccgtattgccagacaggcttccagaatgggtaatcatgacatggccaaagagctttatcagagtttgctgactcaggttgcctcagaacatttctacttctggctaaatagtttgaaggagttttcacatgcagaacagtgtctcactgggttgcaagaggaaaattatagttcagcactttcttgcattgctgaatctttaaaattctatcacaaagggattgcttccttaacagcagctagtacaccactgaatcctttaagctttcagtgtgaatttgtaaaactcaggattgaccttttacaagccttctctcaacttatctgtacttgtaatagcctgaagacaagcccaccacctgcaattgccacaacaattgccatgaccttaggaaatgacctccagaggtgtggtcgcatctccaatcagatgaaacagtccatggaagaatttcgaagccttgcttctcgatatggagatctttaccaggcatcttttgatgctgactcagcaactttgaggaatgttgaactacagcagcagagctgtttactgatatctcatgcaatagaagccctgattttggatccagaatcagcaagtttccaggaatatggatctactggaacagcccatgctgatagtgaatatgaaagaagaatgatgtctgtatataatcatgtcttggaggaggtagaatcactcaatcggaaatatacccctgtttcttatatgcacacagcatgcctctgcaatgccatcattgctttgctgaaagttcccctttctttccagagatattttttccagaaactacagtctaccagcatcaagcttgctctgtcaccatcgccccggaatcctgcagagcccattgctgtccagaataaccagcagctggcgctaaaggtagagggagtggttcagcacggatctaaaccaggactcttccgcaaaattcagtctgtctgtctgaatgtttcttccacactgcagagtaaatctggacaagactacaagatacccattgacaacatgaccaatgagatggagcaaagggttgaacctcataatgattacttcagtactcaatttctgttgaactttgctatccttggaacacacaacattacagtggaatcttctgtgaaagatgccaatggtatagtatggaagactggtcccagaactaccatatttgtaaaatccctggaagacccttattcccagcaaattcgcttacaacagcagcaagcccagcagccattacagcagcagcagcaacgcaatgcctacacacggttttaaccatggaatgaatgcactgcagactctcaagagatcaatcaaattgccagaaacagtttggtttttcatatggaataagtattaaagttacagtgtagttcatttattcattgatttttgtaatgtaatattctggaaaaaattttgttttcttaaaaattttgtctgacagctgggcgtggttgctcacgcctgtaatcccagcactttgggaggctgaggtgggcggctcacgaggagatcaagaccatcctggctaacacagtgaaaccccgtctccactaaaaaatacaaaaaaattagccaagcatggtggcaggcgcctgtagtcccagctacttgggaggctgaggcaggagaatggtgtgaacctgggaggcggagcttgcagtgagccgagactgtgctccagcctgggcgacagagcgagactccgtctcaaaaaaataaataaatacattttgtctgaaaaataactgggatcctggccagaaagattgttctttcttgttttattattagttttttctgttgccaagcttttttttctttcaagaatagtcacatgttgagatcactgaattggtaaatttgaccgctactcttccaaaatacatcatttgctgcctgacttagacctaggattctgagttgttcattgggaggttctgaccagtcactacaaggtttatccatggtagcagaacctgagtccttctgtagatggacttgaaagtgttccgtgcaacatccagccttctggattatgaaagcccacagtctaacagtattgaaacatcctgctgtattagttcaaccacatatttatctcttcctgtgctaaagcagtctttattattttcatatttaattgaaacaaagagcagctagcaatttcatagaaaattaatttgttttttctgatgtgtctgcaactgtgtataatacagacatttcacattgtttccaaaagtgaagaacactcatttaatatcttcaatgttttaagttagaaggggtggatcttttcctttggttggtgattggtttggtttatacttgatgagttatgctagactgattgtttagagagagcagtctctttattacacaggctcagtttgttgggatgctcagggaacagagttttctggttagccagaaaacccctttttttcctattttaattctggttgaaaaccatgataaaatagactttcttagcacagtatggtagatataacttaactgctttttgattggggatcatttagggcttcaggatcacgatttctaaacatcagggatcatatggttgcagatgccgatgctataagtaatttggccggatgcagctcctaaggtaaagcagggtactttccctggaatttcctttttaaataaatatctgtttctttgcttgtgttttgccttt

SEQ ID NO: 424622 - DNA, 3481 bp, Homo sapiens
gcctggtggcgaattcggcacgaggcggaagaaaaaccagcaagaaggcggcgggggaagatggcggtcctggggtagagtttgcaagctttctgactaggctagtcgagtaactattcgggtcatggcgtcaaactcaactaagtctttcctggcagatgccggctatggcgaacaggaactggatgccaactctgcccttatggaattggacaaaggcctaagatctggcaaacttggtgaacagtgtgaagcagttgttcgctttcccagactttttcagaagtatccattccctattcttatcaattctgcattcctaaagttagctgatgttttcagagttggaaataatttcctgaggctatgtgttcttaaagttacccaacaaagtgagaaacatttggagaagattctaaatgtggatgaatttgtgaagagaattttttctgtgattcatagtaatgatcctgtggcaagagccatcaccctccggatgttgggaagtctggcatcaataattcctgagaggaagaatgctcatcatagtattcgtcagagtttagattcacatgataatgtagaagttgaagctgctgtttttgctgctgcaaacttctctgcacagtcaaaggattttgctgtaggaatctgtaacaaaatcagtgaaatgattcaaggtttagcgacaccagtagacttgaagctaaaattgatacccattctacagcacatgcaccatgatgcaatcttggcttccagtgctcgtcagcttttacaacagctggtcacatcctatccgtccaccaaaatggtgattgtgtctttgcacactttcactctgcttgcagcgtcatctttggttgatacacctaagcagattcagcttctgttgcagtatttgaagaatgatcccaggaaggcagtaaagagacttgctattcaagatctgaaattacttgctaataaaacaccacatacttggagtagggagaatattcaggcactttgtgagtgtgccctccagactccttatgacagcttaaaactagggatgttgtctgtcctttccacactatcagggaccatcgccatcaaacattacttcagtatagttccaggaaatgtgagttcttctcccagatcttctgatttagtcaaattagcccaagagtgctgttaccataataacaggggcattgcagctcatggagttagagtcctaactaatataactgtttcttgtcaagaaaaggatcttttggcactggaacaagatgctgtctttggcctggaatccctactggtactttgtagtcaagatgatagtccaggtgctcaggccactttaaagattgctctaaactgtatggtgaagttggccaagggcaggccccatcttagccagtcagtagttgagaccttgttgactcaattgcacagtgctcaagacgctgcccggattttgatgtgccattgcctggcagccattgccatgcaactgccggtgctgggtgatgggatgcttggtgacctcatggagctgtacaaggtgattggacgatcagccacagacaagcaacaagaacttctggtgagtttggctactgtgatttttgttgcaagtcagaaggcattgtctgtggaaagtaaggcagtaattaagcagcagcttgaaagtgtctccaatggatggactgtataccgtattgccagacaggcttccagaatgggtaatcatgacatggccaaagagctttatcagagtttgctgactcaggttgcctcagaacatttctacttctggctaaatagtttgaaggagttttcacatgcagaacagtgtctcactgggttgcaagaggaaaattatagttcagcactttcttgcattgctgaatctttaaaattctatcacaaagggattgcttccttaacagcagctagtacaccactgaatcctttaagctttcagtgtgaatttgtaaaactcaggattgaccttttacaagccttctctcaacttatctgtacttgtaatagcctgaagacaagcccaccacctgcaattgccacaacaattgccatgaccttaggaaatgacctccagaggtgtggtcgcatctccaatcagatgaaacagtccatggaagaatttcgaagccttgcttctcgatatggagatctttaccaggcatcttttgatgctgactcagcaactttgaggaatgttgaactacagcagcagagctgtttactgatatctcatgcaatagaagccctgattttggatccagaatcagcaagtttccaggaatatggatctactggaacagcccatgctgatagtgaatatgaaagaagaatgatgtctgtatataatcatgtcttggaggaggtagaatcactcaatcggaaatatacccctgtttcttatatgcacacagcatgcctctgcaatgccatcattgctttgctgaaagttcccctttctttccagagatattttttccagaaactacagtctaccagcatcaagcttgctctgtcaccatcgccccggaatcctgcagagcccattgctgtccagaataaccagcagctggcgctaaaggtagagggagtggttcagcacggatctaaaccaggactcttccgcaaaattcagtctgtctgtctgaatgtttcttccacactgcagagtaaatctggacaagactacaagatacccattgacaacatgaccaatgagatggagcaaagggttgaacctcataatgattacttcagtactcaatttctgttgaactttgctatccttggaacacacaacattacagtggaatcttctgtgaaagatgccaatggtatagtatggaagactggtcccagaactaccatatttgtaaaatccctggaagacccttattcccagcaaattcgcttacaacagcagcaagcccagcagccattacagcagcagcagcaacgcaatgcctacacacggttttaaccatggaatgaatgcactgcagactctcaagagatcaatcaaattgccagaaacagtttggtttttcatatggaataagtattaaagttacagtgtagttcatttattcattgatttttgtaatgtaatattctggaaaaaattttgttttcttaaaaattttgtctgacagctgggcgtggttgctcacgcctgtaatcccagcactttgggaggctgaggtgggcggctcacgaggagatcaagaccatcctggctaacacagtgaaaccccgtctccactaaaaaatacaaaaaaattagccaagcatggtggcaggcgcctgtagtcccagctacttgggaggctgaggcaggagaatggtgtgaacctgggaggcggagcttgcagtgagccgagactgtgctccagcctgggcgacagagcgagactccgtctcaaaaaaataaataaatacattttgtctg

SEQ ID NO: 424623 - DNA, 4080 bp, Homo sapiens
gcctggtggcgaattcggcacgaggcggaagaaaaaccagcaagaaggcggcgggggaagatggcggtcctggggtagagtttgcaagctttctgactaggctagtcgagtaactattcgggtcatggcgtcaaactcaactaagtctttcctggcagatgccggctatggcgaacaggaactggatgccaactctgcccttatggaattggacaaaggcctaagatctggcaaacttggtgaacagtgtgaagcagttgttcgctttcccagactttttcagaagtatccattccctattcttatcaattctgcattcctaaagttagctgatgttttcagagttggaaataatttcctgaggctatgtgttcttaaagttacccaacaaagtgagaaacatttggagaagattctaaatgtggatgaatttgtgaagagaattttttctgtgattcatagtaatgatcctgtggcaagagccatcaccctccggatgttgggaagtctggcatcaataattcctgagaggaagaatgctcatcatagtattcgtcagagtttagattcacatgataatgtagaagttgaagctgctgtttttgctgctgcaaacttctctgcacagtcaaaggattttgctgtaggaatctgtaacaaaatcagtgaaatgattcaaggtttagcgacaccagtagacttgaagctaaaattgatacccattctacagcacatgcaccatgatgcaatcttggcttccagtgctcgtcagcttttacaacagctggtcacatcctatccgtccaccaaaatggtgattgtgtctttgcacactttcactctgcttgcagcgtcatctttggttgatacacctaagcagattcagcttctgttgcagtatttgaagaatgatcccaggaaggcagtaaagagacttgctattcaagatctgaaattacttgctaataaaacaccacatacttggagtagggagaatattcaggcactttgtgagtgtgccctccagactccttatgacagcttaaaactagggatgttgtctgtcctttccacactatcagggaccatcgccatcaaacattacttcagtatagttccaggaaatgtgagttcttctcccagatcttctgatttagtcaaattagcccaagagtgctgttaccataataacaggggcattgcagctcatggagttagagtcctaactaatataactgtttcttgtcaagaaaaggatcttttggcactggaacaagatgctgtctttggcctggaatccctactggtactttgtagtcaagatgatagtccaggtgctcaggccactttaaagattgctctaaactgtatggtgaagttggccaagggcaggccccatcttagccagtcagtagttgagaccttgttgactcaattgcacagtgctcaagacgctgcccggattttgatgtgccattgcctggcagccattgccatgcaactgccggtgctgggtgatgggatgcttggtgacctcatggagctgtacaaggtgattggacgatcagccacagacaagcaacaagaacttctggtgagtttggctactgtgatttttgttgcaagtcagaaggcattgtctgtggaaagtaaggcagtaattaagcagcagcttgaaagtgtctccaatggatggactgtataccgtattgccagacaggcttccagaatgggtaatcatgacatggccaaagagctttatcagagtttgctgactcaggttgcctcagaacatttctacttctggctaaatagtttgaaggagttttcacatgcagaacagtgtctcactgggttgcaagaggaaaattatagttcagcactttcttgcattgctgaatctttaaaattctatcacaaagggattgcttccttaacatttccaggaatatggatctactggaacagcccatgctgatagtgaatatgaaagaagaatgatgtctgtatataatcatgtcttggaggaggtagaatcactcaatcggaaatatacccctgtttcttatatgcacacagcatgcctctgcaatgccatcattgctttgctgaaagttcccctttctttccagagatattttttccagaaactacagtctaccagcatcaagcttgctctgtcaccatcgccccggaatcctgcagagcccattgctgtccagaataaccagcagctggcgctaaaggtagagggagtggttcagcacggatctaaaccaggactcttccgcaaaattcagtctgtctgtctgaatgtttcttccacactgcagagtaaatctggacaagactacaagatacccattgacaacatgaccaatgagatggagcaaagggttgaacctcataatgattacttcagtactcaatttctgttgaactttgctatccttggaacacacaacattacagtggaatcttctgtgaaagatgccaatggtatagtatggaagactggtcccagaactaccatatttgtaaaatccctggaagacccttattcccagcaaattcgcttacaacagcagcaagcccagcagccattacagcagcagcagcaacgcaatgcctacacacggttttaaccatggaatgaatgcactgcagactctcaagagatcaatcaaattgccagaaacagtttggtttttcatatggaataagtattaaagttacagtgtagttcatttattcattgatttttgtaatgtaatattctggaaaaaattttgttttcttaaaaattttgtctgacagctgggcgtggttgctcacgcctgtaatcccagcactttgggaggctgaggtgggcggctcacgaggagatcaagaccatcctggctaacacagtgaaaccccgtctccactaaaaaatacaaaaaaattagccaagcatggtggcaggcgcctgtagtcccagctacttgggaggctgaggcaggagaatggtgtgaacctgggaggcggagcttgcagtgagccgagactgtgctccagcctgggcgacagagcgagactccgtctcaaaaaaataaataaatacattttgtctgaaaaataactgggatcctggccagaaagattgttctttcttgttttattattagttttttctgttgccaagcttttttttctttcaagaatagtcacatgttgagatcactgaattggtaaatttgaccgctactcttccaaaatacatcatttgctgcctgacttagacctaggattctgagttgttcattgggaggttctgaccagtcactacaaggtttatccatggtagcagaacctgagtccttctgtagatggacttgaaagtgttccgtgcaacatccagccttctggattatgaaagcccacagtctaacagtattgaaacatcctgctgtattagttcaaccacatatttatctcttcctgtgctaaagcagtctttattattttcatatttaattgaaacaaagagcagctagcaatttcatagaaaattaatttgttttttctgatgtgtctgcaactgtgtataatacagacatttcacattgtttccaaaagtgaagaacactcatttaatatcttcaatgttttaagttagaaggggtggatcttttcctttggttggtgattggtttggtttatacttgatgagttatgctagactgattgtttagagagagcagtctctttattacacaggctcagtttgttgggatgctcagggaacagagttttctggttagccagaaaacccctttttttcctattttaattctggttgaaaaccatgataaaatagactttcttagcacagtatggtagatataacttaactgctttttgattggggatcatttagggcttcaggatcacgatttctaaacatcagggatcatatggttgcagatgccgatgctataagtaatttggccggatgcagctcctaaggtaaagcagggtactttccctggaatttcctttttaaataaatatctgtttctttgcttgtgttttgccttt

SEQ ID NO: 424624 - DNA, 2627 bp, Homo sapiens
gcctggtggcgaattcggcacgaggcggaagaaaaaccagcaagaaggcggcgggggaagatggcggtcctggggtagagtttgcaagctttctgactaggctagtcgagtaactattcgggtcatggcgtcaaactcaactaagtctttcctggcagatgccggctatggcgaacaggaactggatgccaactctgcccttatggaattggacaaaggcctaagatctggcaaacttggtgaacagtgtgaagcagttgttcgctttcccagactttttcagaagtatccattccctattcttatcaattctgcattcctaaagttagctgatgttttcagagttggaaataatttcctgaggctatgtgttcttaaagttacccaacaaagtgagaaacatttggagaagattctaaatgtggatgaatttgtgaagagaattttttctgtgattcatagtaatgatcctgtggcaagagccatcaccctccggatgttgggaagtctggcatcaataattcctgagaggaagaatgctcatcatagtattcgtcagagtttagattcacatgataatgtagaagttgaagctgctgtttttgctgctgcaaacttctctgcacagtcaaaggattttgctgtaggaatctgtaacaaaatcagtgaaatgattcaaggtttagcgacaccagtagacttgaagctaaaattgatacccattctacagcacatgcaccatgatgcaatcttggcttccagtgctcgtcagcttttacaacagctggtcacatcctatccgtccaccaaaatggtgattgtgtctttgcacactttcactctgcttgcagcgtcatctttggttgatacacctaagcagattcagcttctgttgcagtatttgaagaatgatcccaggaaggcagtaaagagacttgctattcaagatctgaaattacttgctaataaaacaccacatacttggagtagggagaatattcaggcactttgtgagtgtgccctccagactccttatgacagcttaaaactagggatgttgtctgtcctttccacactatcagggaccatcgccatcaaacattacttcagtatagttccaggaaatgtgagttcttctcccagatcttctgatttagtcaaattagcccaagagtgctgttaccataataacaggggcattgcagctcatggagttagagtcctaactaatataactgtttcttgtcaagaaaaggatcttttggcactggaacaagatgctgtctttggcctggaatccctactggtactttgtagtcaagatgatagtccaggtgctcaggccactttaaagattgctctaaactgtatggtgaagttggccaagggcaggccccatcttagccagtcagtagttgagaccttgttgactcaattgcacagtgctcaagacgctgcccggattttgatgtgccattgcctggcagccattgccatgcaactgccggtgctgggtgatgggatgcttggtgacctcatggagctgtacaaggtgattggacgatcagccacagacaagcaacaagaacttctggtgagtttggctactgtgatttttgttgcaagtcagaaggcattgtctgtggaaagtaaggcagtaattaagcagcagcttgaaagtgtctccaatggatggactgtataccgtattgccagacaggcttccagaatgggtaatcatgacatggccaaagagctttatcagagtttgctgactcaggttgcctcagaacatttctacttctggctaaatagtttgaaggagttttcacatgcagaacagtgtctcactgggttgcaagaggaaaattatagttcagcactttcttgcattgctgaatctttaaaattctatcacaaagggattgcttccttaacagcagctagtacaccactgaatcctttaagctttcagtgtgaatttgtaaaactcaggattgaccttttacaagccttctctcaacttatctgtacttgtaatagcctgaagacaagcccaccacctgcaattgccacaacaattgccatgaccttaggaaatgacctccagaggtgtggtcgcatctccaatcagatgaaacagtccatggaagaatttcgaagccttgcttctcgatatggagatctttaccaggcatcttttgatgctgactcagcaactttgaggaatgttgaactacagcagcagagctgtttactgatatctcatgcaatagaagccctgattttggatccagaatcagcaaggtaattctaatattaataatagttggcgttacagaacactttctatacattgtcttacctaatcatcagaagactattttggagctagtactatggaagtaaaaacaaagtggaagaattcttcagcatttttttgtgggtcacataactagtgacaaaacatagatttacctcctgcctcctgttttcaaaaagttaacatggaaagataactgggaagacattctttgaatatgagcaatttcttcttgtatattataattatactacgaaaaattgagttaatgatacaattaaacttgaacttgaaatttttttcc

SEQ ID NO: 424625 - DNA, 2344 bp, Homo sapiens
gcctggtggcgaattcggcacgaggcggaagaaaaaccagcaagaaggcggcgggggaagatggcggtcctggggtagagtttgcaagctttctgactaggctagtcgagtaactattcgggtcatggcgtcaaactcaactaagtctttcctggcagatgccggctatggcgaacaggaactggatgccaactctgcccttatggaattggacaaaggcctaagatctggcaaacttggtgaacagtgtgaagcagttgttcgctttcccagactttttcagaagtatccattccctattcttatcaattctgcattcctaaagttagctgatgttttcagagttggaaataatttcctgaggctatgtgttcttaaagttacccaacaaagtgagaaacatttggagaagattctaaatgtggatgaatttgtgaagagaattttttctgtgattcatagtaatgatcctgtggcaagagccatcaccctccggatgttgggaagtctggcatcaataattcctgagaggaagaatgctcatcatagtattcgtcagagtttagattcacatgataatgtagaagttgaagctgctgtttttgctgctgcaaacttctctgcacagtcaaaggattttgctgtaggaatctgtaacaaaatcagtgaaatgattcaaggtttagcgacaccagtagacttgaagctaaaattgatacccattctacagcacatgcaccatgatgcaatcttggcttccagtgctcgtcagcttttacaacagctggtcacatcctatccgtccaccaaaatggtgattgtgtctttgcacactttcactctgcttgcagcgtcatctttggttgatacacctaagcagattcagcttctgttgcagtatttgaagaatgatcccaggaaggcagtaaagagacttgctattcaagatctgaaattacttgctaataaaacaccacatacttggagtagggagaatattcaggcactttgtgagtgtgccctccagactccttatgacagcttaaaactagggatgttgtctgtcctttccacactatcagggaccatcgccatcaaacattacttcagtatagttccaggaaatgtgagttcttctcccagatcttctgatttagtcaaattagcccaagagtgctgttaccataataacaggggcattgcagctcatggagttagagtcctaactaatataactgtttcttgtcaagaaaaggatcttttggcactggaacaagatgctgtctttggcctggaatccctactggtactttgtagtcaagatgatagtccaggtgctcaggccactttaaagattgctctaaactgtatggtgaagttggccaagggcaggccccatcttagccagtcagtagttgagaccttgttgactcaattgcacagtgctcaagacgctgcccggattttgatgtgccattgcctggcagccattgccatgcaactgccggtgctgggtgatgggatgcttggtgacctcatggagctgtacaaggtgattggacgatcagccacagacaagcaacaagaacttctggtgagtttggctactgtgatttttgttgcaagtcagaaggcattgtctgtggaaagtaaggcagtaattaagcagcagcttgaaagtgtctccaatggatggactgtataccgtattgccagacaggcttccagaatgggtaatcatgacatggccaaagagctttatcagagtttgctgactcaggttgcctcagaacatttctacttctggctaaatagtttgaaggagttttcacatgcagaacagtgtctcactgggttgcaagaggaaaattatagttcagcactttcttgcattgctgaatctttaaaattctatcacaaagggattgcttccttaacagcagctagtacaccactgaatcctttaagctttcagtgtgaatttgtaaaactcaggattgaccttttacaagccttctctcaacttatctgtacttgtaatagcctgaagacaagcccaccacctgcaattgccacaacaattgccatgaccttaggaaatgacctccagaggtgtggtcgcatctccaatcagatgaaacagtccatggaagaatttcgaagccttgcttctcgatatggagatctttaccaggcatcttttgatgctgactcagcaactttgaggaatgttgaactgtatcccaagcttgccctagtacttcttgttctttttggaagtattcttttaaatacggactacctcagatatgcttacctacaaaatacatgttaaataacccta

SEQ ID NO: 424626 - DNA, 2190 bp, Homo sapiens
tcttatagtatgtctccagtcacacgcagaagcagctacgcgaaccttatttccaggaatatggatctactggaacagcccatgctgatagtgaatatgaaagaagaatgatgtctgtatataatcatgtcttggaggaggtagaatcactcaatcggaaatatacccctgtttcttatatgcacacagcatgcctctgcaatgccatcattgctttgctgaaagttcccctttctttccagagatattttttccagaaactacagtctaccagcatcaagcttgctctgtcaccatcgccccggaatcctgcagagcccattgctgtccagaataaccagcagctggcgctaaaggtagagggagtggttcagcacggatctaaaccaggactcttccgcaaaattcagtctgtctgtctgaatgtttcttccacactgcagagtaaatctggacaagactacaagatacccattgacaacatgaccaatgagatggagcaaagggttgaacctcataatgattacttcagtactcaatttctgttgaactttgctatccttggaacacacaacattacagtggaatcttctgtgaaagatgccaatggtatagtatggaagactggtcccagaactaccatatttgtaaaatccctggaagacccttattcccagcaaattcgcttacaacagcagcaagcccagcagccattacagcagcagcagcaacgcaatgcctacacacggttttaaccatggaatgaatgcactgcagactctcaagagatcaatcaaattgccagaaacagtttggtttttcatatggaataagtattaaagttacagtgtagttcatttattcattgatttttgtaatgtaatattctggaaaaaattttgttttcttaaaaattttgtctgacagctgggcgtggttgctcacgcctgtaatcccagcactttgggaggctgaggtgggcggctcacgaggagatcaagaccatcctggctaacacagtgaaaccccgtctccactaaaaaatacaaaaaaattagccaagcatggtggcaggcgcctgtagtcccagctacttgggaggctgaggcaggagaatggtgtgaacctgggaggcggagcttgcagtgagccgagactgtgctccagcctgggcgacagagcgagactccgtctcaaaaaaataaataaatacattttgtctgaaaaataactgggatcctggccagaaagattgttctttcttgttttattattagttttttctgttgccaagcttttttttctttcaagaatagtcacatgttgagatcactgaattggtaaatttgaccgctactcttccaaaatacatcatttgctgcctgacttagacctaggattctgagttgttcattgggaggttctgaccagtcactacaaggtttatccatggtagcagaacctgagtccttctgtagatggacttgaaagtgttccgtgcaacatccagccttctggattatgaaagcccacagtctaacagtattgaaacatcctgctgtattagttcaaccacatatttatctcttcctgtgctaaagcagtctttattattttcatatttaattgaaacaaagagcagctagcaatttcatagaaaattaatttgttttttctgatgtgtctgcaactgtgtataatacagacatttcacattgtttccaaaagtgaagaacactcatttaatatcttcaatgttttaagttagaaggggtggatcttttcctttggttggtgattggtttggtttatacttgatgagttatgctagactgattgtttagagagagcagtctctttattacacaggctcagtttgttgggatgctcagggaacagagttttctggttagccagaaaacccctttttttcctattttaattctggttgaaaaccatgataaaatagactttcttagcacagtatggtagatataacttaactgctttttgattggggatcatttagggcttcaggatcacgatttctaaacatcagggatcatatggttgcagatgccgatgctataagtaatttggccggatgcagctcctaaggtaaagcagggtactttccctggaatttcctttttaaataaatatctgtttctttgcttgtgttttgccttt

SEQ ID NO: 424627 - DNA, 1344 bp, Homo sapiens
actactactactaaattcgcggccgtgtcgaaaaacagaaaaggaggatctgagaatccaagcgatagaatcccttttgtcgtagacagaaagagcaaagtccagagagggcaggcttgaggcccaacagcacacagtaaggccctgtgggtctggcccttgcctattctcattcactgccccttcccactcctgtccagcctgatagactttccttctttttttttttgaaatggagtctcaccttgtcacccagtctggagtacagggatgtgatgactgtagctgagatgacaggcatgtgccaccacacctggctaatttttgtagtttagtagagaagggatttcaccctgttggtcaggctggtctcgaactcctgacctcaggtgatccacccgactcagactcccaaagtgctgggattacaggtgtgagccatcatggccgcctgactctttctgatgcctgagtggctaccttgagtcctgcctggggacccatgcacctgctgttctctttccttcaaggctctactcacaacttcctgttctactctcaaaccttcctgtgacgggctcagtcagatctcagctcacgtatcccctcagagaggacttcccctccctgaccaccctatctgaagtagctcacattcccccactattcatttcggccgttgagtttccttgtagcaattattactgtcaaaaatgatcttatttatttacctgtttattggcttttgacccgttgcctgtcctgttctctgttgtttccccagcatctagaacaataggtgcctgacacaataggtgcttcgtaaatatttattattattattattattttagagacagggtcttgctctgttgccccggctggaatacagtgggatgatcatggctcactgccatctccaactcctgggctcaaacgatcctcccacctccgcctacagagtagctgggactataggtacacagcaccaaattttctgtagagacgggggtcttgctttgtagcccacactagtgttgaactcctggcctcaagtgatcctcctgccttgatgggattacaggtgtgagccaccacacccagcctaaatgtttatttcattggtcagtgtcagaactaggattggaatttagattgttaatctcttgccacaagataggaaaatggagcaagatgaggagaaaaaagcatttaatgggagagaacacccttgtctgaggtcagggacctgggaagcaagcacgactttgccactgtcactgtgtgttacttggacagtgccttattttcccatctgtgaaataaaagagctggataagaacc

SEQ ID NO: 424628 - DNA, 265 bp, Homo sapiens
agatatataggggaatgggccttagtgcatgctccggcgcatgggggcggggaattcgattagcctaaatgtttatttcattggtcagtgtcagaactaggattggaatttagattgttaatctcttgccacaagataggaaaatggagcaagatgaggagaaaaaagcatttaatgggagagaacatttggactcaatcactagtgaattcgcggccgcctgcaggtcgaccatattgggagagctcccaacgcgttggatgca

SEQ ID NO: 424629 - DNA, 267 bp, Homo sapiens
cctgatcactatggggaattgggcgatgtgcatgtccggcgcatgggggcgggtgaatcgattagcctaaatgtttatttcattggtcagtgtcagaactaggattggaatttagattgttaatctcttgccacaagataggaaaatggagcaagatgaggagaaaaaagcatttaatgggagagaacatttggactcaatcactagtgaattcgcggccgcctgcaggtcgaccatattgggagagctcccaacgcgttggatgca

SEQ ID NO: 424630 - DNA, 3218 bp, Homo sapiens
  misc_feature (3034)..(3034): n is a, c, g, or t
tggcctcgaactcctgacctcaggcgatcgacccgctccggcctcccaaagtgctaggattacaggcgtgagccaccgcccctggccaggaatcctgatacctttgggaaccatggtgaatgacatctagacccttctgtcctgaagggagttggtggcccagactctagcagggactatgtctttgtctcctagggagtagaaactggagttactggatgtttagtcctccagggaggctggtagaagtcctgtttcctaattggtggggaggtgtccatgactgggacctgaactccagtataggggagggagacctgagcgccccagggagctggaactcttgggcttcagagcctcagagggaaacagggtctacatttctctgggagaaaaagcctgcacacaggtccccaaggagcagtgggctttgaatcttgatggggtggcggaggcccctggggtctgagacttccggggttctaagatggctgtggaccttggttcctaaatattgggtaaggggaggtctgcatctggaggagggatcgggggcttgtgcgagaaagctggagacttcttgatctctcctggggagtggatgggtttctataattgccctccaaaagcatgtagggagggtggtcccacaaaaatgaggtgaggtgggtaagaggtctgggcatggtgggctctgggagtagccagggaccaggaatgaggtcttttgggtgtggaagggcagtaaagcatacctcagagacagctcctccaaaccttgtattgggatcccggcaactgcctctgtgagtgtgactgggaagggatatgactgccttcatcttctaggtgctgagcaattcaggtgatctctggggagtctgtttctctgtctcttttctttaggagtttctatctttttttggcctttttctcctggtatttaaccataaccctttatggccttggtgttttgtgcaccttccttttcagaagagcagctgtactgctgcactggtccaaacacttctgtatggacacctcgggtatccccaagaggctctgctttctgatgtacatagagggtgctgcattgagccaggggcccaccaaatgggtggtcaggcacttgagaccatgggaatatgccaggagtgaatgaagcaaaggcagaaaccacagtgcctggaatgttctaggctgctagccacatgtgggggaaaagttgcaggttacagaattcttcagtgtcgaaaaacagaaaaggaggatctgagaatccaagcgatagaatcccttttgtcgtagacagaaagagcaaagtccagagagggcaggcttgaggcccaacagcacacagtaaggccctgtgggtctggcccttgcctattctcattcactgccccttcccactcctgtccagcctgatagactttccttctttttttttttgaaatggagtctcaccttgtcacccagtctggagtacagggatgtgatgactgtagctgagatgacaggcatgtgccaccacacctggctaatttttgtagtttagtagagaagggatttcaccctgttggtcaggctggtctcgaactcctgacctcaggtgatccacccgactcagactcccaaagtgctgggattacaggtgtgagccatcatggccgcctgactctttctgatgcctgagtggctaccttgagtcctgcctggggacccatgcacctgctgttctctttccttcaaggctctactcacaacttcctgttctactctcaaaccttcctgtgacgggctcagtcagatctcagctcacgtatcccctcagagaggacttcccctccctgaccaccctatctgaagtagctcacattcccccactattcatttcggccgttgagtttccttgtagcaattattactgtcaaaaatgatcttatttatttacctgtttattggcttttgacccgttgcctgtcctgttctctgttgtttccccagcatctagaacaataggtgcctgacacaataggtgcttcgtaaatatttattattattattattattttagagacagggtcttgctctgttgccccggctggaatacagtgggatgatcatggctcactgccatctccaactcctgggctcaaacgatcctcccacctccgcctacagagtagctgggactataggtacacagcaccaaattttctgtagagacgggggtcttgctttgtagcccacactagtgttgaactcctggcctcaagtgatcctcctgccttgatgggattacaggtgtgagccaccacacccagcctaaatgtttatttcattggtcagtgtcagaactaggattggaatttagattgttaatctcttgccacaagataggaaaatggagcaagatgaggagaaaaaagcatttaatgggagagaacacccttgtctgaggtcagggacctgggaagcaagcacgactttgccactgtcactgtgtgttacttggacagtgccttattttcccatctgtgaaataaaagagctggataagaaccttagttttgagatcctgtctcccttaaaagctgaagacaaaggtaactgatccaagggcagacaagggatggtaccatcatctccagcttggactcccactgctgacaaaatttgtcccttcaaagttgagatagctaccatggggaagagcacttagttctatactgaatggctccaggcattttcatgaaagctctttcagctttggggaagaatattcatccatatctttaccccatcatattagtgtctaagccctgcaatcaggcatgtcagccacgtgatggaatgggagggctgcagggcagcactgtccagtagaaacgaaatgcaagccacatatgtcattttaagttttctttttttgagatggagtttcactccagtctgggcaacagagtgagattccgtctcaagaaaaaaacacagggacatgggaaacaaaatatagctttattacctattncctgggtttagagcgggcatggaaatttgtggaacagtccaaattacagtggaataatacaatacaaaatttataagtatagataattagatttctaatagtaataagtaaactttcaaaaaggccgggggtctatcaatttactaaagagggtacaaattaagggagttcacttaacacatat

SEQ ID NO: 424631 - DNA, 2567 bp, Homo sapiens
tggcctcgaactcctgacctcaggcgatcgacccgctccggcctcccaaagtgctaggattacaggcgtgagccaccgcccctggccaggaatcctgatacctttgggaaccatggtgaatgacatctagacccttctgtcctgaagggagttggtggcccagactctagcagggactatgtctttgtctcctagggagtagaaactggagttactggatgtttagtcctccagggaggctggtagaagtcctgtttcctaattggtggggaggtgtccatgactgggacctgaactccagtataggggagggagacctgagcgccccagggagctggaactcttgggcttcagagcctcagagggaaacagggtctacatttctctgggagaaaaagcctgcacacaggtccccaaggagcagtgggctttgaatcttgatggggtggcggaggcccctggggtctgagacttccggggttctaagatggctgtggaccttggttcctaaatattgggtaaggggaggtctgcatctggaggagggatcgggggcttgtgcgagaaagctggagacttcttgatctctcctggggagtggatgggtttctataattgccctccaaaagcatgtagggagggtggtcccacaaaaatgaggtgaggtgggtaagaggtctgggcatggtgggctctgggagtagccagggaccaggaatgaggtcttttgggtgtggaagggcagtaaagcatacctcagagacagctcctccaaaccttgtattgggatcccggcaactgcctctgtgagtgtgactgggaagggatatgactgccttcatcttctaggtgctgagcaattcaggtgatctctggggagtctgtttctctgtctcttttctttaggagtttctatctttttttggcctttttctcctggtatttaaccataaccctttatggccttggtgttttgtgcaccttccttttcagaagagcagctgtactgctgcactggtccaaacacttctgtatggacacctcgggtatccccaagaggctctgctttctgatgtacatagagggtgctgcattgagccaggggcccaccaaatgggtggtcaggcacttgagaccatgggaatatgccaggagtgaatgaagcaaaggcagaaaccacagtgcctggaatgttctaggctgctagccacatgtgggggaaaagttgcaggttacagaattcttcagtgtcgaaaaacagaaaaggaggatctgagaatccaagcgatagaatcccttttgtcgtagacagaaagagcaaagtccagagagggcaggcttgaggcccaacagcacacagtaaggccctgtgggtctggcccttgcctattctcattcactgccccttcccactcctgtccagcctgatagactttccttctttttttttttgaaatggagtctcaccttgtcacccagtctggagtacagggatgtgatgactgtagctgagatgacaggcatgtgccaccacacctggctaatttttgtagtttagtagagaagggatttcaccctgttggtcaggctggtctcgaactcctgacctcaggtgatccacccgactcagactcccaaagtgctgggattacaggtgtgagccatcatggccgcctgactctttctgatgcctgagtggctaccttgagtcctgcctggggacccatgcacctgctgttctctttccttcaaggctctactcacaacttcctgttctactctcaaaccttcctgtgacgggctcagtcagatctcagctcacgtatcccctcagagaggacttcccctccctgaccaccctatctgaagtagctcacattcccccactattcatttcggccgttgagtttccttgtagcaattattactgtcaaaaatgatcttatttatttacctgtttattggcttttgacccgttgcctgtcctgttctctgttgtttccccagcatctagaacaataggtgcctgacacaataggtgcttcgtaaatatttattattattattattattttagagacagggtcttgctctgttgccccggctggaatacagtgggatgatcatggctcactgccatctccaactcctgggctcaaacgatcctcccacctccgcctacagagtagctgggactataggtacacagcaccaaattttctgtagagacgggggtcttgctttgtagcccacactagtgttgaactcctggcctcaagtgatcctcctgccttgatgggattacaggtgtgagccaccacacccagcctaaatgtttatttcattggtcagtgtcagaactaggattggaatttagattgttaatctcttgccacaagataggaaaatggagcaagatgaggagaaaaaagcatttaatgggagagaacacccttgtctgaggtcagggacctgggaagcaagcacgactttgccactgtcactgtgtgttacttggacagtgccttattttcccatctgtgaaataaaagagctggataagaacc

SEQ ID NO: 424632 - DNA, 3108 bp, Homo sapiens
  misc_feature (2924)..(2924): n is a, c, g, or t
tggcctcgaactcctgacctcaggcgatcgacccgctccggcctcccaaagtgctaggattacaggcgtgagccaccgcccctggccaggaatcctgatacctttgggaaccatggtgaatgacatctagacccttctgtcctgaagggagttggtggcccagactctagcagggactatgtctttgtctcctagggagtagaaactggagttactggatgtttagtcctccagggaggctggtagaagtcctgtttcctaattggtggggaggtgtccatgactgggacctgaactccagtataggggagggagacctgagcgccccagggagctggaactcttgggcttcagagcctcagagggaaacagggtctacatttctctgggagaaaaagcctgcacacaggtccccaaggagcagtgggctttgaatcttgatggggtggcggaggcccctggggtctgagacttccggggttctaagatggctgtggaccttggttcctaaatattgggtaaggggaggtctgcatctggaggagggatcgggggcttgtgcgagaaagctggagacttcttgatctctcctggggagtggatgggtttctataattgccctccaaaagcatgtagggagggtggtcccacaaaaatgaggtgaggtgggtaagaggtctgggcatggtgggctctgggagtagccagggaccaggaatgaggtcttttgggtgtggaagggcagtaaagcatacctcagagacagctcctccaaaccttgtattgggatcccggcaactgcctctgtgagtgtgactgggaagggatatgactgccttcatcttctaggtgctgagcaattcaggtgatctctggggagtctgtttctctgtctcttttctttaggagtttctatctttttttggcctttttctcctggtatttaaccataaccctttatggccttggtgttttgtgcaccttccttttcagaagagcagctgtactgctgcactggtccaaacacttctgtatggacacctcgggtatccccaagaggctctgctttctgatgtacatagagggtgctgcattgagccaggggcccaccaaatgggtggtcaggcacttgagaccatgggaatatgccaggagtgaatgaagcaaaggcagaaaccacagtgcctggaatgttctaggctgctagccacatgtgggggaaaagttgcaggttacagaattcttcagtgtcgaaaaacagaaaaggaggatctgagaatccaagcgatagaatcccttttgtcgtagacagaaagagcaaagtccagagagggcaggcttgaggcccaacagcacacagtaaggccctgtgggtctggcccttgcctattctcattcactgccccttcccactcctgtccagcctgatagactttccttctttttttttttgaaatggagtctcaccttgtcacccagtctggagtacagggatgtgatgactgtagctgagatgacaggcatgtgccaccacacctggctaatttttgtagtttagtagagaagggatttcaccctgttggtcaggctggtctcgaactcctgacctcaggtgatccacccgactcagactcccaaagtgctgggattacaggtgtgagccatcatggccgcctgactctttctgatgcctgagtggctaccttgagtcctgcctggggacccatgcacctgctgttctctttccttcaaggctctactcacaacttcctgttctactctcaaaccttcctgtgacgggctcagtcagatctcagctcacgtatcccctcagagaggacttcccctccctgaccaccctatctgaagtagctcacattcccccactattcatttcggccgttgagtttccttgtagcaattattactgtcaaaaatgatcttatttatttacctgtttattggcttttgacccgttgcctgtcctgttctctgttgtttccccagcatctagaacaataggtgcctgacacaataggtgcttcgtaaatatttattattattattattattttagagacagggtcttgctctgttgccccggctggaatacagtgggatgatcatggctcactgccatctccaactcctgggctcaaacgatcctcccacctccgcctacagagtagctgggactataggtacacagcaccaaattttctgtagagacgggggtcttgctttgtagcccacactagtgttgaactcctggcctcaagtgatcctcctgccttgatgggattacaggtgtgagccaccacacccagcctaaatgtttatttcattggtcagtgtcagaactaggattggaatttagattgttaatctcttgccacaagataggaaaatggagcaagatgaggagaaaaaagcatttaatgggagagaacacccttgtctgaggtcagggacctgggaagcaagcacgactttgccactgtcactgtgtgttacttggacagtgccttattttcccatctgtgaaataaaagagctggataagaaccttagttttgagatcctgtctcccttaaaagctgaagacaaaggtaactgatccaagggcagacaagggatggtaccatcatctccagcttggactcccactgctgacaaaatttgtcccttcaaagttgagatagctaccatggggaagagcacttagttctatactgaatggctccaggcattttcatgaaagctctttcagctttggggaagaatattcatccatatctttaccccatcatattagtgtctaagccctgcaatcaggcatgtcagcctgggcaacagagtgagattccgtctcaagaaaaaaacacagggacatgggaaacaaaatatagctttattacctattncctgggtttagagcgggcatggaaatttgtggaacagtccaaattacagtggaataatacaatacaaaatttataagtatagataattagatttctaatagtaataagtaaactttcaaaaaggccgggggtctatcaatttactaaagagggtacaaattaagggagttcacttaacacatat

SEQ ID NO: 424633 - DNA, 3187 bp, Homo sapiens
  misc_feature (3003)..(3003): n is a, c, g, or t
tggcctcgaactcctgacctcaggcgatcgacccgctccggcctcccaaagtgctaggattacaggcgtgagccaccgcccctggccaggaatcctgatacctttgggaaccatggtgaatgacatctagacccttctgtcctgaagggagttggtggcccagactctagcagggactatgtctttgtctcctagggagtagaaactggagttactggatgtttagtcctccagggaggctggtagaagtcctgtttcctaattggtggggaggtgtccatgactgggacctgaactccagtataggggagggagacctgagcgccccagggagctggaactcttgggcttcagagcctcagagggaaacagggtctacatttctctgggagaaaaagcctgcacacaggtccccaaggagcagtgggcggggtctgagacttccggggttctaagatggctgtggaccttggttcctaaatattgggtaaggggaggtctgcatctggaggagggatcgggggcttgtgcgagaaagctggagacttcttgatctctcctggggagtggatgggtttctataattgccctccaaaagcatgtagggagggtggtcccacaaaaatgaggtgaggtgggtaagaggtctgggcatggtgggctctgggagtagccagggaccaggaatgaggtcttttgggtgtggaagggcagtaaagcatacctcagagacagctcctccaaaccttgtattgggatcccggcaactgcctctgtgagtgtgactgggaagggatatgactgccttcatcttctaggtgctgagcaattcaggtgatctctggggagtctgtttctctgtctcttttctttaggagtttctatctttttttggcctttttctcctggtatttaaccataaccctttatggccttggtgttttgtgcaccttccttttcagaagagcagctgtactgctgcactggtccaaacacttctgtatggacacctcgggtatccccaagaggctctgctttctgatgtacatagagggtgctgcattgagccaggggcccaccaaatgggtggtcaggcacttgagaccatgggaatatgccaggagtgaatgaagcaaaggcagaaaccacagtgcctggaatgttctaggctgctagccacatgtgggggaaaagttgcaggttacagaattcttcagtgtcgaaaaacagaaaaggaggatctgagaatccaagcgatagaatcccttttgtcgtagacagaaagagcaaagtccagagagggcaggcttgaggcccaacagcacacagtaaggccctgtgggtctggcccttgcctattctcattcactgccccttcccactcctgtccagcctgatagactttccttctttttttttttgaaatggagtctcaccttgtcacccagtctggagtacagggatgtgatgactgtagctgagatgacaggcatgtgccaccacacctggctaatttttgtagtttagtagagaagggatttcaccctgttggtcaggctggtctcgaactcctgacctcaggtgatccacccgactcagactcccaaagtgctgggattacaggtgtgagccatcatggccgcctgactctttctgatgcctgagtggctaccttgagtcctgcctggggacccatgcacctgctgttctctttccttcaaggctctactcacaacttcctgttctactctcaaaccttcctgtgacgggctcagtcagatctcagctcacgtatcccctcagagaggacttcccctccctgaccaccctatctgaagtagctcacattcccccactattcatttcggccgttgagtttccttgtagcaattattactgtcaaaaatgatcttatttatttacctgtttattggcttttgacccgttgcctgtcctgttctctgttgtttccccagcatctagaacaataggtgcctgacacaataggtgcttcgtaaatatttattattattattattattttagagacagggtcttgctctgttgccccggctggaatacagtgggatgatcatggctcactgccatctccaactcctgggctcaaacgatcctcccacctccgcctacagagtagctgggactataggtacacagcaccaaattttctgtagagacgggggtcttgctttgtagcccacactagtgttgaactcctggcctcaagtgatcctcctgccttgatgggattacaggtgtgagccaccacacccagcctaaatgtttatttcattggtcagtgtcagaactaggattggaatttagattgttaatctcttgccacaagataggaaaatggagcaagatgaggagaaaaaagcatttaatgggagagaacacccttgtctgaggtcagggacctgggaagcaagcacgactttgccactgtcactgtgtgttacttggacagtgccttattttcccatctgtgaaataaaagagctggataagaaccttagttttgagatcctgtctcccttaaaagctgaagacaaaggtaactgatccaagggcagacaagggatggtaccatcatctccagcttggactcccactgctgacaaaatttgtcccttcaaagttgagatagctaccatggggaagagcacttagttctatactgaatggctccaggcattttcatgaaagctctttcagctttggggaagaatattcatccatatctttaccccatcatattagtgtctaagccctgcaatcaggcatgtcagccacgtgatggaatgggagggctgcagggcagcactgtccagtagaaacgaaatgcaagccacatatgtcattttaagttttctttttttgagatggagtttcactccagtctgggcaacagagtgagattccgtctcaagaaaaaaacacagggacatgggaaacaaaatatagctttattacctattncctgggtttagagcgggcatggaaatttgtggaacagtccaaattacagtggaataatacaatacaaaatttataagtatagataattagatttctaatagtaataagtaaactttcaaaaaggccgggggtctatcaatttactaaagagggtacaaattaagggagttcacttaacacatat

SEQ ID NO: 424634 - DNA, 2529 bp, Homo sapiens
tggcctcgaactcctgacctcaggcgatcgacccgctccggcctcccaaagtgctaggattacaggcgtgagccaccgcccctggccaggaatcctgatacctttgggaaccatggtgaatgacatctagacccttctgtcctgaagggagttggtggcccagactctagcagggactatgtctttgtctcctagggagtagaaactggagttactggatgtttagtcctccagggaggctggtagaagtcctgtttcctaattggtggggaggtgtccatgactgggacctgaactccagtataggggagggagacctgagcgccccagggagctggaactcttgggcttcagagcctcagagggaaacagggtctacatttctctgggagaaaaagcctgcacacaggtccccaaggagcagtgggctttgaatcttgatggggtggcggaggcccctggggtctgagacttccggggttctaagatggctgtggaccttggttcctaaatattgggtaaggggaggtctgcatctggaggagggatcgggggcttgtgcgagaaagctggagacttcttgatctctcctggggagtggatgggtttctataattgccctccaaaagcatgtagggagggtggtcccacaaaaatgaggtgaggtgggtaagaggtctgggcatggtgggctctgggagtagccagggaccaggaatgaggtcttttgggtgtggaagggcagtaaagcatacctcagagacagctcctccaaaccttgtattgggatcccggcaactgcctctgtgagtgtgactgggaagggatatgactgccttcatcttctaggtgctgagcaattcaggtgatctctggggagtctgtttctctgtctcttttctttaggagtttctatctttttttggcctttttctcctggtatttaaccataaccctttatggccttggtgttttgtgcaccttccttttcagaagagcagctgtactgctgcactggtccaaacacttctgtatggacacctcgggtatccccaagaggctctgctttctgatgtacatagagggtgctgcattgagccaggggcccaccaaatgggtggtcaggcacttgagaccatgggaatatgccaggagtgaatgaagcaaaggcagaaaccacagtgcctggaatgttctaggctgctagccacatgtgggggaaaagttgcaggttacagaattcttcagtgtcgaaaaacagaaaaggaggatctgagaatccaagcgatagaatcccttttgtcgtagacagaaagagcaaagtccagagagggcaggcttgaggcccaacagcacacagtaaggccctgtgggtctggcccttgcctattctcattcactgccccttcccactcctgtccagcctgatagactttccttctttttttttttgaaatggagtctcaccttgtcacccagtctggagtacagggatgtgatgactgtagctgagatgacaggcatgtgccaccacacctggctaatttttgtagtttagtagagaagggatttcaccctgttggtcaggctggtctcgaactcctgacctcaggtgatccacccgactcagactcccaaagtgctgggattacaggtgtgagccatcatggccgcctgactctttctgatgcctgagtggctaccttgagtcctgcctggggacccatgcacctgctgttctctttccttcaaggctctactcacaacttcctgttctactctcaaaccttcctgtgacgggctcagtcagatctcagctcacgtatcccctcagagaggacttcccctccctgaccaccctatctgaagtagctcacattcccccactattcatttcggccgttgagtttccttgtagcaattattactgtcaaaaatgatcttatttatttacctgtttattggcttttgacccgttgcctgtcctgttctctgttgtttccccagcatctagaacaataggtgcctgacacaataggtgcttcgtaaatatttattattattattattattttagagacagggtcttgctctgttgccccggctggaatacagtgggatgatcatggctcactgccatctccaactcctgggctcaaacgatcctcccacctccgcctacagagtagctgggactataggtacacagcaccaaattttctgtagagacgggggtcttgctttgtagcccacactagtgttgaactcctggcctcaagtgatcctcctgccttgatgggattacaggtgtgagccaccacacccagcctaaatgtttatttcattggtcagtgtcagaactaggattggaatttagattgttaatctcttgccacaagataggaaaatggagcaagatgaggagaaaaaagcatttaatgggagagaacatttggactcaatcactagtgaattcgcggccgcctgcaggtcgaccatattgggagagctcccaacgcgttggatgca

SEQ ID NO: 424635 - DNA, 1995 bp, Homo sapiens
  misc_feature (1811)..(1811): n is a, c, g, or t
actactactactaaattcgcggccgtgtcgaaaaacagaaaaggaggatctgagaatccaagcgatagaatcccttttgtcgtagacagaaagagcaaagtccagagagggcaggcttgaggcccaacagcacacagtaaggccctgtgggtctggcccttgcctattctcattcactgccccttcccactcctgtccagcctgatagactttccttctttttttttttgaaatggagtctcaccttgtcacccagtctggagtacagggatgtgatgactgtagctgagatgacaggcatgtgccaccacacctggctaatttttgtagtttagtagagaagggatttcaccctgttggtcaggctggtctcgaactcctgacctcaggtgatccacccgactcagactcccaaagtgctgggattacaggtgtgagccatcatggccgcctgactctttctgatgcctgagtggctaccttgagtcctgcctggggacccatgcacctgctgttctctttccttcaaggctctactcacaacttcctgttctactctcaaaccttcctgtgacgggctcagtcagatctcagctcacgtatcccctcagagaggacttcccctccctgaccaccctatctgaagtagctcacattcccccactattcatttcggccgttgagtttccttgtagcaattattactgtcaaaaatgatcttatttatttacctgtttattggcttttgacccgttgcctgtcctgttctctgttgtttccccagcatctagaacaataggtgcctgacacaataggtgcttcgtaaatatttattattattattattattttagagacagggtcttgctctgttgccccggctggaatacagtgggatgatcatggctcactgccatctccaactcctgggctcaaacgatcctcccacctccgcctacagagtagctgggactataggtacacagcaccaaattttctgtagagacgggggtcttgctttgtagcccacactagtgttgaactcctggcctcaagtgatcctcctgccttgatgggattacaggtgtgagccaccacacccagcctaaatgtttatttcattggtcagtgtcagaactaggattggaatttagattgttaatctcttgccacaagataggaaaatggagcaagatgaggagaaaaaagcatttaatgggagagaacacccttgtctgaggtcagggacctgggaagcaagcacgactttgccactgtcactgtgtgttacttggacagtgccttattttcccatctgtgaaataaaagagctggataagaaccttagttttgagatcctgtctcccttaaaagctgaagacaaaggtaactgatccaagggcagacaagggatggtaccatcatctccagcttggactcccactgctgacaaaatttgtcccttcaaagttgagatagctaccatggggaagagcacttagttctatactgaatggctccaggcattttcatgaaagctctttcagctttggggaagaatattcatccatatctttaccccatcatattagtgtctaagccctgcaatcaggcatgtcagccacgtgatggaatgggagggctgcagggcagcactgtccagtagaaacgaaatgcaagccacatatgtcattttaagttttctttttttgagatggagtttcactccagtctgggcaacagagtgagattccgtctcaagaaaaaaacacagggacatgggaaacaaaatatagctttattacctattncctgggtttagagcgggcatggaaatttgtggaacagtccaaattacagtggaataatacaatacaaaatttataagtatagataattagatttctaatagtaataagtaaactttcaaaaaggccgggggtctatcaatttactaaagagggtacaaattaagggagttcacttaacacatat

SEQ ID NO: 424636 - DNA, 956 bp, Homo sapiens
  misc_feature (772)..(772): n is a, c, g, or t
cctgatcactatggggaattgggcgatgtgcatgtccggcgcatgggggcgggtgaatcgattagcctaaatgtttatttcattggtcagtgtcagaactaggattggaatttagattgttaatctcttgccacaagataggaaaatggagcaagatgaggagaaaaaagcatttaatgggagagaacacccttgtctgaggtcagggacctgggaagcaagcacgactttgccactgtcactgtgtgttacttggacagtgccttattttcccatctgtgaaataaaagagctggataagaaccttagttttgagatcctgtctcccttaaaagctgaagacaaaggtaactgatccaagggcagacaagggatggtaccatcatctccagcttggactcccactgctgacaaaatttgtcccttcaaagttgagatagctaccatggggaagagcacttagttctatactgaatggctccaggcattttcatgaaagctctttcagctttggggaagaatattcatccatatctttaccccatcatattagtgtctaagccctgcaatcaggcatgtcagccacgtgatggaatgggagggctgcagggcagcactgtccagtagaaacgaaatgcaagccacatatgtcattttaagttttctttttttgagatggagtttcactccagtctgggcaacagagtgagattccgtctcaagaaaaaaacacagggacatgggaaacaaaatatagctttattacctattncctgggtttagagcgggcatggaaatttgtggaacagtccaaattacagtggaataatacaatacaaaatttataagtatagataattagatttctaatagtaataagtaaactttcaaaaaggccgggggtctatcaatttactaaagagggtacaaattaagggagttcacttaacacatat

SEQ ID NO: 424637 - DNA, 619 bp, Homo sapiens
acaagggatggtaccatcatctccagcttggactcccactgctgacaaaatttgtcccttcaaagttgagatagctaccatggggaagagcacttagttctatactgaatggctccaggcattttcatgaaagctctttcagctttggggaagaatattcatccatatctttaccccatcatattagtgtctaagccctgcaatcaggcatgtcagccacgtgatggaatgggagggctgcagggcagcactgtccagtagaaacgaaatgcaagccacatatgtcattttaagttttctttttttgagatggagtttcactccagtctcacccaggctggagtgcagtggcacgatctcgcctcactgcaacctccgcctcccaggttcatgtgattctcctgcctcagcctcctgagtagctgggattacaggcatatgccaccatgcctggctaatttttgtatttttagtagagatggggtttcaccatgttgatcaggctggtctggaactactgacctcaggccacccgccttggcctcccaaagtgctgggattacaggcatgagccaccgcgcccagctaatttttgtatttttattttatttatttattt

SEQ ID NO: 424638 - DNA, 2380 bp, Homo sapiens
  misc_feature (2196)..(2196): n is a, c, g, or t
tgcaagagcttgttgcttgaagccctgcttttccaaaaagtgggccactctggtcctcttttctttaggagtttctatctttttttggcctttttctcctggtatttaaccataaccctttatggccttggtgttttgtgcaccttccttttcagaagagcagctgtactgctgcactggtccaaacacttctgtatggacacctcgggtatccccaagaggctctgctttctgatgtacatagagggtgctgcattgagccaggggcccaccaaatgggtggtcaggcacttgagaccatgggaatatgccaggagtgaatgaagcaaaggcagaaaccacagtgcctggaatgttctaggctgctagccacatgtgggggaaaagttgcaggttacagaattcttcagtgtcgaaaaacagaaaaggaggatctgagaatccaagcgatagaatcccttttgtcgtagacagaaagagcaaagtccagagagggcaggcttgaggcccaacagcacacagtaaggccctgtgggtctggcccttgcctattctcattcactgccccttcccactcctgtccagcctgatagactttccttctttttttttttgaaatggagtctcaccttgtcacccagtctggagtacagggatgtgatgactgtagctgagatgacaggcatgtgccaccacacctggctaatttttgtagtttagtagagaagggatttcaccctgttggtcaggctggtctcgaactcctgacctcaggtgatccacccgactcagactcccaaagtgctgggattacaggtgtgagccatcatggccgcctgactctttctgatgcctgagtggctaccttgagtcctgcctggggacccatgcacctgctgttctctttccttcaaggctctactcacaacttcctgttctactctcaaaccttcctgtgacgggctcagtcagatctcagctcacgtatcccctcagagaggacttcccctccctgaccaccctatctgaagtagctcacattcccccactattcatttcggccgttgagtttccttgtagcaattattactgtcaaaaatgatcttatttatttacctgtttattggcttttgacccgttgcctgtcctgttctctgttgtttccccagcatctagaacaataggtgcctgacacaataggtgcttcgtaaatatttattattattattattattttagagacagggtcttgctctgttgccccggctggaatacagtgggatgatcatggctcactgccatctccaactcctgggctcaaacgatcctcccacctccgcctacagagtagctgggactataggtacacagcaccaaattttctgtagagacgggggtcttgctttgtagcccacactagtgttgaactcctggcctcaagtgatcctcctgccttgatgggattacaggtgtgagccaccacacccagcctaaatgtttatttcattggtcagtgtcagaactaggattggaatttagattgttaatctcttgccacaagataggaaaatggagcaagatgaggagaaaaaagcatttaatgggagagaacacccttgtctgaggtcagggacctgggaagcaagcacgactttgccactgtcactgtgtgttacttggacagtgccttattttcccatctgtgaaataaaagagctggataagaaccttagttttgagatcctgtctcccttaaaagctgaagacaaaggtaactgatccaagggcagacaagggatggtaccatcatctccagcttggactcccactgctgacaaaatttgtcccttcaaagttgagatagctaccatggggaagagcacttagttctatactgaatggctccaggcattttcatgaaagctctttcagctttggggaagaatattcatccatatctttaccccatcatattagtgtctaagccctgcaatcaggcatgtcagccacgtgatggaatgggagggctgcagggcagcactgtccagtagaaacgaaatgcaagccacatatgtcattttaagttttctttttttgagatggagtttcactccagtctgggcaacagagtgagattccgtctcaagaaaaaaacacagggacatgggaaacaaaatatagctttattacctattncctgggtttagagcgggcatggaaatttgtggaacagtccaaattacagtggaataatacaatacaaaatttataagtatagataattagatttctaatagtaataagtaaactttcaaaaaggccgggggtctatcaatttactaaagagggtacaaattaagggagttcacttaacacatat

SEQ ID NO: 424639 - DNA, 1974 bp, Homo sapiens
cggctccgcgggttccgtgggtcgcccgcgaaatctgatccgggatgcggcggcccaatcggaaggtggaccgaaatcccgcgacagcaagaggcccgtagcgacccgcggtgctaaggaacacagtgctttcaaaagaattggcgtccgctgttcgcctctcctcccgggagtcttctgcctactcccagaagaggagggaagcacaggtgggtttctttagctctgcgtcggatccctgagaacttcgaagccatcctggctgaggctaatctccgctgtgcttcctctgcagtatgaagactttggagactcaaccgttagctccggactgctgtccttcagaccaggacccagctccagcccatccttctccccacgcttccccgatgaataaaaatgcggactctgaactgatgccaccgcctcccgaaaggggggatccgccccggttgtccccagatcctgtggctggctcagctgtgtcccaggagctacgggagggggacccagtttctctctccactcccctggaaacagagtttggttcccctagtgagttgagtcctcgaatcgaggagcaagaactttctgaaaatacaagccttcctgcagaagaagcaaacgggagcctttctgaagaagaagcgaacgggccagagttggggtctggaaaagccatggaagatacctctggggaacccgctgcagaggacgagggagacaccgcttggaactacagcttctcccagctgcctcgatttctcagtggttcctggtcagagttcagcacccaacctgagaacttcttgaaaggctgtaagtgggctcctgacggttcctgcatcttgaccaatagtgctgataacatcttgcgaatttataacctgcccccagagctgtaccatgagggggagcaggtggaatatgcagaaatggtccctgtccttcgaatggtggaaggtgataccatctatgattactgctggtattctctgatgtcctcagcccagccagacacctcctacgtggccagcagcagccgggagaacccgattcatatctgggacgcattcactggagagctccgggcttcctttcgcgcctacaaccacctggatgagctgacggcagcccattcgctctgcttctccccggatggctcccagctcttctgtggcttcaaccggactgtgcgtgttttttccacggcccggcctggccgagactgcgaggtccgagccacatttgcaaaaaagcagggccagagcggcatcatctcctgcatagccttcagcccagcccagcccctctatgcctgtggctcctacggccgctccctgggtctgtatgcctgggatgatggctcccctctcgccttgctgggagggcaccaagggggcatcacccacctctgctttcatcccgatggcaaccgcttcttctcaggagcccgcaaggatgctgagctcctgtgctgggatctccggcagtctggttacccactgtggtccctgggtcgagaggtgaccaccaatcagcgcatctacttcgatctggacccgaccgggcagttcctagtgagtggcagcacgagcggggctgtctctgtgtgggacacggacgggcctggcaatgatgggaagccggagcccgtgttgagttttctgccccagaaggactgcaccaatggcgtgagcctgcaccctagcctgcctctcctggccactgcctccggtcagcgtgtgtttcctgagcccacagagagtggggacgaaggagaggagctgggccttcccttgctctccacgcgccacgtccaccttgaatgtcggcttcagctctggtggtgtgggggggcgccagactccagcatccctgatgatcaccagggcgagaaagggcagggaggaacggagggaggtgtgggtgagctgatataaaaaggtttttatgataaaaaaaaaaacgtgt

SEQ ID NO: 424640 - DNA, 526 bp, Homo sapiens
tgataagcctaggaatgccagagcccagctgtagggtcccagtccctgggtgtgaggggttcctgccccaggggtgaggcctactgccagctaaatctctcctctctcgtcgcacggaccgggcagttcctagtgagtggcagcacgagcggggctgtctctgtgtgggacacggacgggcctggcaatgatgggaagccggagcccgtgttgagttttctgccccagaaggactgcaccaatggcgtgagcctgcaccctagcctgcctctcctggccactgcctccggtcagcgtgtgtttcctgagcccacagagagtggggacgaaggagaggagctgggccttcccttgctctccacgcgccacgtccaccttgaatgtcggcttcagctctggtggtgtgggggggcgccagactccagcatccctgatgatcaccagggcgagaaagggcagggaggaacggagggaggtgtgggtgagctgatataaaaaggtttttatgataaaaaaaaaaacgtgt

SEQ ID NO: 424641 - DNA, 1679 bp, Homo sapiens
cggctccgcgggttccgtgggtcgcccgcgaaatctgatccgggatgcggcggcccaatcggaaggtggaccgaaatcccgcgacagcaagaggcccgtagcgacccgcggtgctaaggaacacagtgctttcaaaagaattggcgtccgctgttcgcctctcctcccgggagtcttctgcctactcccagaagaggagggaagcacagtatgaagactttggagactcaaccgttagctccggactgctgtccttcagaccaggacccagctccagcccatccttctccccacgcttccccgatgaataaaaatgcggactctgaactgatgccaccgcctcccgaaaggggggatccgccccggttgtccccagatcctgtggctggctcagctgtgtcccaggagctacgggagggggacccagtttctctctccactcccctggaaacagagtttggttcccctagtgagttgagtcctcgaatcgaggagcaagaactttctgaaaatacaagccttcctgcagaagaagcaaacgggagcctttctgaagaagaagcgaacgggccagagttggggtctggaaaagccatggaagatacctctggggaacccgctgcagaggacgagggagacaccgcttggaactacagcttctcccagctgcctcgatttctcagtggttcctggtcagagttcagcacccaacctgagaacttcttgaaaggctgtaagtgggctcctgacggttcctgcatcttgaccaatagtgctgataacatcttgcgaatttataacctgcccccagagctgtaccatgagggggagcaggtggaatatgcagaaatggtccctgtccttcgaatggtggaaggtgataccatctatgattactgctggtattctctgatgtcctcagcccagccagacacctcctacgtggccagcagcagccgggagaacccgattcatatctgggacgcattcactggagagctccgggcttcctttcgcgcctacaaccacctggatgagctgacggcagcccattcgctctgcttctccccggatggctcccagctcttctgtggcttcaaccggactgtgcgtgttttttccacggcccggcctggccgagactgcgaggtccgagccacatttggatgctgagctcctgtgctgggatctccggcagtctggttacccactgtggtccctgggtcgagaggtgaccaccaatcagcgcatctacttcgatctggacccgaccgggcagttcctagtgagtggcagcacgagcggggctgtctctgtgtgggacacggacgggcctggcaatgatgggaagccggagcccgtgttgagttttctgccccagaaggactgcaccaatggcgtgagcctgcaccctagcctgcctctcctggccactgcctccggtcagcgtgtgtttcctgagcccacagagagtggggacgaaggagaggagctgggccttcccttgctctccacgcgccacgtccaccttgaatgtcggcttcagctctggtggtgtgggggggcgccagactccagcatccctgatgatcaccagggcgagaaagggcagggaggaacggagggaggtgtgggtgagctgatataaaaaggtttttatgataaaaaaaaaaacgtgt

SEQ ID NO: 424642 - DNA, 1888 bp, Homo sapiens
cggctccgcgggttccgtgggtcgcccgcgaaatctgatccgggatgcggcggcccaatcggaaggtggaccgaaatcccgcgacagcaagaggcccgtagcgacccgcggtgctaaggaacacagtgctttcaaaagaattggcgtccgctgttcgcctctcctcccgggagtcttctgcctactcccagaagaggagggaagcacagtatgaagactttggagactcaaccgttagctccggactgctgtccttcagaccaggacccagctccagcccatccttctccccacgcttccccgatgaataaaaatgcggactctgaactgatgccaccgcctcccgaaaggggggatccgccccggttgtccccagatcctgtggctggctcagctgtgtcccaggagctacgggagggggacccagtttctctctccactcccctggaaacagagtttggttcccctagtgagttgagtcctcgaatcgaggagcaagaactttctgaaaatacaagccttcctgcagaagaagcaaacgggagcctttctgaagaagaagcgaacgggccagagttggggtctggaaaagccatggaagatacctctggggaacccgctgcagaggacgagggagacaccgcttggaactacagcttctcccagctgcctcgatttctcagtggttcctggtcagagttcagcacccaacctgagaacttcttgaaaggctgtaagtgggctcctgacggttcctgcatcttgaccaatagtgctgataacatcttgcgaatttataacctgcccccagagctgtaccatgagggggagcaggtggaatatgcagaaatggtccctgtccttcgaatggtggaaggtgataccatctatgattactgctggtattctctgatgtcctcagcccagccagacacctcctacgtggccagcagcagccgggagaacccgattcatatctgggacgcattcactggagagctccgggcttcctttcgcgcctacaaccacctggatgagctgacggcagcccattcgctctgcttctccccggatggctcccagctcttctgtggcttcaaccggactgtgcgtgttttttccacggcccggcctggccgagactgcgaggtccgagccacatttgcaaaaaagcagggccagagcggcatcatctcctgcatagccttcagcccagcccagcccctctatgcctgtggctcctacggccgctccctgggtctgtatgcctgggatgatggctcccctctcgccttgctgggagggcaccaagggggcatcacccacctctgctttcatcccgatggcaaccgcttcttctcaggagcccgcaaggatgctgagctcctgtgctgggatctccggcagtctggttacccactgtggtccctgggtcgagaggtgaccaccaatcagcgcatctacttcgatctggacccgaccgggcagttcctagtgagtggcagcacgagcggggctgtctctgtgtgggacacggacgggcctggcaatgatgggaagccggagcccgtgttgagttttctgccccagaaggactgcaccaatggcgtgagcctgcaccctagcctgcctctcctggccactgcctccggtcagcgtgtgtttcctgagcccacagagagtggggacgaaggagaggagctgggccttcccttgctctccacgcgccacgtccaccttgaatgtcggcttcagctctggtggtgtgggggggcgccagactccagcatccctgatgatcaccagggcgagaaagggcagggaggaacggagggaggtgtgggtgagctgatataaaaaggtttttatgataaaaaaaaaaacgtgt

SEQ ID NO: 424643 - DNA, 2003 bp, Homo sapiens
cggctccgcgggttccgtgggtcgcccgcgaaatctgatccgggatgcggcggcccaatcggaaggtggaccgaaatcccgcgacagcaagaggcccgtagcgacccgcggtgctaaggaacacagtgctttcaaaagaattggcgtccgctgttcgcctctcctcccgggagtcttctgcctactcccagaagaggagggaagcacagtatgaagactttggagactcaaccgttagctccggactgctgtccttcagaccaggacccagctccagcccatccttctccccacgcttccccgatgaataaaaatgcggactctgaactgatgccaccgcctcccgaaaggggggatccgccccggttgtccccagatcctgtggctggctcagctgtgtcccaggagctacgggagggggacccagtttctctctccactcccctggaaacagagtttggttcccctagtgagttgagtcctcgaatcgaggagcaagaactttctgaaaatacaagccttcctgcagaagaagcaaacgggagcctttctgaagaagaagcgaacgggccagagttggggtctggaaaagccatggaagatacctctggggaacccgctgcagaggacgagggagacaccgcttggaactacagcttctcccagctgcctcgatttctcagtggttcctggtcagagttcagcacccaacctgagaacttcttgaaaggctgtaagtgggctcctgacggttcctgcatcttgaccaatagtgctgataacatcttgcgaatttataacctgcccccagagctgtaccatgagggggagcaggtggaatatgcagaaatggtccctgtccttcgaatggtggaaggtgataccatctatgattactgctggtattctctgatgtcctcagcccagccagacacctcctacgtggccagcagcagccgggagaacccgattcatatctgggacgcattcactggagagctccgggcttcctttcgcgcctacaaccacctggatgagctgacggcagcccattcgctctgcttctccccggatggctcccagctcttctgtggcttcaaccggactgtgcgtgttttttccacggcccggcctggccgagactgcgaggtccgagccacatttgcaaaaaagcagggccagagcggcatcatctcctgcatagccttcagcccagcccagcccctctatgcctgtggctcctacggccgctccctgggtctgtatgcctgggatgatggctcccctctcgccttgctgggagggcaccaagggggcatcacccacctctgctttcatcccgatggcaaccgcttcttctcaggagcccgcaaggatgctgagctcctgtgctgggatctccggcagtctggttacccactgtggtccctgggtcgagaggtgaccaccaatcagcgcatctacttcgatctggacccgaccgggcagttcctagtgagtggcagcacgagcggggctgtctctgtgtgggacacggacgggcctggcaatgatgggaagccggagcccgtgttgagttttctgccccagaaggactgcaccaatggcgtgaggtcctcagttcaattccagagatgttggggcttgggttggggagggaggtgaatcccagagggagcaagtgtcctcactgaaggcactgatagaccctccccatctctccctcagcctgcaccctagcctgcctctcctggccactgcctccggtcagcgtgtgtttcctgagcccacagagagtggggacgaaggagaggagctgggccttcccttgctctccacgcgccacgtccaccttgaatgtcggcttcagctctggtggtgtgggggggcgccagactccagcatccctgatgatcaccagggcgagaaagggcagggaggaacggagggaggtgtgggtgagctgatataaaaaggtttttatgataaaaaaaaaaacgtgt

SEQ ID NO: 424644 - DNA, 1976 bp, Homo sapiens
ttcagggacctccagcagagaagggtcactaggatacaatgtggcatgcatgagctaaaaacagaagtgatttaactctcagagggaaaatggatcagataacacttcatggagatgacgacatctggttcatttttgaagagtgaatagaaagatcccagccctccataccaagagaataactcctgcaaacattttctgacctggtgcctgaccaatggaccacacatcatcaggaaggctagaaagttgagttccaggagggaatgatagaaggcaaagcctagagagatggcaggggccagacttcaggggcctggggatgtgtacttgcactccaagtcgaggagactgaactttttaccaaagacttggtgttctgtagaagtatgagcagatgagtgacaagatctggtttatatgttaagaagttctcagctgtaaggtgaatagattggaggtgttggggcaaaggcaggggacccagtgaagacaaggagcgaggctctatactgaggccctggtagaagtggagcagatgggccacctgaagagctactaggaagttgacaccaataagatgtcgttagtctgtgtatggggagtgagggaaaggaagaacttgccagtttccaggttttaatccttccaaaggatttctgcacgaaagacactggaagagctgtattcctacttatccttaaaggaaagaaactgcccttgaattccaaggacctgattactggagctggaattccaaataatgtgtcccagtgagactcctgggggtagttttgtccggtaactgtgtgtgttagatgaaactgcagacttccagccactctatcttaccatgtctgttaacagttaatttgctctgatgaatttgcccatcttggagaagggggctctgctgactgttttttatcttggagtaaatgtcctttgattaggaaggttctagactatattgttaaaacaacattggaaggctgggcatggtggctcatgcctgtaatcccaacactttgggaggccaaggcaggcgtatcgtttgagcccaggagttcaagaccagcctgggcaacatgacaaaactctctctactaaaaatacaaaattagccaggcatggtggagtgcgcctgtattcccagccacttaggaggctgaggtgggagaaccacctgagcccaggaagttgaggctgcattgagccatgatcgtaccactgcactgcagctaggtgacagcaaaaccctgtctcaaaaaaacaccaaacaacataggatactgttatataacagctagttcctatacctgtaatcttattaattcatttaaaatacatcagtgcgggccgggtgtggtggctcacacttataatcccaacactttggaaggccaaggcgggaggatcacttgaagccacaaatttaagaccagcctggataatatagcgagaccctgtctctacaaaaaaaataaataaagaaaaaataaaatatgtcagtgtgttttgggaacaggttgagagcatagcatgctcatattatatattcattttaccacttagatttgaattgaggcatctcttagaataggttttattttgtgcataccctcagaggacattgtccctctcatagaaacagatattcaaacatgtaatctgctattttattttaaggtaatagatttttatgattactgtttggaaaaaaaaaaagcaactataggttagcagttgctccagaatctccaaaacaagcttaggagatttttattctttaccagaaatgagatggcttgggaggaaggtgtgtgcattacacacaggttgctctgtggtcactgctccttcatactgtgtttctgcctctgcctgaacccaaacccctcccagcctgacagaaatgttcgcttacgcagctaggccctgcctcagtttgtacatctacctgtcggctgagacat

SEQ ID NO: 424645 - DNA, 1802 bp, Homo sapiens
ttcagggacctccagcagagaagggtcactaggatacaatgtggcatgcatgagctaaaaacagaagtgatttaactctcagagggaaaatggatcagataacacttcatggagatgacgacatctggttcatttttgaagagtgaatagaaagatcccagccctccataccaagagaataactcctgcaaacattttctgacctggtgcctgaccaatggaccacacatcatcaggaaggctagaaagttgagttccaggagggaatgatagaaggcaaagcctagagagatggcaggggccagacttcaggggcctggggatgtgtacttgcactccaagtcgaggagactgaactttttaccaaagacttggtgttctgtagaagtatgagcagatgagtgacaagatctggtttatatgttaagaagttctcagctgtaaggtgaatagattggaggtgttggggcaaaggcaggggacccagtgaagacaaggagcgaggctctatactgaggccctggtagaagtggagcagatgggccacctgaagagctactaggaagttgacaccaataagatgtcgttagtctgtgtatggggagtgagggaaaggaagaacttgccagtttccaggttttaatccttccaaaggatttctgcacgaaagacactggaagagctgtattcctacttatccttaaaggaaagaaactgcccttgaattccaaggacctgattactggagctggaattccaaataatgtgtcccagtgagactcctgggggtagttttgtccggtaactgtgtgtgttagatgaaactgcagacttccagccactctatcttaccatgtctgttaacagttaatttgctctgatgaatttgcccatcttggagaagggggctctgctgactgttttttatcttggagtaaatgtcctttgattaggaaggttctagactatattgttaaaacaacattggaaggctgggcatggtggctcatgcctgtaatcccaacactttgggaggccaaggcaggcgtatcgtttgagcccaggagttcaagaccagcctgggcaacatgacaaaactctctctactaaaaatacaaaattagccaggcatggtggagtgcgcctgtattcccagccacttaggaggctgaggtgggagaaccacctgagcccaggaagttgaggctgcattgagccatgatcgtaccactgcactgcagctaggtgacagcaaaaccctgtctcaaaaaaacaccaaacaacataggatactgttatataacagctagttcctatacctgtaatcttattaattcatttaaaatacatcagtgcgggccgggtgtggtggctcacacttataatcccaacactttggaaggccaaggcgggaggatcacttgaagccacaaatttaagaccagcctggataatatagcgagaccctgtctctacaaaaaaaataaataaagaaaaaataaataccaagttatgagtgtcagagcaggggagccctccacgcagccacggagccagtctgagggaagaggtacataggatagaaaaatctctaggctccaacgcttctgcttcggtgtctttccatttcccagggtctatgtgttgccttctcttcattttccagcaaaattccttttgagatatgttggccttcactcggctgaactagggggtgaaggaaggttgtcctctgtgggccactattgctggggaaacagctaaaccctgtaggccaagtggaacttggaggtgccaagaaa

SEQ ID NO: 424646 - DNA, 280 bp, Homo sapiens
tctcaaactcctgacctcaggtgatccgcctacctcccaaggtgctgggattaaaggcgtgagccaccgcgcctagcatatgtttatttttaatttagaactcatcgtggcttgtctatatacattgaaataatgatgtgacacacaaactgttgtgaaaaatgtcagttactttgaatgtaagcattttttccaaaatcacttatgtgtctaaaccaattccttctataaatcagtaagaaaatgataaaacaattcaacaggaaaatgaacaaaggcc

SEQ ID NO: 424647 - DNA, 2690 bp, Homo sapiens
tctcattggagacaaaaacttgtcatctggctttgtagagaaggttgcaccttacgctcataatagattatctttactatgggctagggtatcatatttatttatttatttatttttatttttttattattatactttaagttttagggtacatgtgcacaacgtgcaggtttgttacatatgtgtacagggtatcatatttaaaaggacaaaaaaaaagcaacgtcaaatacttgaatgagcttgtattataacattaatattattgaaggtatctgctttccaggccaaattgattcatttattattatagtcctgctttagtcctttgtactttgtggtaattatgctttccttttcaataccaaaaaaaaaagtgtataaaaataaaaacttgggccaggcccagtggctcaagcctgtaataccagcactttgggaggccaaaccctgtgatgccgtgttgaataggagtactttctcaccacacttgtcttccttccgcctctatgggaatccttccaaaacggcaccattaagtgttatactcgctgtagctcctccttatgaagttctcttctcattgtagtctgttaagtgtttatgattaaagagtgttatattttgttaaatgctttcgcagtatctttggagatgatcatgttttttctttattaatctcttttttattttatttattttattttattttattttattttttattattttagtttttattttgagatggaatctcactctgtctcccaggctggagtgcagtgccctgatctaagctcattacaacctctacctcccaggttcaagcgattcttctgcctcactttcccaagtaacagggactacaggtgcgtgccaccacatctggctaagttttgtattatcagaagaagataggccgccattggccaggctggccttgaactcctgacattaagtgatccacctgcctcagcctcctaaagtgctaggaatacaggcgtgagccactgctctgggccttcctttattaatttcttaaactggcagatttagaatactaaacttccttctattcttagaataaaccctatataatcagctatttatttaaataacatggtctctgcaatttctcctggtttccattttttctcataataggcatttttttctaaaaaacaaaaatgaatgttcattagtgagacaaaactataattttgtttttttcttctttctctcttccttcctttttaaaatttgtattctccagttttgctaataatgttatacaattttacaagaaaaaagtgagtaggagagctgtttttctatagtaacagattctgtgaaataggtatcatgccaggtgaggtggcacgtccctgtagtcccagctactcaggaggtgaagcagaaggaccacttgagcccaggaattggagactgtagtgtgctgccatcatgcctgtgtatagcttctgcgctacagcctaggcaacgtagcgagaaccatctcagaaaaaaaaaaaaaaaaaaagagataatctattcctcataaattcactaaaacttggaatatctgaccggacttggcagcatttgggtggaaggacgtagaaaatattttttaactgcctaccttattttcataatcataatttgtttagtcagcttgtctattttcttctttttcttgaaaattattttccactgagtttaattttttgtaaaagttacacagcattctcttgtcattctttatatctccctttttgtagttatgttccttaatttctgtaactttctgaaaccagggttaatttgttttgaaattgtccaacgtgtgctttgaaaaaaagaagggatgttttctgtgtcaaatgaaggtaatcatagatcaaatttgcttattgtcttgttcaaatcctagaaaaccattagcatttttctttgcttgtaatatgagaatctaacactcatacagaatattgaaaggttaccctacaattgtaaatttgaaattctccttctaattctgtcagttatttattgacatagtagtggttctgtagtcaagtgcatataaggttttgaatgttacatcttatttttggatttttattttatcattatggagtatagcaaagttctattttgttctttttcaaatgtacttggttttgattatcccttggtccttgattgttttattattctattttttatttcattaaactttcagtaaatagtgatttttatagtctgtatctaatcatttcaatatctgaaatcctttgtttgcctagggatctaggaggaaatagaaggctctttgcttataagccaaactctccatagtgtctgtttttcttcgattttgtgacatttgttatgaacttatatttaaacatcctaagttcctgacagagtgtctggcatataataggtgttcagtaaatgattgctccataaatagataatgtgtgtagatgtagagaacttgggttcaagatactttcttcctgtagggatttgttttgtcttcatcaggcacaagggggcactataagcccgagtcagtttaatttcaggccttcttcactggaactcaagacttcatttatacttagggttaaatctttggggccaattttctccatccacctcctcagagtcagagtcctgta

SEQ ID NO: 424648 - DNA, 2398 bp, Homo sapiens
attgcccactaattccaattcttatttgatctaattgtttatagattcttgtgaacttttaccttgacaattatgttattttcaaagataatcatcttttcctattgaatccttgctcttctgactgcctgttcctatctcatggtattggccaaaccctgtgatgccgtgttgaataggagtactttctcaccacacttgtcttccttccgcctctatgggaatccttccaaaacggcaccattaagtgttatactcgctgtagctcctccttatgaagttctcttctcattgtagtctgttaagtgtttatgattaaagagtgttatattttgttaaatgctttcgcagtatctttggagatgatcatgttttttctttattaatctcttttttattttatttattttattttattttattttattttttattattttagtttttattttgagatggaatctcactctgtctcccaggctggagtgcagtgccctgatctaagctcattacaacctctacctcccaggttcaagcgattcttctgcctcactttcccaagtaacagggactacaggtgcgtgccaccacatctggctaagttttgtattatcagaagaagataggccgccattggccaggctggccttgaactcctgacattaagtgatccacctgcctcagcctcctaaagtgctaggaatacaggcgtgagccactgctctgggccttcctttattaatttcttaaactggcagatttagaatactaaacttccttctattcttagaataaaccctatataatcagctatttatttaaataacatggtctctgcaatttctcctggtttccattttttctcataataggcatttttttctaaaaaacaaaaatgaatgttcattagtgagacaaaactataattttgtttttttcttctttctctcttccttcctttttaaaatttgtattctccagttttgctaataatgttatacaattttacaagaaaaaagtgagtaggagagctgtttttctatagtaacagattctgtgaaataggtatcatgccaggtgaggtggcacgtccctgtagtcccagctactcaggaggtgaagcagaaggaccacttgagcccaggaattggagactgtagtgtgctgccatcatgcctgtgtatagcttctgcgctacagcctaggcaacgtagcgagaaccatctcagaaaaaaaaaaaaaaaaaaagagataatctattcctcataaattcactaaaacttggaatatctgaccggacttggcagcatttgggtggaaggacgtagaaaatattttttaactgcctaccttattttcataatcataatttgtttagtcagcttgtctattttcttctttttcttgaaaattattttccactgagtttaattttttgtaaaagttacacagcattctcttgtcattctttatatctccctttttgtagttatgttccttaatttctgtaactttctgaaaccagggttaatttgttttgaaattgtccaacgtgtgctttgaaaaaaagaagggatgttttctgtgtcaaatgaaggtaatcatagatcaaatttgcttattgtcttgttcaaatcctagaaaaccattagcatttttctttgcttgtaatatgagaatctaacactcatacagaatattgaaaggttaccctacaattgtaaatttgaaattctccttctaattctgtcagttatttattgacatagtagtggttctgtagtcaagtgcatataaggttttgaatgttacatcttatttttggatttttattttatcattatggagtatagcaaagttctattttgttctttttcaaatgtacttggttttgattatcccttggtccttgattgttttattattctattttttatttcattaaactttcagtaaatagtgatttttatagtctgtatctaatcatttcaatatctgaaatcctttgtttgcctagggatctaggaggaaatagaaggctctttgcttataagccaaactctccatagtgtctgtttttcttcgattttgtgacatttgttatgaacttatatttaaacatcctaagttcctgacagagtgtctggcatataataggtgttcagtaaatgattgctccataaatagataatgtgtgtagatgtagagaacttgggttcaagatactttcttcctgtagggatttgttttgtcttcatcaggcacaagggggcactataagcccgagtcagtttaatttcaggccttcttcactggaactcaagacttcatttatacttagggttaaatctttggggccaattttctccatccacctcctcagagtcagagtcctgta

SEQ ID NO: 424649 - DNA, 1952 bp, Homo sapiens
agactcgaattgactagtgtctttttgaaaaaagaaaaagaggccaggcacagtggctcacgcctgtaatcccagcactttgggaggctgaggcaggcggatcacctgagctcaggagttcgagaccagcctggccaatatggtgaaaccccatctctactaaaaatacaaaaatcatccaggcatggtggcatgcacctgtaatctcaactactcaggaggctgaggcaggagaatcgcttcaacccaggaggcagaggttgcattgagccaagatcacgcaattgtcctccagtctgggcaacaagagtgaaactccatgtttaacgtcggcccggcgcgcgcgtccgggaggttgcccgtaggccgctaactggtggttcccagtccccgccgactcggcctctttcttctgcggccaccagatcgcgggatatcggagacttcgaacaatccgctggagtcctttacagtttaaaaacagaggaccggccgggcgcggtggctcacgcctgtaatcccagcactttgggaggccgaggcgggcggatcacgagttcaggagatagagaccatcctggctaacaccgtgagaccccgtccctatcaaaagtacaaaaaaattagccgggtgtggtggcacgcgcctgtagtcccagctactcaggaggtgaagcagaaggaccacttgagcccaggaattggagactgtagtgtgctgccatcatgcctgtgtatagcttctgcgctacagcctaggcaacgtagcgagaaccatctcagaaaaaaaaaaaaaaaaaaagagataatctattcctcataaattcactaaaacttggaatatctgaccggacttggcagcatttgggtggaaggacgtagaaaatattttttaactgcctaccttattttcataatcataatttgtttagtcagcttgtctattttcttctttttcttgaaaattattttccactgagtttaattttttgtaaaagttacacagcattctcttgtcattctttatatctccctttttgtagttatgttccttaatttctgtaactttctgaaaccagggttaatttgttttgaaattgtccaacgtgtgctttgaaaaaaagaagggatgttttctgtgtcaaatgaaggtaatcatagatcaaatttgcttattgtcttgttcaaatcctagaaaaccattagcatttttctttgcttgtaatatgagaatctaacactcatacagaatattgaaaggttaccctacaattgtaaatttgaaattctccttctaattctgtcagttatttattgacatagtagtggttctgtagtcaagtgcatataaggttttgaatgttacatcttatttttggatttttattttatcattatggagtatagcaaagttctattttgttctttttcaaatgtacttggttttgattatcccttggtccttgattgttttattattctattttttatttcattaaactttcagtaaatagtgatttttatagtctgtatctaatcatttcaatatctgaaatcctttgtttgcctagggatctaggaggaaatagaaggctctttgcttataagccaaactctccatagtgtctgtttttcttcgattttgtgacatttgttatgaacttatatttaaacatcctaagttcctgacagagtgtctggcatataataggtgttcagtaaatgattgctccataaatagataatgtgtgtagatgtagagaacttgggttcaagatactttcttcctgtagggatttgttttgtcttcatcaggcacaagggggcactataagcccgagtcagtttaatttcaggccttcttcactggaactcaagacttcatttatacttagggttaaatctttggggccaattttctccatccacctcctcagagtcagagtcctgta

SEQ ID NO: 424650 - DNA, 1229 bp, Homo sapiens
tctcattggagacaaaaacttgtcatctggctttgtagagaaggttgcaccttacgctcataatagattatctttactatgggctagggtatcatatttatttatttatttatttttatttttttattattatactttaagttttagggtacatgtgcacaacgtgcaggtttgttacatatgtgtacagggtatcatatttaaaaggacaaaaaaaaagcaacgtcaaatacttgaatgagcttgtattataacattaatattattgaaggtatctgctttccaggccaaattgattcatttattattatagtcctgctttagtcctttgtactttgtggtaattatgctttccttttcaataccaaaaaaaaaagtgtataaaaataaaaacttgggccaggcccagtggctcaagcctgtaataccagcactttgggaggccaaaccctgtgatgccgtgttgaataggagtactttctcaccacacttgtcttccttccgcctctatgggaatccttccaaaacggcaccattaagtgttatactcgctgtagctcctccttatgaagttctcttctcattgtagtctgttaagtgtttatgattaaagagtgttatattttgttaaatgctttcgcagtatctttggagatgatcatgttttttctttattaatctcttttttattttatttattttattttattttattttattttttattattttagtttttattttgagatggaatctcactctgtctcccaggctggagtgcagtgccctgatctaagctcattacaacctctacctcccaggttcaagcgattcttctgcctcactttcccaagtaacagggactacaggtgcgtgccaccacatctggctaagttttgtattatcagaagaagataggccgccattggccaggctggccttgaactcctgacattaagtgatccacctgcctcagcctcctaaagtgctaggaatacaggcgtgagccactgctctgggccttcctttattaatttcttaaactggcagatttagaatactaaacttccttctattcttagaataaaccctatataatcagctatttatttaaataacatggtctctgcaatttctcctggtttccattttttctcataatgaacattcatttttgttttttagaaaaaaatgcctattatgagaaaaaagtcaacgcggccgcgaat

SEQ ID NO: 424651 - DNA, 341 bp, Homo sapiens
gaggtcctagatatcttccaaagacatcccaacagctaaacaataagtgatattccatataatttcccatatatcatgacatctttattaggaaattgtgttttaatgtatctgtgaaagtcctttatgattctcatagataatggtagaaaaactgtcagaaatgtttgttaaatgaatagacaagagagagaatgagaaaggagagagagagaaggaaagaaggggataaagaattgagaagagtgctactaaccaggctaagattatggaataagaaagattttatagactcaaaattatcctggtagtcaacagtccattccaataagccagcgtct

SEQ ID NO: 424652 - DNA, 513 bp, Homo sapiens
caaacaatctcattatatttctaaagaaatatgtttccacatcataagaactggggaaacttaggatacaatcaataattctttattttaagaaagcatactgtcaagataagttattacatgaagataatgattttaaaccacataatattggttgatttggatccttaatcaataaaaattagcaaatctatttaaatgataatcagagctcctagattagaaataattttgatgaagcggtcctttaaagtaaatgccagacatgattgaaaatgtcacaaaaggaatcggaatttcctcctgatgcccaacctgacagtacgacttgcccaggaattacacattcttattgagaggagagtggagccagataggcacagacatttctgcaaatttatatgactcttttcagtttttaacagtaagactggtaagcatttctatattaaaaaatgtcttaaggaaaaataaaattttattccagatacttatgtttcatcattagagcta

SEQ ID NO: 424653 - DNA, 3258 bp, Homo sapiens
tttggtgctatgtaattgtaattaatttcatgtcattttcattgctttatttcctcaacatggtacctacatcacagggcttttgtaagaattaaatgagataacatagataaaagtaaagcaatcatttttaaagttcggttttaaaaacccacccacttttgcaaatcagactctgtgtttttaatcagacagttgaaactagggcagttgaccgttggggcacttgatttgctaaacgaaatctctcagtcttgtgaagtgggaaccatgtgaccctctgactcaggttttgtgttcttcctagtggaaggagcctgggagaggccaggcctccccggactgctagcctgcttttcctggggtccctggagccggaggaagaaccaggatgttgctgcctgcagaagctcagctcaggaagacttccaggaacctgaggaggagctgccactaacagccatatttcccaatggagactgtgatgaccttggaagggggtcaaaagcctgtgatggagtcgtacacactcctgctgagcccaccggagactcaagatgaaggctggacccttgcgctgtccctggctctaacctacagactggggcctggctccgtcttactggcccccaggtctccatggagactgcagaaacccccgcctgctggaggcctgccacactcacagttaccagctagacagtggggcttactaagacaagcaggacctaaaacagtgtctcccctgggaacctactccccacccagcatttgctaagtctgatcacagggaggttattttgtctctctgtctcggtttctctgagccactgagacagatggctgtccgctttgaggctctgcagagctgtggcaccccatggtgtgtctgcagtgttctgggcacatgcatgggcacccatcgttgagagtgcagctgggaagaactctgaaccagaagtcatcagagctgaggcatggccttgaacatgtcactcagtctctggggcttctgtttcacaaatgcatgagggggccaccagcccagtggctttaaaccaggggcaggttgtccctccaggcagcattggaaatgtgtgtgtgttgagggggtcacagtgactgtgggggcacccctggcatctagtgggcatcccacaatgtgcagaacagtctctgacagcaaagaattggtccattcaatgccaattgtagtacctttgagacattctggctgagccaatgccttctccctgtcagagtcccccagagcagagagggtcaggcttccctggaccttggctcccagagcaagccaaaataaagactacactgttgccttgggggcttgtcgggccagggccaagacggtctgcgtgctgcagggccaggacagaaatagccacacatgccggtgagaacaaagagcctctttctttctcatgttgacatcgactttctgtgccaagtcctttgggtataaggatgctagggaattcctataggcaccaaacagaaggaaagctaggggcttggactactgggtataggacttgctctagctctcaggtcctagcccaagctcaatgcaaacacagcccctccgggctctctgtttctgtgaggttctggaatcccttcctctgtgtccgtgagtctgacagaatcgatgatgttcccttagagctgggaaatccatgtgtttattcacggagggaactcaccattacctcccttgtcttctttgcctgccttggagaaatccagagtcttcggaatggcaaaggcagctcctggatttccctggaggggaggcactagctgagggaagtagctcccttcattcatgatgcacagtttacgcagcagacacacaactgcgcctactatttgctcggtgccctgcaaggtgctgcctaactttgatttgttatttcagctctctccaggatagtgccaaatggtgcaatgggaaacctgttttgctggggggctctagatcactggctccagaactcccggctgccagggtagcccctacccccagccccttgctcctggacagcagtgggtctcacctttagcctctgcccccagttctggtctgacccaacagaggggctctatgatattaagaaggggcccttcctgctctgtgcctcaacctattctccataatagggagtctaatcctattccttccctgcctgatgaggatggtgtgaggatgaggaggacggcatctcatttggggctttttggcagtgggcctcattttaatcctgcagggctgcctgccagtggatctatccagctgcttccttgtagccaagaatgagttcaatgaattgtgattcactgattttattgattttgttttaaaacagggagactggtatttttgaagctgctatcattttctatttctttattaatttctttgtaatcatcttattaaagttttcttatttagtgggagagggagctttgtttaagtttggaatttgcctaaggcagaagttataaggcttcataaccttttgtatgtattgccaatatttgaaacttgggagattacgtataaaaaatacctagttttctgggtggaggatggggcatgctgtcatctcaagtctgctgcggctcacccccaccacctttaccccctcccccgcccttcccatcccccactgcacttcactcatgtaagacgtctgcccggtgctggtccaggcgggcatgtgagtttgtagcctctgctccaaaggatggtttacacattattttttcattaccttcagtattcctgtgaatggttcaagagagaaagtcttcatttactaagatttgggttctgcctcccaagtgacaatacggggctgagatccctctcagcttctttgagatgtggccaccataagcatcatcgttgtagggacagtctcattgctgtcttctagcagacagaagagttaggtgccagaaaggacaatcttgatggtgggtcccctccctgaaggactttaagaaggcataaaggggttggggtggagggtggcgtgtgaaggaggaggcccttgattaggtcagtggtccctgggagccatcggcgagaggcctccagccgggtgacagtctgggctctcgggtactaatctttctaatatggcagtggttgtggcacttctgacttgaattgataattctcatatctaataaaaccaagaagtacctcgttgatatcttatagaaaaaaaa

SEQ ID NO: 424654 - DNA, 3116 bp, Homo sapiens
  misc_feature (14)..(14): n is a, c, g, or t
  misc_feature (27)..(27): n is a, c, g, or t
  misc_feature (48)..(48): n is a, c, g, or t
  misc_feature (65)..(65): n is a, c, g, or t
  misc_feature (98)..(98): n is a, c, g, or t
  misc_feature (128)..(128): n is a, c, g, or t
  misc_feature (153)..(153): n is a, c, g, or t
  misc_feature (179)..(179): n is a, c, g, or t
  misc_feature (187)..(187): n is a, c, g, or t
ctaatgccaaaggnctcattcaattantcgaattttgaaggcatggtnggcctcttgtattacantgcaaagggattctgaagcattagttggtagcnaggttttcaagttacgacgttgtaaacganggcaagtgcaacttaaattaccctnactaaagggaataactttcggccgcntgcagggncctgcaagccgccggagccgggcaaccagtggaaggagcctgggagaggccaggcctccccggactgctagcctgcttttcctggggtccctggagccggaggaagaaccaggatgttgctgcctgcagaagctcagctcaggaagacttccaggaacctgaggaggagctgccactaacagccatatttcccaatggagactgtgatgaccttggaagggggtcaaaagcctgtgatggagtcgtacacactcctgctgagcccaccggagactcaagatgaaggctggacccttgcgctgtccctggctctaacctacagactggggcctggctccgtcttactggcccccaggtctccatggagactgcagaaacccccgcctgctggaggcctgccacactcacagttaccagctagacagtggggcttactaagacaagcaggactctgatcacagggaggttattttgtctctctgtctcggtttctctgagccactgagacagatggctgtccgctttgaggctctgcagagctgtggcaccccatggtgtgtctgcagtgttctgggcacatgcatgggcacccatcgttgagagtgcagctgggaagaactctgaaccagaagtcatcagagctgaggcatggccttgaacatgtcactcagtctctggggcttctgtttcacaaatgcatgagggggccaccagcccagtggctttaaaccaggggcaggttgtccctccaggcagcattggaaatgtgtgtgtgttgagggggtcacagtgactgtgggggcacccctggcatctagtgggcatcccacaatgtgcagaacagtctctgacagcaaagaattggtccattcaatgccaattgtagtacctttgagacattctggctgagccaatgccttctccctgtcagagtcccccagagcagagagggtcaggcttccctggaccttggctcccagagcaagccaaaataaagactacactgttgccttgggggcttgtcgggccagggccaagacggtctgcgtgctgcagggccaggacagaaatagccacacatgccggtgagaacaaagagcctctttctttctcatgttgacatcgactttctgtgccaagtcctttgggtataaggatgctagggaattcctataggcaccaaacagaaggaaagctaggggcttggactactgggtataggacttgctctagctctcaggtcctagcccaagctcaatgcaaacacagcccctccgggctctctgtttctgtgaggttctggaatcccttcctctgtgtccgtgagtctgacagaatcgatgatgttcccttagagctgggaaatccatgtgtttattcacggagggaactcaccattacctcccttgtcttctttgcctgccttggagaaatccagagtcttcggaatggcaaaggcagctcctggatttccctggaggggaggcactagctgagggaagtagctcccttcattcatgatgcacagtttacgcagcagacacacaactgcgcctactatttgctcggtgccctgcaaggtgctgcctaactttgatttgttatttcagctctctccaggatagtgccaaatggtgcaatgggaaacctgttttgctggggggctctagatcactggctccagaactcccggctgccagggtagcccctacccccagccccttgctcctggacagcagtgggtctcacctttagcctctgcccccagttctggtctgacccaacagaggggctctatgatattaagaaggggcccttcctgctctgtgcctcaacctattctccataatagggagtctaatcctattccttccctgcctgatgaggatggtgtgaggatgaggaggacggcatctcatttggggctttttggcagtgggcctcattttaatcctgcagggctgcctgccagtggatctatccagctgcttccttgtagccaagaatgagttcaatgaattgtgattcactgattttattgattttgttttaaaacagggagactggtatttttgaagctgctatcattttctatttctttattaatttctttgtaatcatcttattaaagttttcttatttagtgggagagggagctttgtttaagtttggaatttgcctaaggcagaagttataaggcttcataaccttttgtatgtattgccaatatttgaaacttgggagattacgtataaaaaatacctagttttctgggtggaggatggggcatgctgtcatctcaagtctgctgcggctcacccccaccacctttaccccctcccccgcccttcccatcccccactgcacttcactcatgtaagacgtctgcccggtgctggtccaggcgggcatgtgagtttgtagcctctgctccaaaggatggtttacacattattttttcattaccttcagtattcctgtgaatggttcaagagagaaagtcttcatttactaagatttgggttctgcctcccaagtgacaatacggggctgagatccctctcagcttctttgagatgtggccaccataagcatcatcgttgtagggacagtctcattgctgtcttctagcagacagaagagttaggtgccagaaaggacaatcttgatggtgggtcccctccctgaaggactttaagaaggcataaaggggttggggtggagggtggcgtgtgaaggaggaggcccttgattaggtcagtggtccctgggagccatcggcgagaggcctccagccgggtgacagtctgggctctcgggtactaatctttctaatatggcagtggttgtggcacttctgacttgaattgataattctcatatctaataaaaccaagaagtacctcgttgatatcttatagaaaaaaaa

SEQ ID NO: 424655 - DNA, 3113 bp, Homo sapiens
  misc_feature (14)..(14): n is a, c, g, or t
  misc_feature (27)..(27): n is a, c, g, or t
  misc_feature (48)..(48): n is a, c, g, or t
  misc_feature (65)..(65): n is a, c, g, or t
  misc_feature (98)..(98): n is a, c, g, or t
  misc_feature (128)..(128): n is a, c, g, or t
  misc_feature (153)..(153): n is a, c, g, or t
  misc_feature (179)..(179): n is a, c, g, or t
  misc_feature (187)..(187): n is a, c, g, or t
ctaatgccaaaggnctcattcaattantcgaattttgaaggcatggtnggcctcttgtattacantgcaaagggattctgaagcattagttggtagcnaggttttcaagttacgacgttgtaaacganggcaagtgcaacttaaattaccctnactaaagggaataactttcggccgcntgcagggncctgcaagccgccggagccgggcaaccagtggaaggagcctgggagaggccaggcctccccggactgctagcctgcttttcctggggtccctggagccggaggaagaaccaggatgttgctgcctgcagaagctcagctcaggaagacttccaggaacctgaggaggagctgccactaacagccatatttcccaatggagactgtgatgaccttggaagggggtcaaaagcctgtgatggagtcgtacacactcctgctgagcccaccggagactcaagatgaaggctggacccttgcgctgtccctggctctaacctacagactggggcctggctccgtcttactggcccccaggtctccatggagactgcagaaacccccgcctgctggaggcctgccacactcacagttaccagctagacagtggggcttactaagacaagcaggacctaaaacagtgtctcccctgggaacctactccccacccagcatttgctaagtctgatcacagggaggttattttgtctctctgtctcggtttctctgagccactgagacagatggctgtccgctttgaggctctgcagagctgtggcaccccatggtgtgtctgcagtgttctgggcacatgcatgggcacccatcgttgagagtgcagctgggaagaactctgaaccagaagtcatcagagctgaggcatggccttgaacatgtcactcagtctctggggcttctgtttcacaaatgcatgagggggccaccagcccagtggctttaaaccaggggcaggttgtccctccaggcagcattggaaatgtgtgtgtgttgagggggtcacagtgactgtgggggcacccctggcatctagtgggcatcccacaatgtgcagaacagtctctgacagcaaagaattggtccattcaatgccaattgtagtacctttgagacattctggctgagccaatgccttctccctgtcagagtcccccagagcagagagggtcaggcttccctggaccttggctcccagagcaagccaaaataaagactacactgttgccttgggggcttgtcgggccagggccaagacggtctgcgtgctgcagggccaggacagaaatagccacacatgccggtgagaacaaagagcctctttctttctcatgttgacatcgactttctgtgccaagtcctttgggtataaggatgctagggaattcctataggcaccaaacagaaggaaagctaggggcttggactactgggtataggacttgctctagctctcaggtcctagcccaagctcaatgcaaacacagcccctccgggctctctgtttctgtgaggttctggaatcccttcctctgtgtccgtgagtctgacagaatcgatgatgttcccttagagctgggaaatccatgtgtttattcacggagggaactcaccattacctcccttgtcttctttgcctgccttggagaaatccagagtcttcggaatggcaaaggcagctcctggatttccctggaggggaggcactagctgagggaagtagctcccttcattcatgatgcacagtttacgcagcagacacacaactgcgcctactatttgctcggtgccctgcaaggtgctgcctaactttgatttgttatttcagctctctccaggatagtgccaaatggtgcaatgggaaacctgttttgctggggggctctagatcactggctccagaactcccggctgccagggtagcccctacccccagccccttgctcctggacagcagtgggtctcacctttagcctctgcccccagttctggtctgacccaacagaggggctctatgatattaagaaggggcccttcctgctctgtgcctcaacctattctccataatagggagtctaatcctattccttccctgcctgatgaggatggtgtgaggatgaggaggacggcatctcatttggggctttttggcagtgggcctcattttaatcctgcagggctgcctgccagtggatctatccagctgcttccttgtagccaagaatgagttcaatgaattgtgattcactgattttattgattttgttttaaaacagggagactggtatttttgaagctgctatcattttctatttctttattaatttctttgtaatcatcttattaaagttttcttatttagtgggagagggagctttgtttaagtttggaatttgcctaaggcagaagttataaggcttcataaccttttgtatgtattgccaatatttgaaacttgggagattacgtataatgcggctcacccccaccacctttaccccctcccccgcccttcccatcccccactgcacttcactcatgtaagacgtctgcccggtgctggtccaggcgggcatgtgagtttgtagcctctgctccaaaggatggtttacacattattttttcattaccttcagtattcctgtgaatggttcaagagagaaagtcttcatttactaagatttgggttctgcctcccaagtgacaatacggggctgagatccctctcagcttctttgagatgtggccaccataagcatcatcgttgtagggacagtctcattgctgtcttctagcagacagaagagttaggtgccagaaaggacaatcttgatggtgggtcccctccctgaaggactttaagaaggcataaaggggttggggtggagggtggcgtgtgaaggaggaggcccttgattaggtcagtggtccctgggagccatcggcgagaggcctccagccgggtgacagtctgggctctcgggtactaatctttctaatatggcagtggttgtggcacttctgacttgaattgataattctcatatctaataaaaccaagaagtacctcgttgatatcttatagaaaaaaaa

SEQ ID NO: 424656 - DNA, 2334 bp, Homo sapiens
  misc_feature (14)..(14): n is a, c, g, or t
  misc_feature (27)..(27): n is a, c, g, or t
  misc_feature (48)..(48): n is a, c, g, or t
  misc_feature (65)..(65): n is a, c, g, or t
  misc_feature (98)..(98): n is a, c, g, or t
  misc_feature (128)..(128): n is a, c, g, or t
  misc_feature (153)..(153): n is a, c, g, or t
  misc_feature (179)..(179): n is a, c, g, or t
  misc_feature (187)..(187): n is a, c, g, or t
ctaatgccaaaggnctcattcaattantcgaattttgaaggcatggtnggcctcttgtattacantgcaaagggattctgaagcattagttggtagcnaggttttcaagttacgacgttgtaaacganggcaagtgcaacttaaattaccctnactaaagggaataactttcggccgcntgcagggncctgcaagccgccggagccgggcaaccagtggaaggagcctgggagaggccaggcctccccggactgctagcctgcttttcctggggtccctggagccggaggaagaaccaggatgttgctgcctgcagaagctcagctcaggaagacttccaggaacctgaggaggagctgccactaacagccatatttcccaatggagactgtgatgaccttggaagggggtcaaaagcctgtgatggagtcgtacacactcctgctgagcccaccggagactcaagatgaaggctggacccttgcgctgtccctggctctaacctacagactggggcctggctccgtcttactggcccccaggtctccatggagactgcagaaacccccgcctgctggaggcctgccacactcacagttaccagctagacagtggggcttactaagacaagcaggacctaaaacagtgtctcccctgggaacctactccccacccagcatttgctaagtctgatcacagggaggttattttgtctctctgtctcggtttctctgagccactgagacagatggctgtccgctttgaggctctgcagagctgtggcaccccatggtgtgtctgcagtgttctgggcacatgcatgggcacccatcgttgagagtgcagctgggaagaactctgaaccagaagtcatcagagctgaggcatggccttgaacatgtcactcagtctctggggcttctgtttcacaaatgcatgagggggccaccagcccagtggctttaaaccaggggcaggttgtccctccaggcagcattggaaatgtgtgtgtgttgagggggtcacagtgactgtgggggcacccctggcatctagtgggcatcccacaatgtgcagaacagtctctgacagcaaagaattggtccattcaatgccaattgtagtacctttgagacattctggctgagccaatgccttctccctgtcagagtcccccagagcagagagggtcaggcttccctggaccttggctcccagagctctgcgtgctgcagggccaggacagaaatagccacacatgccggtgagaacaaagagcctctttctttctcatgttgacatcgactttctgtgccaagtcctttgggtataaggatgctagggaattcctataggcaccaaacagaaggaaagctaggggcttggactactgggtataggacttgctctagctctcaggtcctagcccaagctcaatgcaaacacagcccctccgggctctctgtttctgtgaggttctggaatcccttcctctgtgtccgtgagtctgacagaatcgatgatgttcccttagagctgggaaatccatgtgtttattcacggagggaactcaccattacctcccttgtcttctttgcctgccttggagaaatccagagtcttcggaatggcaaaggcagctcctggatttccctggaggggaggcactagctgagggaagtagctcccttcattcatgatgcacagtttacgcagcagacacacaactgcgcctactatttgctcggtgccctgcaaggtgctgcctaactttgatttgttatttcagctctctccaggatagtgccaaatggtgcaatgggaaacctgttttgctggggggctctagatcactggctccagaactcccggctgccagggtagcccctacccccagccccttgctcctggacagcagtgggtctcacctttagcctctgcccccagttctggtctgacccaacagaggggctctatgatattaagaaggggcccttcctgctctgtgcctcaacctattctccataatagggagtctaatcctattccttccctgcctgatgaggatggtgtgaggatgaggaggacggcatctcatttggggctttttggcagtgggcctcattttaatcctgcagggctgcctgccagtggatctatccagctgcttccttgtagccaagaatgagttcaatgaattgtgattcactgattttattgattttgttttaaaacagggagactggtatttttgaagctgctatcattttctatttctttattaatttctttgtaatcatcttattaaagttttcttatttagtgggagaggga

SEQ ID NO: 424657 - DNA, 1531 bp, Homo sapiens
tttggtgctatgtaattgtaattaatttcatgtcattttcattgctttatttcctcaacatggtacctacatcacagggcttttgtaagaattaaatgagataacatagataaaagtaaagcaatcatttttaaagttcggttttaaaaacccacccacttttgcaaatcagactctgtgtttttaatcagacagttgaaactagggcagttgaccgttggggcacttgatttgctaaacgaaatctctcagtcttgtgaagtgggaaccatgtgaccctctgactcaggttttgtgttcttcctagtggaaggagcctgggagaggccaggcctccccggactgctagcctgcttttcaagccaaaataaagactacactgttgccttgggggcttgtcgggccagggccaagacggtctgcgtgctgcagggccaggacagaaatagccacacatgccggtgagaacaaagagcctctttctttctcatgttgacatcgactttctgtgccaagtcctttgggtataaggatgctagggaattcctataggcaccaaacagaaggaaagctaggggcttggactactgggtataggacttgctctagctctcaggtcctagcccaagctcaatgcaaacacagcccctccgggctctctgtttctgtgaggttctggaatcccttcctctgtgtccgtgagtctgacagaatcgatgatgttcccttagagctgggaaatccatgtgtttattcacggagggaactcaccattacctcccttgtcttctttgcctgccttggagaaatccagagtcttcggaatggcaaaggcagctcctggatttccctggaggggaggcactagctgagggaagtagctcccttcattcatgatgcacagtttacgcagcagacacacaactgcgcctactatttgctcggtgccctgcaaggtgctgcctaactttgatttgttatttcagctctctccaggatagtgccaaatggtgcaatgggaaacctgttttgctggggggctctagatcactggctccagaactcccggctgccagggtagcccctacccccagccccttgctcctggacagcagtgggtctcacctttagcctctgcccccagttctggtctgacccaacagaggggctctatgatattaagaaggggcccttcctgctctgtgcctcaacctattctccataatagggagtctaatcctattccttccctgcctgatgaggatggtgtgaggatgaggaggacggcatctcatttggggctttttggcagtgggcctcattttaatcctgcagggctgcctgccagtggatctatccagctgcttccttgtagccaagaatgagttcaatgaattgtgattcactgattttattgattttgttttaaaacagggagactggtatttttgaagctgctatcattttctatttctttattaatttctttgtaatcatcttattaaagttttcttatttagtgggagaggga

SEQ ID NO: 424658 - DNA, 1967 bp, Homo sapiens
  misc_feature (14)..(14): n is a, c, g, or t
  misc_feature (27)..(27): n is a, c, g, or t
  misc_feature (48)..(48): n is a, c, g, or t
  misc_feature (65)..(65): n is a, c, g, or t
  misc_feature (98)..(98): n is a, c, g, or t
  misc_feature (128)..(128): n is a, c, g, or t
  misc_feature (153)..(153): n is a, c, g, or t
  misc_feature (179)..(179): n is a, c, g, or t
  misc_feature (187)..(187): n is a, c, g, or t
ctaatgccaaaggnctcattcaattantcgaattttgaaggcatggtnggcctcttgtattacantgcaaagggattctgaagcattagttggtagcnaggttttcaagttacgacgttgtaaacganggcaagtgcaacttaaattaccctnactaaagggaataactttcggccgcntgcagggncctgcaagccgccggagccgggcaaccagtggaaggagcctgggagaggccaggcctccccggactgctagcctgcttttcctggggtccctggagccggaggaagaaccaggatgttgctgcctgcagaagctcagctcaggaagacttccaggaacctgaggaggagctgccactaacagccatatttcccaatggagactgtgatgaccttggaagggggtcaaaagcctgtgatggagtcgtacacactcctgctgagcccaccggagactcaagatgaaggctggacccttgcgctgtccctggctctaacctacagactggggcctggctccgtcttactggcccccaggtctccatggagactgcagaaacccccgcctgctggaggcctgccacactcacagttaccagctagacagtggggcttactaagacaagcaggacctaaaacagtgtctcccctgggaacctactccccacccagcatttgctaagtctgatcacagggaggttattttgtctctctgtctcggtttctctgagccactgagacagatggctgtccgctttgaggctctgcagagctgtggcaccccatggtgtgtctgcagtgttctgggcacatgcatgggcacccatcgttgagagtgcagctgggaagaactctgaaccagaagtcatcagagctgaggcatggccttgaacatgtcactcagtctctggggcttctgtttcacaaatgcatgagggggccaccagcccagtggctttaaaccaggggcaggttgtccctccaggcagcattggaaatgtgtgtgtgttgagggggtcacagtgactgtgggggcacccctggcatctagtgggcatcccacaatgtgcagaacagtctctgacagcaaagaattggtccattcaatgccaattgtagtacctttgagacattctggctgagccaatgccttctccctgtcagagtcccccagagcagagagggtcaggcttccctggaccttggctcccagagctcttctttgcctgccttggagaaatccagagtcttcggaatggcaaaggcagctcctggatttccctggaggggaggcactagctgagggaagtagctcccttcattcatgatgcacagtttacgcagcagacacacaactgcgcctactatttgctcggtgccctgcaaggtgctgcctaactttgatttgttatttcagctctctccaggatagtgccaaatggtgcaatgggaaacctgttttgctggggggctctagatcactggctccagaactcccggctgccagggtagcccctacccccagccccttgctcctggacagcagtgggtctcacctttagcctctgcccccagttctggtctgacccaacagaggggctctatgatattaagaaggggcccttcctgctctgtgcctcaacctattctccataatagggagtctaatcctattccttccctgcctgatgaggatggtgtgaggatgaggaggacggcatctcatttggggctttttggcagtgggcctcattttaatcctgcagggctgcctgccagtggatctatccagctgcttccttgtagccaagaatgagttcaatgaattgtgattcactgattttattgattttgttttaaaacagggagactggtatttttgaagctgctatcattttctatttctttattaatttctttgtaatcatcttattaaagttttcttatttagtgggagaggga

SEQ ID NO: 424659 - DNA, 3167 bp, Homo sapiens
  misc_feature (14)..(14): n is a, c, g, or t
  misc_feature (27)..(27): n is a, c, g, or t
  misc_feature (48)..(48): n is a, c, g, or t
  misc_feature (65)..(65): n is a, c, g, or t
  misc_feature (98)..(98): n is a, c, g, or t
  misc_feature (128)..(128): n is a, c, g, or t
  misc_feature (153)..(153): n is a, c, g, or t
  misc_feature (179)..(179): n is a, c, g, or t
  misc_feature (187)..(187): n is a, c, g, or t
ctaatgccaaaggnctcattcaattantcgaattttgaaggcatggtnggcctcttgtattacantgcaaagggattctgaagcattagttggtagcnaggttttcaagttacgacgttgtaaacganggcaagtgcaacttaaattaccctnactaaagggaataactttcggccgcntgcagggncctgcaagccgccggagccgggcaaccagtggaaggagcctgggagaggccaggcctccccggactgctagcctgcttttcctggggtccctggagccggaggaagaaccaggatgttgctgcctgcagaagctcagctcaggaagacttccaggaacctgaggaggagctgccactaacagccatatttcccaatggagactgtgatgaccttggaagggggtcaaaagcctgtgatggagtcgtacacactcctgctgagcccaccggagactcaagatgaaggctggacccttgcgctgtccctggctctaacctacagactggggcctggctccgtcttactggcccccaggtctccatggagactgcagaaacccccgcctgctggaggcctgccacactcacagttaccagctagacagtggggcttactaagacaagcaggacctaaaacagtgtctcccctgggaacctactccccacccagcatttgctaagtctgatcacagggaggttattttgtctctctgtctcggtttctctgagccactgagacagatggctgtccgctttgaggctctgcagagctgtggcaccccatggtgtgtctgcagtgttctgggcacatgcatgggcacccatcgttgagagtgcagctgggaagaactctgaaccagaagtcatcagagctgaggcatggccttgaacatgtcactcagtctctggggcttctgtttcacaaatgcatgagggggccaccagcccagtggctttaaaccaggggcaggttgtccctccaggcagcattggaaatgtgtgtgtgttgagggggtcacagtgactgtgggggcacccctggcatctagtgggcatcccacaatgtgcagaacagtctctgacagcaaagaattggtccattcaatgccaattgtagtacctttgagacattctggctgagccaatgccttctccctgtcagagtcccccagagcagagagggtcaggcttccctggaccttggctcccagagcaagccaaaataaagactacactgttgccttgggggcttgtcgggccagggccaagacggtctgcgtgctgcagggccaggacagaaatagccacacatgccggtgagaacaaagagcctctttctttctcatgttgacatcgactttctgtgccaagtcctttgggtataaggatgctagggaattcctataggcaccaaacagaaggaaagctaggggcttggactactgggtataggacttgctctagctctcaggtcctagcccaagctcaatgcaaacacagcccctccgggctctctgtttctgtgaggttctggaatcccttcctctgtgtccgtgagtctgacagaatcgatgatgttcccttagagctgggaaatccatgtgtttattcacggagggaactcaccattacctcccttgtcttctttgcctgccttggagaaatccagagtcttcggaatggcaaaggcagctcctggatttccctggaggggaggcactagctgagggaagtagctcccttcattcatgatgcacagtttacgcagcagacacacaactgcgcctactatttgctcggtgccctgcaaggtgctgcctaactttgatttgttatttcagctctctccaggatagtgccaaatggtgcaatgggaaacctgttttgctggggggctctagatcactggctccagaactcccggctgccagggtagcccctacccccagccccttgctcctggacagcagtgggtctcacctttagcctctgcccccagttctggtctgacccaacagaggggctctatgatattaagaaggggcccttcctgctctgtgcctcaacctattctccataatagggagtctaatcctattccttccctgcctgatgaggatggtgtgaggatgaggaggacggcatctcatttggggctttttggcagtgggcctcattttaatcctgcagggctgcctgccagtggatctatccagctgcttccttgtagccaagaatgagttcaatgaattgtgattcactgattttattgattttgttttaaaacagggagactggtatttttgaagctgctatcattttctatttctttattaatttctttgtaatcatcttattaaagttttcttatttagtgggagagggagctttgtttaagtttggaatttgcctaaggcagaagttataaggcttcataaccttttgtatgtattgccaatatttgaaacttgggagattacgtataaaaaatacctagttttctgggtggaggatggggcatgctgtcatctcaagtctgctgcggctcacccccaccacctttaccccctcccccgcccttcccatcccccactgcacttcactcatgtaagacgtctgcccggtgctggtccaggcgggcatgtgagtttgtagcctctgctccaaaggatggtttacacattattttttcattaccttcagtattcctgtgaatggttcaagagagaaagtcttcatttactaagatttgggttctgcctcccaagtgacaatacggggctgagatccctctcagcttctttgagatgtggccaccataagcatcatcgttgtagggacagtctcattgctgtcttctagcagacagaagagttaggtgccagaaaggacaatcttgatggtgggtcccctccctgaaggactttaagaaggcataaaggggttggggtggagggtggcgtgtgaaggaggaggcccttgattaggtcagtggtccctgggagccatcggcgagaggcctccagccgggtgacagtctgggctctcgggtactaatctttctaatatggcagtggttgtggcacttctgacttgaattgataattctcatatctaataaaaccaagaagtacctcgttgatatcttatagaaaaaaaa

SEQ ID NO: 424660 - DNA, 2393 bp, Homo sapiens
  misc_feature (14)..(14): n is a, c, g, or t
  misc_feature (27)..(27): n is a, c, g, or t
  misc_feature (48)..(48): n is a, c, g, or t
  misc_feature (65)..(65): n is a, c, g, or t
  misc_feature (98)..(98): n is a, c, g, or t
  misc_feature (128)..(128): n is a, c, g, or t
  misc_feature (153)..(153): n is a, c, g, or t
  misc_feature (179)..(179): n is a, c, g, or t
  misc_feature (187)..(187): n is a, c, g, or t
ctaatgccaaaggnctcattcaattantcgaattttgaaggcatggtnggcctcttgtattacantgcaaagggattctgaagcattagttggtagcnaggttttcaagttacgacgttgtaaacganggcaagtgcaacttaaattaccctnactaaagggaataactttcggccgcntgcagggncctgcaagccgccggagccgggcaaccagtggaaggagcctgggagaggccaggcctccccggactgctagcctgcttttcctggggtccctggagccggaggaagaaccaggatgttgctgcctgcagaagctcagctcaggaagacttccaggaacctgaggaggagctgccactaacagccatatttcccaatggagactgtgatgaccttggaagggggtcaaaagcctgtgatggagtcgtacacactcctgctgagcccaccggagactcaagatgaaggctggacccttgcgctgtccctggctctaacctacagactggggcctggctccgtcttactggcccccaggtctccatggagactgcagaaacccccgcctgctggaggcctgccacactcacagttaccagctagacagtggggcttactaagacaagcaggacctaaaacagtgtctcccctgggaacctactccccacccagcatttgctaagtctgatcacagggaggttattttgtctctctgtctcggtttctctgagccactgagacagatggctgtccgctttgaggctctgcagagctgtggcaccccatggtgtgtctgcagtgttctgggcacatgcatgggcacccatcgttgagagtgcagctgggaagaactctgaaccagaagtcatcagagctgaggcatggccttgaacatgtcactcagtctctggggcttctgtttcacaaatgcatgagggggccaccagcccagtggctttaaaccaggggcaggttgtccctccaggcagcattggaaatgtgtgtgtgttgagggggtcacagtgactgtgggggcacccctggcatctagtgggcatcccacaatgtgcagaacagtctctgacagcaaagaattggtccattcaatgccaattgtagtacctttgagacattctggctgagccaatgccttctccctgtcagagtcccccagagcagagagggtcaggcttccctggaccttggctcccagagcaagccaaaataaagactacactgttgccttgggggcttgtcgggccagggccaagacggtctgcgtgctgcagggccaggacagaaatagccacacatgccggtgagaacaaagagcctctttctttctcatgttgacatcgactttctgtgccaagtcctttgggtataaggatgctagggaattcctataggcaccaaacagaaggaaagctaggggcttggactactgggtataggacttgctctagctctcaggtcctagcccaagctcaatgcaaacacagcccctccgggctctctgtttctgtgaggttctggaatcccttcctctgtgtccgtgagtctgacagaatcgatgatgttcccttagagctgggaaatccatgtgtttattcacggagggaactcaccattacctcccttgtcttctttgcctgccttggagaaatccagagtcttcggaatggcaaaggcagctcctggatttccctggaggggaggcactagctgagggaagtagctcccttcattcatgatgcacagtttacgcagcagacacacaactgcgcctactatttgctcggtgccctgcaaggtgctgcctaactttgatttgttatttcagctctctccaggatagtgccaaatggtgcaatgggaaacctgttttgctggggggctctagatcactggctccagaactcccggctgccagggtagcccctacccccagccccttgctcctggacagcagtgggtctcacctttagcctctgcccccagttctggtctgacccaacagaggggctctatgatattaagaaggggcccttcctgctctgtgcctcaacctattctccataatagggagtctaatcctattccttccctgcctgatgaggatggtgtgaggatgaggaggacggcatctcatttggggctttttggcagtgggcctcattttaatcctgcagggctgcctgccagtggatctatccagctgcttccttgtagccaagaatgagttcaatgaattgtgattcactgattttattgattttgttttaaaacagggagactggtatttttgaagctgctatcattttctatttctttattaatttctttgtaatcatcttattaaagttttcttatttagtgggagaggga

SEQ ID NO: 424661 - DNA, 2633 bp, Homo sapiens
  misc_feature (14)..(14): n is a, c, g, or t
  misc_feature (27)..(27): n is a, c, g, or t
  misc_feature (48)..(48): n is a, c, g, or t
  misc_feature (65)..(65): n is a, c, g, or t
  misc_feature (98)..(98): n is a, c, g, or t
  misc_feature (128)..(128): n is a, c, g, or t
  misc_feature (153)..(153): n is a, c, g, or t
  misc_feature (179)..(179): n is a, c, g, or t
  misc_feature (187)..(187): n is a, c, g, or t
ctaatgccaaaggnctcattcaattantcgaattttgaaggcatggtnggcctcttgtattacantgcaaagggattctgaagcattagttggtagcnaggttttcaagttacgacgttgtaaacganggcaagtgcaacttaaattaccctnactaaagggaataactttcggccgcntgcagggncctgcaagccgccggagccgggcaaccagtggaaggagcctgggagaggccaggcctccccggactgctagcctgcttttcctggggtccctggagccggaggaagaaccaggatgttgctgcctgcagaagctcagctcaggaagacttccaggaacctgaggaggagctgccactaacagccatatttcccaatggagactgtgatgaccttggaagggggtcaaaagcctgtgatggagtcgtacacactcctgctgagcccaccggagactcaagatgaaggctggacccttgcgctgtccctggctctaacctacagactggggcctggctccgtcttactggcccccaggtctccatggagactgcagaaacccccgcctgctggaggcctgccacactcacagttaccagctagacagtggggcttactaagacaagcaggacctaaaacagtgtctcccctgggaacctactccccacccagcatttgctaagtctgatcacagggaggttattttgtctctctgtctcggtttctctgagccactgagacagatggctgtccgctttgaggctctgcagagctgtggcaccccatggtgtgtctgcagtgttctgggcacatgcatgggcacccatcgttgagagtgcagctgggaagaactctgaaccagaagtcatcagagctgaggcatggccttgaacatgtcactcagtctctggggcttctgtttcacaaatgcatgagggggccaccagcccagtggctttaaaccaggggcaggttgtccctccaggcagcattggaaatgtgtgtgtgttgagggggtcacagtgactgtgggggcacccctggcatctagtgggcatcccacaatgtgcagaacagtctctgacagcaaagaattggtccattcaatgccaattgtagtacctttgagacattctggctgagccaatgccttctccctgtcagagtcccccagagcagagagggtcaggcttccctggaccttggctcccagagcaagccaaaataaagactacactgttgccttgggggcttgtcgggccagggccaagacggtctgcgtgctgcagggccaggacagaaatagccacacatgccggtgagaacaaagagcctctttctttctcatgttgacatcgactttctgtgccaagtcctttgggtataaggatgctagggaattcctataggcaccaaacagaaggaaagctaggggcttggactactgggtataggacttgctctagctctcaggtcctagcccaagctcaatgcaaacacagcccctccgggctctctgtttctgtgaggttctggaatcccttcctctgtgtccgtgagtctgacagaatcgatgatgttcccttagagctgggaaatccatgtgtttattcacggagggaactcaccattacctcccttgtcttctttgcctgccttggagaaatccagagtcttcggaatggcaaaggcagctcctggatttccctggaggggaggcactagctgagggaagtagctcccttcattcatgatgcacagtttacgcagcagacacacaactgcgcctactatttgctcggtgccctgcaaggtgctgcctaactttgatttgttatttcagctctctccaggatagtgccaaatggtgcaatgggaaacctgttttgctggggggctctagatcactggctccagaactcccggctgccagggtagcccctacccccagccccttgctcctggacagcagtgggtctcacctttagcctctgcccccagttctggtctgacccaacagaggggctctatgatattaagaaggggcccttcctgctctgtgcctcaacctattctccataatagggagtctaatcctattccttccctgcctgatgaggatggtgtgaggatgaggaggacggcatctcatttggggctttttggcagtgggcctcattttaatcctgcagggctgcctgccagtggatctatccagctgcttccttgtagccaagaatgagttcaatgaattgtgattcactgattttattgattttgttttaaaacagggagactggtatttttgaagctgctatcattttctatttctttattaatttctttgtaatcatcttattaaagttttcttatttagtgggagagggagctttgtttaagtttggaatttgcctaaggcagaagttataaggcttcataaccttttgtatgtattgccaatatttgaaacttgggagattacgtataaaaaatacctagttttctgggtggaggatggggcatgctgtcatctcaagtctgctttggggtcacccccaactagtattatccgctcttttctttgattttccgattcttctcactgtgctttcacataattttgttttt

SEQ ID NO: 424662 - DNA, 358 bp, Homo sapiens
gccaggatggtctcgatctcctgaactcgtgatccgcctgccttggcctcccaaagtgctgggattacaggcgtgagccattgtgcctggcccaaatgtcttattcataccaataatttattgaaattaaaaatatgctattcttttttctttggagtccatactttgaatgattttattgatcagacaatatttattaagtgaagtaatttgttatctccgttttttttttttagacagttcttgctctgttgcccagctatccacccacctcagcctcctgagtagctaggactataggcacgtgccaccatgcctggctaattaaaatttttctttgtagagacaggggtctcac

SEQ ID NO: 424663 - DNA, 1440 bp, Homo sapiens
cacttaaaaagcttggcctctagattctttgtctcagagccctctgggctctctcctctgagggagggacctttctttcctcacaagggacttttttgttccattatgccttgttatgcaatgggctctacagcaccctttcccacaggtcagaaatatttccccaagacacagggaaatcggtcctagcctggggcctggggatagcttggagtcctggcccatgaacttgatccctgcccaggtgttttccgaggggcacttgaggcccagtcttttctcaaggcaggtgtaagacacctcagagggagaactgtactgctgcctctttcccacctgcctcatctcaatccttgagcggcaagtttgaagttcttctggaaccatgcaaatctgtcctcctcatgcaattccaaggagcttgctggctctgcagccacccttgggccccttccagcctgccatgaatcagatatctttcccagaatctgggcgtttctgaagttttggggagagctgttgggactcatccagtgctccagaaggtggacttgcttcttggcctcagaggaccccaggggatgtttggaaatagcctctctacccttctggagcatggtttacaaaagccagctgacttctggaattgtctatggaggacagtttgggtgtaggttactgatgtctcaactgaatagcttgtgttttataagctgctgttggctattatgctgggggagtcttttttttttatattgtatttttgtatgccttttgcaaagtggtgttaactgtttttgtacaaggaaaaaaactcttggggcaatttcctgttgcaagggtctgatttattttgaaaggcaagttcacctgaaattttgtatttagttgtgattactgattgcctgattttaaaatgttgccttctgggacatcttctaataaaagatttctcaaacatgtcagagtgggggcagcttatgccacctgagtcctcctcaaccacggaaaactatttcagggtagccacaagtgatccagagggctgcacttctctaaccatgttgctaacctggtcattccactctgggttcctgaaatgccatttcagacatgttgaaacaatgtaggctcagtactcagtgaacacggaattctcttgtgaattgcaaagagtgctgaatttgtactttagaaggcttgaaatcctggctccaccacttctgcagcctttagtttcatctttctgagtcctagtttccttatcggtaaaatggggataaatgctacttcactgggtttttgcaggtattaaatgaaggggtagacttaaaactgctttctaaactataaagccttatactctttaggatggtgttattcttatcttagtggtatgatgaccttctgcaagatgtcttttaaagtttttttctgaga

SEQ ID NO: 424664 - DNA, 1277 bp, Homo sapiens
acgacacatgaaacctggccttaaccttgtttccttgtttataacttggagtcctggcccatgaacttgatccctgcccaggtgttttccgaggggcacttgaggcccagtcttttctcaaggcaggtgtaagacacctcagagggagaactgtactgctgcctctttcccacctgcctcatctcaatccttgagcggcaagtttgaagttcttctggaaccatgcaaatctgtcctcctcatgcaattccaaggagcttgctggctctgcagccacccttgggccccttccagcctgccatgaatcagatatctttcccagaatctgggcgtttctgaagttttggggagagctgttgggactcatccagtgctccagaaggtggacttgcttcttggcctcagaggaccccaggggatgtttggaaatagcctctctacccttctggagcatggtttacaaaagccagctgacttctggaattgtctatggaggacagtttgggtgtaggttactgatgtctcaactgaatagcttgtgttttataagctgctgttggctattatgctgggggagtcttttttttttatattgtatttttgtatgccttttgcaaagtggtgttaactgtttttgtacaaggaaaaaaactcttggggcaatttcctgttgcaagggtctgatttattttgaaaggcaagttcacctgaaattttgtatttagttgtgattactgattgcctgattttaaaatgttgccttctgggacatcttctaataaaagatttctcaaacatgtcagagtgggggcagcttatgccacctgagtcctcctcaaccacggaaaactatttcagggtagccacaagtgatccagagggctgcacttctctaaccatgttgctaacctggtcattccactctgggttcctgaaatgccatttcagacatgttgaaacaatgtaggctcagtactcagtgaacacggaattctcttgtgaattgcaaagagtgctgaatttgtactttagaaggcttgaaatcctggctccaccacttctgcagcctttagtttcatctttctgagtcctagtttccttatcggtaaaatggggataaatgctacttcactgggtttttgcaggtattaaatgaaggggtagacttaaaactgctttctaaactataaagccttatactctttaggatggtgttattcttatcttagtggtatgatgaccttctgcaagatgtcttttaaagtttttttctgaga

SEQ ID NO: 424665 - DNA, 1031 bp, Homo sapiens
agaactctgcccaggacagcaggtgcctgctggctctgggtttggaagttggggtgggtagggggtggtaagtactatatatggctctggaaaaccagctgctacttccaaatctattgtccataatggtttctttctgagcttgcttcttggcctcagaggaccccaggggatgtttggaaatagcctctctacccttctggagcatggtttacaaaagccagctgacttctggaattgtctatggaggacagtttgggtgtaggttactgatgtctcaactgaatagcttgtgttttataagctgctgttggctattatgctgggggagtcttttttttttatattgtatttttgtatgccttttgcaaagtggtgttaactgtttttgtacaaggaaaaaaactcttggggcaatttcctgttgcaagggtctgatttattttgaaaggcaagttcacctgaaattttgtatttagttgtgattactgattgcctgattttaaaatgttgccttctgggacatcttctaataaaagatttctcaaacatgtcagagtgggggcagcttatgccacctgagtcctcctcaaccacggaaaactatttcagggtagccacaagtgatccagagggctgcacttctctaaccatgttgctaacctggtcattccactctgggttcctgaaatgccatttcagacatgttgaaacaatgtaggctcagtactcagtgaacacggaattctcttgtgaattgcaaagagtgctgaatttgtactttagaaggcttgaaatcctggctccaccacttctgcagcctttagtttcatctttctgagtcctagtttccttatcggtaaaatggggataaatgctacttcactgggtttttgcaggtattaaatgaaggggtagacttaaaactgctttctaaactataaagccttatactctttaggatggtgttattcttatcttagtggtatgatgaccttctgcaagatgtcttttaaagtttttttctgaga

SEQ ID NO: 424666 - DNA, 157 bp, Homo sapiens
caaataattatacaaataaatatgcatacttaatatatttcctagtttctaagttgtactttctcatttttcacatttttgaaatttaggtgcaattttataatcaatgattaaatttaataaagtgtttctcttctcccatgaaacaaccataatt

SEQ ID NO: 424667 - DNA, 2666 bp, Homo sapiens
caaagtgtctagtagacagataaaaaaatagactagttctagatcgcgagcggcccccggaggctttcctggtagaagttgatgcgaggaagggcggcggggaccaggggacggtattcagaattcgagcgcaggagctccgcttctccacctgctcccggggagctattgggatccagagaatcacccgctgatggtttttgcccaggcctgaaacaaccagagagctacgggaaaggaagggcttggcttgccagaggaattttccaagtgctcaaacgccaggcttacggcgcctgtgatccgtccaggaggacaaagtgggatttgaagatccactccacttctgctcatggcgggccagggcctgcccctgcacgtggccacactgctgactgggctgctggaatgcctgggctttgctggcgtcctctttggctggccttcactagtgtttgtcttcaagaatgaagattactttaaggatctgtgtggaccagatgctgggccgattggcaatgccacagggcaggctgactgcaaagcccaggatgagaggttctcactcatcttcaccctggggtccttcatgaacaacttcatgacattccccactggctacatctttgaccggttcaagaccaccgtggcacgcctcatagccatatttttctacaccaccgccacactcatcatagccttcacctctgcaggctcagccgtgctgctcttcctggccatgccaatgctcaccattgggggaatcctgtttctcatcaccaacctgcagattgggaacctatttggccaacaccgttcgaccatcatcactctgtacaatggagcatttgactcttcctcggcagtcttccttattattaagcttctttatgaaaaaggcatcagcctcagggcctccttcatcttcatctctgtctgcagtacctggcatgtagcacgcactttcctcctgatgccccgggggcacatcccatacccactgccccccaactacagctatggcctgtgccctgggaatggcaccacaaaggaagagaaggaaacagctgagcatgaaaacagggagctacagtcaaaggagttcctttcagcgaaggaagagaccccaggggcagggcagaagcaggaactccgctccttctggagctacgctttctctcggcgctttgcctggcacctggtgtggctgtctgtgatacagttgtggcactacctcttcattggcactctcaactccttgctgaccaacatggccggtggggacatggcacgagtcagcacctacacaaatgcctttgccttcactcagttcggagtgctgtgtgccccctggaatggcctgctcatggaccggcttaaacagaagtaccagaaggaagcaagaaagacaggttcctccactttggcggtggccctctgctcgacggtgccttcgctggccctgacatccctgctgtgcctgggcttcgccctctgtgcctcagtccccatcctccctctccagtacctcaccttcatcctgcaagtgatcagccgctccttcctctatgggagcaacgcggccttcctcacccttgctttcccttcagagcactttggcaagctctttgggctggtgatggccttgtcggctgtggtgtctctgctccagttccccatcttcaccctcatcaaaggctcccttcagaatgacccattttacgtgaatgtgatgttcatgcttgccattcttctgacattcttccacccctttctggtatatcgggaatgccgtacttggaaagaaagtccctctgcaattgcatagttcagaagccctcacttttcagccccgaggatggttttgttcatcttccaccacctttgaggacctcgtgtcccaaaagactttgcctatcccagcaaaacacacacacacacacacacacacacaaaataaagacacacaaggacgtctgcgcagcaagaaaagaatctcagttgccaagcagattgatatcacacagactcaaagcaaaggcatgtggaacttctttatttcaaaacagaagtgtctccttgcacttagccttggcagacccttgactccaggggagatgacctgggggaggaagtgtgtcaactatttctttaggcctgtttggctccgaagcctatatgtgcctggatcctctgccacgggttaaattttcaggtgaagagtgaggttgtcatggcctcagctatgcttcctggctctccctcaagagtgcagccttggctagagaactcacagctctgggaaaaagaggagcagacagggttccctgggcccagtctcagcccagccactgatgctggatgaccttggcctgaccctggtctggtctcagaatcacttttcccatctgtaaaattgagatgaattttggtgttgaaagttcttcctggagcagatgtcctagaaggttttaggaatagtgacagagtcaggccaccccaagggccatgggagccagctgacctgcttgaccgaaggatttctgacagactatctttggggatgttttcaagaagggatataagttatttactttgggcatttaaaagaaaatttctctcgggaataattttatagaaaaataaagcttctgtgtctaaggcaa

SEQ ID NO: 424668 - DNA, 625 bp, Homo sapiens
gactttttccttctccttctgcagcttctttatgaaaaaggcatcagcctcagggcctccttcatcttcatctctgtctgcagtacctggcatgtagcacgcactttcctcctgatgccccgggggcacatcccatacccactgccccccaactacagctatggcctgtgccctgggaatggcaccacaaaggaagagaaggaaacagctgagcatgaaaacagggagctacagtcaaaggagttcctttcagcgaaggaagagaccccaggggcagggcagaagcaggaactccgctccttctggagctacgctttctctcggcgctttgcctggcacctggtgtggctgtctgtgatacagttgtggcactacctcttcattgctacacggtctctcatccgtgttgcaatgtcattaaggagagaaggaagagaagtaagccgagggcgtctttgattgtgtagtaagggtggaaggtgatttatcggaatgggaggtgattcctagggggttgtttgatcccgtttcgtgcaagaataggaggtggagtgctgctagggctgcatcaatgcaggtcactggctgttaggctaggttgcgtggattagcatgccctcctctt

SEQ ID NO: 424669 - DNA, 2690 bp, Homo sapiens
aggcgagcaggggactgggaggggctgcgagaggcgcgaatgcgaacctggcccgtgcggaaagggcgcggagagccccggcgcggagcaggcgggggacggtattcagaattcgagcgcaggagctccgcttctccacctgctcccggggagctattgggatccagagaatcacccgctgatggtttttgcccaggcctgaaacaaccagagagctacgggaaaggaagggcttggcttgccagaggaattttccaagtgctcaaacgccaggcttacggcgcctgtgatccgtccaggaggacaaagtgggatttgaagatccactccacttctgctcatggcgggccagggcctgcccctgcacgtggccacactgctgactgggctgctggaatgcctgggctttgctggcgtcctctttggctggccttcactagtgtttgtcttcaagaatgaagattactttaaggatctgtgtggaccagatgctgggccgattggcaatgccacagggcaggctgactgcaaagcccaggatgagaggttctcactcatcttcaccctggggtccttcatgaacaacttcatgacattccccactggctacatctttgaccggttcaagaccaccgtggcacgcctcatagccatatttttctacaccaccgccacactcatcatagccttcacctctgcaggctcagccgtgctgctcttcctggccatgccaatgctcaccattgggggaatcctgtttctcatcaccaacctgcagattgggaacctatttggccaacaccgttcgaccatcatcactctgtacaatggagcatttgactcttcctcggcagtcttccttattattaagcttctttatgaaaaaggcatcagcctcagggcctccttcatcttcatctctgtctgcagtacctggcatgtagcacgcactttcctcctgatgccccgggggcacatcccatacccactgccccccaactacagctatggtccttggccttgctggtggggcttttgtttccatagcctgtgccctgggaatggcaccacaaaggaagagaaggaaacagctgagcatgaaaacagggagctacagtcaaaggagttcctttcagcgaaggaagagaccccaggggcagggcagaagcaggaactccgctccttctggagctacgctttctctcggcgctttgcctggcacctggtgtggctgtctgtgatacagttgtggcactacctcttcattggcactctcaactccttgctgaccaacatggccggtggggacatggcacgagtcagcacctacacaaatgcctttgccttcactcagttcggagtgctgtgtgccccctggaatggcctgctcatggaccggcttaaacagaagtaccagaaggaagcaagaaagacaggttcctccactttggcggtggccctctgctcgacggtgccttcgctggccctgacatccctgctgtgcctgggcttcgccctctgtgcctcagtccccatcctccctctccagtacctcaccttcatcctgcaagtgatcagccgctccttcctctatgggagcaacgcggccttcctcacccttgctttcccttcagagcactttggcaagctctttgggctggtgatggccttgtcggctgtggtgtctctgctccagttccccatcttcaccctcatcaaaggctcccttcagaatgacccattttacgtgaatgtgatgttcatgcttgccattcttctgacattcttccacccctttctggtatatcgggaatgccgtacttggaaagaaagtccctctgcaattgcatagttcagaagccctcacttttcagccccgaggatggttttgttcatcttccaccacctttgaggacctcgtgtcccaaaagactttgcctatcccagcaaaacacacacacacacacacacacacacaaaataaagacacacaaggacgtctgcgcagcaagaaaagaatctcagttgccaagcagattgatatcacacagactcaaagcaaaggcatgtggaacttctttatttcaaaacagaagtgtctccttgcacttagccttggcagacccttgactccaggggagatgacctgggggaggaagtgtgtcaactatttctttaggcctgtttggctccgaagcctatatgtgcctggatcctctgccacgggttaaattttcaggtgaagagtgaggttgtcatggcctcagctatgcttcctggctctccctcaagagtgcagccttggctagagaactcacagctctgggaaaaagaggagcagacagggttccctgggcccagtctcagcccagccactgatgctggatgaccttggcctgaccctggtctggtctcagaatcacttttcccatctgtaaaattgagatgaattttggtgttgaaagttcttcctggagcagatgtcctagaaggttttaggaatagtgacagagtcaggccaccccaagggccatgggagccagctgacctgcttgaccgaaggatttctgacagactatctttggggatgttttcaagaagggatataagttatttactttgggcatttaaaagaaaatttctctcgggaataattttatagaaaaataaagcttctgtgtctaaggcaa

SEQ ID NO: 424670 - DNA, 2863 bp, Homo sapiens
caaagtgtctagtagacagataaaaaaatagactagttctagatcgcgagcggcccccggaggctttcctggtagaagttgatgcgaggaagggcggcggggaccaggtttgcgagtcctaggcgagggtcatgggagttgggggtatttctggcagtagaatggcctgcgtcgtgactaaactagccctgtgaccttgggcaagttcctgaaatccatgggagcttttgtttcattgtcagtaaactgaagataacaccaacttggcagcgggagtttgtgtcttctgtatgaaatctccctgcctctgtacctggttgagttgctgtcattattttaggggacggtattcagaattcgagcgcaggagctccgcttctccacctgctcccggggagctattgggcctgaaacaaccagagagctacgggaaaggaagggcttggcttgccagaggaattttccaagtgctcaaacgccaggcttacggcgcctgtgatccgtccaggaggacaaagtgggatttgaagatccactccacttctgctcatggcgggccagggcctgcccctgcacgtggccacactgctgactgggctgctggaatgcctgggctttgctggcgtcctctttggctggccttcactagtgtttgtcttcaagaatgaagattactttaaggatctgtgtggaccagatgctgggccgattggcaatgccacagggcaggctgactgcaaagcccaggatgagaggttctcactcatcttcaccctggggtccttcatgaacaacttcatgacattccccactggctacatctttgaccggttcaagaccaccgtggcacgcctcatagccatatttttctacaccaccgccacactcatcatagccttcacctctgcaggctcagccgtgctgctcttcctggccatgccaatgctcaccattgggggaatcctgtttctcatcaccaacctgcagattgggaacctatttggccaacaccgttcgaccatcatcactctgtacaatggagcatttgactcttcctcggcagtcttccttattattaagcttctttatgaaaaaggcatcagcctcagggcctccttcatcttcatctctgtctgcagtacctggcatgtagcacgcactttcctcctgatgccccgggggcacatcccatacccactgccccccaactacagctatggcctgtgccctgggaatggcaccacaaaggaagagaaggaaacagctgagcatgaaaacagggagctacagtcaaaggagttcctttcagcgaaggaagagaccccaggggcagggcagaagcaggaactccgctccttctggagctacgctttctctcggcgctttgcctggcacctggtgtggctgtctgtgatacagttgtggcactacctcttcattggcactctcaactccttgctgaccaacatggccggtggggacatggcacgagtcagcacctacacaaatgcctttgccttcactcagttcggagtgctgtgtgccccctggaatggcctgctcatggaccggcttaaacagaagtaccagaaggaagcaagaaagacaggttcctccactttggcggtggccctctgctcgacggtgccttcgctggccctgacatccctgctgtgcctgggcttcgccctctgtgcctcagtccccatcctccctctccagtacctcaccttcatcctgcaagtgatcagccgctccttcctctatgggagcaacgcggccttcctcacccttgctttcccttcagagcactttggcaagctctttgggctggtgatggccttgtcggctgtggtgtctctgctccagttccccatcttcaccctcatcaaaggctcccttcagaatgacccattttacgtgaatgtgatgttcatgcttgccattcttctgacattcttccacccctttctggtatatcgggaatgccgtacttggaaagaaagtccctctgcaattgcatagttcagaagccctcacttttcagccccgaggatggttttgttcatcttccaccacctttgaggacctcgtgtcccaaaagactttgcctatcccagcaaaacacacacacacacacacacacacacaaaataaagacacacaaggacgtctgcgcagcaagaaaagaatctcagttgccaagcagattgatatcacacagactcaaagcaaaggcatgtggaacttctttatttcaaaacagaagtgtctccttgcacttagccttggcagacccttgactccaggggagatgacctgggggaggaagtgtgtcaactatttctttaggcctgtttggctccgaagcctatatgtgcctggatcctctgccacgggttaaattttcaggtgaagagtgaggttgtcatggcctcagctatgcttcctggctctccctcaagagtgcagccttggctagagaactcacagctctgggaaaaagaggagcagacagggttccctgggcccagtctcagcccagccactgatgctggatgaccttggcctgaccctggtctggtctcagaatcacttttcccatctgtaaaattgagatgaattttggtgttgaaagttcttcctggagcagatgtcctagaaggttttaggaatagtgacagagtcaggccaccccaagggccatgggagccagctgacctgcttgaccgaaggatttctgacagactatctttggggatgttttcaagaagggatataagttatttactttgggcatttaaaagaaaatttctctcgggaataattttatagaaaaataaagcttctgtgtctaaggcaa

SEQ ID NO: 424671 - DNA, 779 bp, Homo sapiens
catacatacagagagagagagagagagagagagaacacacacacacacacacacacacacacacacaaaataaagacacacaaggacgtctgcgcagcaagaaaagaatctcagttgccaagcagattgatatcacacagactcaaagcaaaggcatgtggaacttctttatttcaaaacagaagtgtctccttgcacttagccttggcagacccttgactccaggggagatgacctgggggaggaagtgtgtcaactatttctttaggcctgtttggctccgaagcctatatgtgcctggatcctctgccacgggttaaattttcaggtgaagagtgaggttgtcatggcctcagctatgcttcctggctctccctcaagagtgcagccttggctagagaactcacagctctgggaaaaagaggagcagacagggttccctgggcccagtctcagcccagccactgatgctggatgaccttggcctgaccctggtctggtctcagaatcacttttcccatctgtaaaattgagatgaattttggtgttgaaagttcttcctggagcagatgtcctagaaggttttaggaatagtgacagagtcaggccaccccaagggccatgggagccagctgacctgcttgaccgaaggatttctgacagactatctttggggatgttttcaagaagggatataagttatttactttgggcatttaaaagaaaatttctctcgggaataattttatagaaaaataaagcttctgtgtctaaggcaa

SEQ ID NO: 424672 - DNA, 812 bp, Homo sapiens
ggtcccctttcgggcgccatggggcgccgagcgcggcctggcccctcgggctcctctgcggggagggcaggccgcaggctggagcggggtgcggaggctggcggggagcggcccccggaggctttcctggtagaagttgatgcgaggaagggcggcggggaccaggggacggtattcagaattcgagcgcaggagctccgcttctccacctgctcccggggagctattgggatccagagaatcacccgctgatggtttttgcccaggcctgaaacaaccagagagctacgggaaaggaagggcttggcttgccagaggaattttccaagtgctcaaacgccaggcttacggcgcctgtgatccgtccaggaggacaaagtgggatttgaagatccactccacttctgctcatggcgggccagggcctgcccctgcacgtggccacactgctgactgggctgctggaatgcctgggctttgctggcgtcctctttggctggccttcactagtgtttgtcttcaagaatgaagattactttaaggatctgtgtggaccagatgctgggccgattggcaatgccacagggcaggctgactgcaaagcccaggatgagaggttctcactcatcttcaccctggggtccttcatgaacaacttcatgacattccccactggctacatctttgaccggttcaagaccaccgtggcacgcctcatagccatatttttctacaccaccgccacactcatcatagccttcacctctgcaggtgcagtggctcactcctgtaatcccagcactttgggaggc

SEQ ID NO: 424673 - DNA, 449 bp, Homo sapiens
agaccccaggggcagggcagaagcaggaactccgctccttctggagctacgctttctctcggcgctttgcctggcacctggtgtggctgtctgtgatacagttgtggcactacctcttcattggcactctcaactccttgctgaccaacatggccggtggggacatggcacgaggtatgtggtagggctgggaggtagcccatctgcatgtcccagctgggaacacagagcctcccagcagggctgtacacaccagaggagggtctgatggtgtggggaggagggacatgcagacaagggtaaggtgggagagtccctgcctggaagggagttttggaaacttctcatcaaccaacctctctcttccttctgcagtcagcacctacacaaatgcctttgccttcactcagttcggagtgctgtgtgccccctggaatggcctgctcatg

SEQ ID NO: 424674 - DNA, 530 bp, Homo sapiens
ccatgtgaccttgaacatgtcattgaatgctcgctaggcctctgtttctttatctgtgaaatgggcttgatattcctcctctaccccaaccgatagtgcagaatgaaaagtaactgaaagtccttcctccagggcaccatagtgtctgggtgaaaagtagaatataaactcggtagacttctggtcccttcattggtcatggaatggaccagtgcttgcttcattgagcaacagttctgttgttcagaattcctggatttcacctcacttctgctctccctgcaggtgaatgtgatgttcatgcttgccattcttctgacattcttccacccctttctggtatatcgggaatgccgtacttggaaagaaagtccctctgcaattgcatagttcagaagccctcacttttcagccccgaggatggttttgttcatcttccaccacctttgaggacctcgtgtcccaaaagactttgcctatcccagcaaaacacacacacacacacacacacacacaaaataaagacacac

SEQ ID NO: 424675 - DNA, 461 bp, Homo sapiens
aaattttcaggtgaagagtgaggttgtcatggcctcagctatgcttcctggctctccctcaagagtgcagccttggctagagaactcacagctctgggaaaaagaggagcagacagggttccctgggcccagtctcagcccagccactgatgctggatgaccttggcctgaccctggtctggtctcagaatcacttttcccatctgtaaaattgagatgaattttggtgttgaaagttcttcctggagcagatgtcctagaaggttttaggaatagtgacagagtcaggccaccccaagggccatgggagccagctgacctgcttgaccgaaggatttctgacagactatctttggggatgttttcaagaagggatataagttatttactttgggcatttaaaagaaaatttctctcgggaataattttatagaaaaataaagcttctgtgtctaaggcaa

SEQ ID NO: 424676 - DNA, 1973 bp, Homo sapiens
aggcgagcaggggactgggaggggctgcgagaggcgcgaatgcgaacctggcccgtgcggaaagggcgcggagagccccggcgcggagcaggcgggggacggtattcagaattcgagcgcaggagctccgcttctccacctgctcccggggagctattgggatccagagaatcacccgctgatggtttttgcccaggcctgaaacaaccagagagctacgggaaaggaagggcttggcttgccagaggaattttccaagtgctcaaacgccaggcttacggcgcctgtgatccgtccaggaggacaaagtgggatttgaagatccactccacttctgctcatggcgggccagggcctgcccctgcacgtggccacactgctgactgggctgctggaatgcctgggctttgctggcgtcctctttggctggccttcactagtgtttgtcttcaagaatgaagattactttaaggatctgtgtggaccagatgctgggccgattggcaatgccacagggcaggctgactgcaaagcccaggatgagaggttctcactcatcttcaccctggggtccttcatgaacaacttcatgacattccccactggctacatctttgaccggttcaagaccaccgtggcacgcctcatagccatatttttctacaccaccgccacactcatcatagccttcacctctgcaggctcagccgtgctgctcttcctggccatgccaatgctcaccattgggggaatcctgtttctcatcaccaacctgcagattgggaacctatttggccaacaccgttcgaccatcatcactctgtacaatggagcatttgactcttcctcggcagtcttccttattattaagcttctttatgaaaaaggcatcagcctcagggcctccttcatcttcatctctgtctgcagtacctggcatgtagcacgcactttcctcctgatgccccgggggcacatcccatacccactgccccccaactacagctatggcctgtgccctgggaatggcaccacaaaggaagagaaggaaacagctgagcatgaaaacagggagctacagtcaaaggagttcctttcagcgaaggaagagaccccaggggcagggcagaagcaggaactccgctccttctggagctacgctttctctcggcgctttgcctggcacctggtgtggctgtctgtgatacagttgtggcactacctcttcattggcactctcaactccttgctgaccaacatggccggtggggacatggcacgagtcagcacctacacaaatgcctttgccttcactcagttcggagtgctgtgtgccccctggaatggcctgctcatggaccggcttaaacagaagtaccagaaggaagcaagaaagacaggttcctccactttggcggtggccctctgctcgacggtgccttcgctggccctgacatccctgctgtgcctgggcttcgccctctgtgcctcagtccccatcctccctctccagtacctcaccttcatcctgcaagtgatcagccgctccttcctctatgggagcaacgcggccttcctcacccttgctttcccttcagagcactttggcaagctctttgggctggtgatggccttgtcggctgtggtgtctctgctccagttccccatcttcaccctcatcaaaggctcccttcagaatgacccattttacgtgaatgtgatgttcatgcttgccattcttctgacattcttccacccctttctggtatatcgggaatgccgtacttggaaagaaagtccctctgcaattgcatagttcagaagccctcacttttcagccccgaggatggttttgttcatcttccaccacctttgaggacctcgtgtcccaaaagactttgcctatcccagcaaaacaaccacccactagttctcttctccagccaagaggaataaagttttgcttccataaa

SEQ ID NO: 424677 - DNA, 2654 bp, Homo sapiens
aggcgagcaggggactgggaggggctgcgagaggcgcgaatgcgaacctggcccgtgcggaaagggcgcggagagccccggcgcggagcaggcgggggacggtattcagaattcgagcgcaggagctccgcttctccacctgctcccggggagctattgggatccagagaatcacccgctgatggtttttgcccaggcctgaaacaaccagagagctacgggaaaggaagggcttggcttgccagaggaattttccaagtgctcaaacgccaggcttacggcgcctgtgatccgtccaggaggacaaagtgggatttgaagatccactccacttctgctcatggcgggccagggcctgcccctgcacgtggccacactgctgactgggctgctggaatgcctgggctttgctggcgtcctctttggctggccttcactagtgtttgtcttcaagaatgaagattactttaaggatctgtgtggaccagatgctgggccgattggcaatgccacagggcaggctgactgcaaagcccaggatgagaggttctcactcatcttcaccctggggtccttcatgaacaacttcatgacattccccactggctacatctttgaccggttcaagaccaccgtggcacgcctcatagccatatttttctacaccaccgccacactcatcatagccttcacctctgcaggctcagccgtgctgctcttcctggccatgccaatgctcaccattgggggaatcctgtttctcatcaccaacctgcagattgggaacctatttggccaacaccgttcgaccatcatcactctgtacaatggagcatttgactcttcctcggcagtcttccttattattaagcttctttatgaaaaaggcatcagcctcagggcctccttcatcttcatctctgtctgcagtacctggcatgtagcacgcactttcctcctgatgccccgggggcacatcccatacccactgccccccaactacagctatggcctgtgccctgggaatggcaccacaaaggaagagaaggaaacagctgagcatgaaaacagggagctacagtcaaaggagttcctttcagcgaaggaagagaccccaggggcagggcagaagcaggaactccgctccttctggagctacgctttctctcggcgctttgcctggcacctggtgtggctgtctgtgatacagttgtggcactacctcttcattggcactctcaactccttgctgaccaacatggccggtggggacatggcacgagtcagcacctacacaaatgcctttgccttcactcagttcggagtgctgtgtgccccctggaatggcctgctcatggaccggcttaaacagaagtaccagaaggaagcaagaaagacaggttcctccactttggcggtggccctctgctcgacggtgccttcgctggccctgacatccctgctgtgcctgggcttcgccctctgtgcctcagtccccatcctccctctccagtacctcaccttcatcctgcaagtgatcagccgctccttcctctatgggagcaacgcggccttcctcacccttgctttcccttcagagcactttggcaagctctttgggctggtgatggccttgtcggctgtggtgtctctgctccagttccccatcttcaccctcatcaaaggctcccttcagaatgacccattttacgtgaatgtgatgttcatgcttgccattcttctgacattcttccacccctttctggtatatcgggaatgccgtacttggaaagaaagtccctctgcaattgcatagttcagaagccctcacttttcagccccgaggatggttttgttcatcttccaccacctttgaggacctcgtgtcccaaaagactttgcctatcccagcaaaacacacacacacacacacacacacacaaaataaagacacacaaggacgtctgcgcagcaagaaaagaatctcagttgccaagcagattgatatcacacagactcaaagcaaaggcatgtggaacttctttatttcaaaacagaagtgtctccttgcacttagccttggcagacccttgactccaggggagatgacctgggggaggaagtgtgtcaactatttctttaggcctgtttggctccgaagcctatatgtgcctggatcctctgccacgggttaaattttcaggtgaagagtgaggttgtcatggcctcagctatgcttcctggctctccctcaagagtgcagccttggctagagaactcacagctctgggaaaaagaggagcagacagggttccctgggcccagtctcagcccagccactgatgctggatgaccttggcctgaccctggtctggtctcagaatcacttttcccatctgtaaaattgagatgaattttggtgttgaaagttcttcctggagcagatgtcctagaaggttttaggaatagtgacagagtcaggccaccccaagggccatgggagccagctgacctgcttgaccgaaggatttctgacagactatctttggggatgttttcaagaagggatataagttatttactttgggcatttaaaagaaaatttctctcgggaataattttatagaaaaataaagcttctgtgtctaaggcaa

SEQ ID NO: 424678 - DNA, 2724 bp, Homo sapiens
ggtcccctttcgggcgccatggggcgccgagcgcggcctggcccctcgggctcctctgcggggagggcaggccgcaggctggagcggggtgcggaggctggcggggagcggcccccggaggctttcctggtagaagttgatgcgaggaagggcggcggggaccaggggacggtattcagaattcgagcgcaggagctccgcttctccacctgctcccggggagctattgggatccagagaatcacccgctgatggtttttgcccaggcctgaaacaaccagagagctacgggaaaggaagggcttggcttgccagaggaattttccaagtgctcaaacgccaggcttacggcgcctgtgatccgtccaggaggacaaagtgggatttgaagatccactccacttctgctcatggcgggccagggcctgcccctgcacgtggccacactgctgactgggctgctggaatgcctgggctttgctggcgtcctctttggctggccttcactagtgtttgtcttcaagaatgaagattactttaaggatctgtgtggaccagatgctgggccgattggcaatgccacagggcaggctgactgcaaagcccaggatgagaggttctcactcatcttcaccctggggtccttcatgaacaacttcatgacattccccactggctacatctttgaccggttcaagaccaccgtggcacgcctcatagccatatttttctacaccaccgccacactcatcatagccttcacctctgcaggctcagccgtgctgctcttcctggccatgccaatgctcaccattgggggaatcctgtttctcatcaccaacctgcagattgggaacctatttggccaacaccgttcgaccatcatcactctgtacaatggagcatttgactcttcctcggcagtcttccttattattaagcttctttatgaaaaaggcatcagcctcagggcctccttcatcttcatctctgtctgcagtacctggcatgtagcacgcactttcctcctgatgccccgggggcacatcccatacccactgccccccaactacagctatggcctgtgccctgggaatggcaccacaaaggaagagaaggaaacagctgagcatgaaaacagggagctacagtcaaaggagttcctttcagcgaaggaagagaccccaggggcagggcagaagcaggaactccgctccttctggagctacgctttctctcggcgctttgcctggcacctggtgtggctgtctgtgatacagttgtggcactacctcttcattggcactctcaactccttgctgaccaacatggccggtggggacatggcacgagtcagcacctacacaaatgcctttgccttcactcagttcggagtgctgtgtgccccctggaatggcctgctcatggaccggcttaaacagaagtaccagaaggaagcaagaaagacaggttcctccactttggcggtggccctctgctcgacggtgccttcgctggccctgacatccctgctgtgcctgggcttcgccctctgtgcctcagtccccatcctccctctccagtacctcaccttcatcctgcaagtgatcagccgctccttcctctatgggagcaacgcggccttcctcacccttgctttcccttcagagcactttggcaagctctttgggctggtgatggccttgtcggctgtggtgtctctgctccagttccccatcttcaccctcatcaaaggctcccttcagaatgacccattttacgtgaatgtgatgttcatgcttgccattcttctgacattcttccacccctttctggtatatcgggaatgccgtacttggaaagaaagtccctctgcaattgcatagttcagaagccctcacttttcagccccgaggatggttttgttcatcttccaccacctttgaggacctcgtgtcccaaaagactttgcctatcccagcaaaacacacacacacacacacacacacacaaaataaagacacacaaggacgtctgcgcagcaagaaaagaatctcagttgccaagcagattgatatcacacagactcaaagcaaaggcatgtggaacttctttatttcaaaacagaagtgtctccttgcacttagccttggcagacccttgactccaggggagatgacctgggggaggaagtgtgtcaactatttctttaggcctgtttggctccgaagcctatatgtgcctggatcctctgccacgggttaaattttcaggtgaagagtgaggttgtcatggcctcagctatgcttcctggctctccctcaagagtgcagccttggctagagaactcacagctctgggaaaaagaggagcagacagggttccctgggcccagtctcagcccagccactgatgctggatgaccttggcctgaccctggtctggtctcagaatcacttttcccatctgtaaaattgagatgaattttggtgttgaaagttcttcctggagcagatgtcctagaaggttttaggaatagtgacagagtcaggccaccccaagggccatgggagccagctgacctgcttgaccgaaggatttctgacagactatctttggggatgttttcaagaagggatataagttatttactttgggcatttaaaagaaaatttctctcgggaataattttatagaaaaataaagcttctgtgtctaaggcaa

SEQ ID NO: 424679 - DNA, 2657 bp, Homo sapiens
aggcgagcaggggactgggaggggctgcgagaggcgcgaatgcgaacctggcccgtgcggaaagggcgcggagagccccggcgcggagcaggcgggggacggtattcagaattcgagcgcaggagctccgcttctccacctgctcccggggagctattgggcctgaaacaaccagagagctacgggaaaggaagggcttggcttgccagaggaattttccaagtgctcaaacgccaggcttacggcgcctgtgatccgtccaggaggacaaagtgggatttgaagatccactccacttctgctcatggcgggccagggcctgcccctgcacgtggccacactgctgactgggctgctggaatgcctgggctttgctggcgtcctctttggctggccttcactagtgtttgtcttcaagaatgaagattactttaaggatctgtgtggaccagatgctgggccgattggcaatgccacagggcaggctggaaggctgggatgcatgggagaccttttttctactccagactgcaaagcccaggatgagaggttctcactcatcttcaccctggggtccttcatgaacaacttcatgacattccccactggctacatctttgaccggttcaagaccaccgtggcacgcctcatagccatatttttctacaccaccgccacactcatcatagccttcacctctgcaggctcagccgtgctgctcttcctggccatgccaatgctcaccattgggggaatcctgtttctcatcaccaacctgcagattgggaacctatttggccaacaccgttcgaccatcatcactctgtacaatggagcatttgactcttcctcggcagtcttccttattattaagcttctttatgaaaaaggcatcagcctcagggcctccttcatcttcatctctgtctgcagtacctggcatgtagcacgcactttcctcctgatgccccgggggcacatcccatacccactgccccccaactacagctatggcctgtgccctgggaatggcaccacaaaggaagagaaggaaacagctgagcatgaaaacagggagctacagtcaaaggagttcctttcagcgaaggaagagaccccaggggcagggcagaagcaggaactccgctccttctggagctacgctttctctcggcgctttgcctggcacctggtgtggctgtctgtgatacagttgtggcactacctcttcattggcactctcaactccttgctgaccaacatggccggtggggacatggcacgagtcagcacctacacaaatgcctttgccttcactcagttcggagtgctgtgtgccccctggaatggcctgctcatggaccggcttaaacagaagtaccagaaggaagcaagaaagacaggttcctccactttggcggtggccctctgctcgacggtgccttcgctggccctgacatccctgctgtgcctgggcttcgccctctgtgcctcagtccccatcctccctctccagtacctcaccttcatcctgcaagtgatcagccgctccttcctctatgggagcaacgcggccttcctcacccttgctttcccttcagagcactttggcaagctctttgggctggtgatggccttgtcggctgtggtgtctctgctccagttccccatcttcaccctcatcaaaggctcccttcagaatgacccattttacgtgaatgtgatgttcatgcttgccattcttctgacattcttccacccctttctggtatatcgggaatgccgtacttggaaagaaagtccctctgcaattgcatagttcagaagccctcacttttcagccccgaggatggttttgttcatcttccaccacctttgaggacctcgtgtcccaaaagactttgcctatcccagcaaaacacacacacacacacacacacacacaaaataaagacacacaaggacgtctgcgcagcaagaaaagaatctcagttgccaagcagattgatatcacacagactcaaagcaaaggcatgtggaacttctttatttcaaaacagaagtgtctccttgcacttagccttggcagacccttgactccaggggagatgacctgggggaggaagtgtgtcaactatttctttaggcctgtttggctccgaagcctatatgtgcctggatcctctgccacgggttaaattttcaggtgaagagtgaggttgtcatggcctcagctatgcttcctggctctccctcaagagtgcagccttggctagagaactcacagctctgggaaaaagaggagcagacagggttccctgggcccagtctcagcccagccactgatgctggatgaccttggcctgaccctggtctggtctcagaatcacttttcccatctgtaaaattgagatgaattttggtgttgaaagttcttcctggagcagatgtcctagaaggttttaggaatagtgacagagtcaggccaccccaagggccatgggagccagctgacctgcttgaccgaaggatttctgacagactatctttggggatgttttcaagaagggatataagttatttactttgggcatttaaaagaaaatttctctcgggaataattttatagaaaaataaagcttctgtgtctaaggcaa

SEQ ID NO: 424680 - DNA, 2691 bp, Homo sapiens
aggcgagcaggggactgggaggggctgcgagaggcgcgaatgcgaacctggcccgtgcggaaagggcgcggagagccccggcgcggagcaggcgggggacggtattcagaattcgagcgcaggagctccgcttctccacctgctcccggggagctattgggcctcctcttccagcagcctctatctttattctacaggatccagagaatcacccgctgatggtttttgcccaggcctgaaacaaccagagagctacgggaaaggaagggcttggcttgccagaggaattttccaagtgctcaaacgccaggcttacggcgcctgtgatccgtccaggaggacaaagtgggatttgaagatccactccacttctgctcatggcgggccagggcctgcccctgcacgtggccacactgctgactgggctgctggaatgcctgggctttgctggcgtcctctttggctggccttcactagtgtttgtcttcaagaatgaagattactttaaggatctgtgtggaccagatgctgggccgattggcaatgccacagggcaggctgactgcaaagcccaggatgagaggttctcactcatcttcaccctggggtccttcatgaacaacttcatgacattccccactggctacatctttgaccggttcaagaccaccgtggcacgcctcatagccatatttttctacaccaccgccacactcatcatagccttcacctctgcaggctcagccgtgctgctcttcctggccatgccaatgctcaccattgggggaatcctgtttctcatcaccaacctgcagattgggaacctatttggccaacaccgttcgaccatcatcactctgtacaatggagcatttgactcttcctcggcagtcttccttattattaagcttctttatgaaaaaggcatcagcctcagggcctccttcatcttcatctctgtctgcagtacctggcatgtagcacgcactttcctcctgatgccccgggggcacatcccatacccactgccccccaactacagctatggcctgtgccctgggaatggcaccacaaaggaagagaaggaaacagctgagcatgaaaacagggagctacagtcaaaggagttcctttcagcgaaggaagagaccccaggggcagggcagaagcaggaactccgctccttctggagctacgctttctctcggcgctttgcctggcacctggtgtggctgtctgtgatacagttgtggcactacctcttcattggcactctcaactccttgctgaccaacatggccggtggggacatggcacgagtcagcacctacacaaatgcctttgccttcactcagttcggagtgctgtgtgccccctggaatggcctgctcatggaccggcttaaacagaagtaccagaaggaagcaagaaagacaggttcctccactttggcggtggccctctgctcgacggtgccttcgctggccctgacatccctgctgtgcctgggcttcgccctctgtgcctcagtccccatcctccctctccagtacctcaccttcatcctgcaagtgatcagccgctccttcctctatgggagcaacgcggccttcctcacccttgctttcccttcagagcactttggcaagctctttgggctggtgatggccttgtcggctgtggtgtctctgctccagttccccatcttcaccctcatcaaaggctcccttcagaatgacccattttacgtgaatgtgatgttcatgcttgccattcttctgacattcttccacccctttctggtatatcgggaatgccgtacttggaaagaaagtccctctgcaattgcatagttcagaagccctcacttttcagccccgaggatggttttgttcatcttccaccacctttgaggacctcgtgtcccaaaagactttgcctatcccagcaaaacacacacacacacacacacacacacaaaataaagacacacaaggacgtctgcgcagcaagaaaagaatctcagttgccaagcagattgatatcacacagactcaaagcaaaggcatgtggaacttctttatttcaaaacagaagtgtctccttgcacttagccttggcagacccttgactccaggggagatgacctgggggaggaagtgtgtcaactatttctttaggcctgtttggctccgaagcctatatgtgcctggatcctctgccacgggttaaattttcaggtgaagagtgaggttgtcatggcctcagctatgcttcctggctctccctcaagagtgcagccttggctagagaactcacagctctgggaaaaagaggagcagacagggttccctgggcccagtctcagcccagccactgatgctggatgaccttggcctgaccctggtctggtctcagaatcacttttcccatctgtaaaattgagatgaattttggtgttgaaagttcttcctggagcagatgtcctagaaggttttaggaatagtgacagagtcaggccaccccaagggccatgggagccagctgacctgcttgaccgaaggatttctgacagactatctttggggatgttttcaagaagggatataagttatttactttgggcatttaaaagaaaatttctctcgggaataattttatagaaaaataaagcttctgtgtctaaggcaa

SEQ ID NO: 424681 - DNA, 2467 bp, Homo sapiens
aggcgagcaggggactgggaggggctgcgagaggcgcgaatgcgaacctggcccgtgcggaaagggcgcggagagccccggcgcggagcaggcgggggacggtattcagaattcgagcgcaggagctccgcttctccacctgctcccggggagctattgggatccagagaatcacccgctgatggtttttgcccaggcctgaaacaaccagagagctacgggaaaggaagggcttggcttgccagaggaattttccaagtgctcaaacgccaggcttacggcgcctgtgatccgtccaggaggacaaagtgggatttgaagatccactccacttctgctcatggcgggccagggcctgcccctgcacgtggccacactgctgactgggctgctggaatgcctgggctttgctggcgtcctctttggctggccttcactagtgtttgtcttcaagaatgaagattactttaaggatctgtgtggaccagatgctgggccgattggcaatgccacagggcaggctgactgcaaagcccaggatgagaggttctcactcatcttcaccctggggtccttcatgaacaacttcatgacattccccactggctacatctttgaccggttcaagaccaccgtggcacgcctcatagccatatttttctacaccaccgccacactcatcatagccttcacctctgcaggctcagccgtgctgctcttcctggccatgccaatgctcaccattgggggaatcctgtttctcatcaccaacctgcagattgggaacctatttggccaacaccgttcgaccatcatcactctgtacaatggagcatttgactcttcctcggcagtcttccttattattaagcttctttatgaaaaaggcatcagcctcagggcctccttcatcttcatctctgtctgcagtacctggcatgtagcacgcactttcctcctgatgccccgggggcacatcccatacccactgccccccaactacagctatggcctgtgccctgggaatggcaccacaaaggaagagaaggaaacagctgagcatgaaaacagggagctacagtcaaaggagttcctttcagcgaaggaagagaccccaggggcagggcagaagcaggaactccgctccttctggagctacgctttctctcggcgctttgcctggcacctggtgtggctgtctgtgatacagttgtggcactacctcttcattggcactctcaactccttgctgaccaacatggccggtggggacatggcacgagtcagcacctacacaaatgcctttgccttcactcagttcggagtgctgtgtgccccctggaatggcctgctcatggaccggcttaaacagaagtaccagaaggaagcaagaaagacagtttcccttcagagcactttggcaagctctttgggctggtgatggccttgtcggctgtggtgtctctgctccagttccccatcttcaccctcatcaaaggctcccttcagaatgacccattttacgtgaatgtgatgttcatgcttgccattcttctgacattcttccacccctttctggtatatcgggaatgccgtacttggaaagaaagtccctctgcaattgcatagttcagaagccctcacttttcagccccgaggatggttttgttcatcttccaccacctttgaggacctcgtgtcccaaaagactttgcctatcccagcaaaacacacacacacacacacacacacacaaaataaagacacacaaggacgtctgcgcagcaagaaaagaatctcagttgccaagcagattgatatcacacagactcaaagcaaaggcatgtggaacttctttatttcaaaacagaagtgtctccttgcacttagccttggcagacccttgactccaggggagatgacctgggggaggaagtgtgtcaactatttctttaggcctgtttggctccgaagcctatatgtgcctggatcctctgccacgggttaaattttcaggtgaagagtgaggttgtcatggcctcagctatgcttcctggctctccctcaagagtgcagccttggctagagaactcacagctctgggaaaaagaggagcagacagggttccctgggcccagtctcagcccagccactgatgctggatgaccttggcctgaccctggtctggtctcagaatcacttttcccatctgtaaaattgagatgaattttggtgttgaaagttcttcctggagcagatgtcctagaaggttttaggaatagtgacagagtcaggccaccccaagggccatgggagccagctgacctgcttgaccgaaggatttctgacagactatctttggggatgttttcaagaagggatataagttatttactttgggcatttaaaagaaaatttctctcgggaataattttatagaaaaataaagcttctgtgtctaaggcaa

SEQ ID NO: 424682 - DNA, 1254 bp, Homo sapiens
gcatcaaaaagccttataggctttggagctgtcccatgaagccaaaggaaaagctgactgtcctcatttcaagtggagccacagccgcccaggattgacgcagccaggaccagtagaaatgggatcacaggattgacgcagccaggaccggtagaaatgggagcaacgcggccttcatcacccttgctttcccttcagagcactttggcaagctctttgggctggtgatggccttgtcggctgtggtgtctctgctccagttccccatcttcaccctcatcaaaggctcccttcagaatgacccattttacgtgaatgtgatgttcatgcttgccattcttctgacattcttccacccctttctggtatatcgggaatgccgtacttggaaagaaagtccctctgcaattgcatagttcagaagccctcacttttcagccccgaggatggttttgttcatcttccaccacctttgaggacctcgtgtcccaaaagactttgcctatcccagcaaaacacacacacacacacacacacacacaaaataaagacacacaaggacgtctgcgcagcaagaaaagaatctcagttgccaagcagattgatatcacacagactcaaagcaaaggcatgtggaacttctttatttcaaaacagaagtgtctccttgcacttagccttggcagacccttgactccaggggagatgacctgggggaggaagtgtgtcaactatttctttaggcctgtttggctccgaagcctatatgtgcctggatcctctgccacgggttaaattttcaggtgaagagtgaggttgtcatggcctcagctatgcttcctggctctccctcaagagtgcagccttggctagagaactcacagctctgggaaaaagaggagcagacagggttccctgggcccagtctcagcccagccactgatgctggatgaccttggcctgaccctggtctggtctcagaatcacttttcccatctgtaaaattgagatgaattttggtgttgaaagttcttcctggagcagatgtcctagaaggttttaggaatagtgacagagtcaggccaccccaagggccatgggagccagctgacctgcttgaccgaaggatttctgacagactatctttggggatgttttcaagaagggatataagttatttactttgggcatttaaaagaaaatttctctcgggaataattttatagaaaaataaagcttctgtgtctaaggcaa

SEQ ID NO: 424683 - DNA, 3011 bp, Homo sapiens
  misc_feature (779)..(779): n is a, c, g, or t
agcgggggatccaggagcgaggagccgggagcggggaacagggagtcggggagccgggaaccggggctggcagcggccgccatgagcacggtggaccttgctcgcgtgggcgcgtgcatcctgaagcatgcggtgaccggggaggccgtggagctgcggagcctgtggcgggagcacgcgtgcgtggtggccgggctgcggcgcttcgggtgcgtggtgtgccgctggatcgcccaggacctcagcagccttgctgggctcctggaccaacacggcgtgcgcctggtgggcgtagggcccgaggccctgggtctgcaggagttcctggacggcgactacttcgcgggagagctctacctggatgagagcaagcagctttacaaggagctaggcttcaagcggtacaacagcctgagcatcctcccagcagctctggggaagcccgtgcgtgatgtggctgccaaggccaaggctgttggcatccaggggaacttgtctggggacctgctgcagagcggagggctgctggtggtcagcaaaggtgggtcgagggaggggcctcggccactgcctcaaggagggccttgctgaacttggtggcccagcccaggccctctctctggcttgtcagtctcatcacagcccctccgccgcaatgtggcctggttctgcgtgtctgctgggctgagtggggctgtggcagaacagctcactcatctgggtagccgggtgggggatatggctggccagggctgccctaccctccctcctcctggtangtggctgtgaggtgcaggcggcctccggggtgccgtgactgcctgcccgctgctacaggtggtgataaagtgctcctgcatttcgtccagaagtccccaggcgactacgtccccaaggagcacatcctgcaggtcctgggcatctctgcggaggtctgtgccagcgacccgcctcagtgtgacagagaggtgtgagggaggcgaaggccctggcctccgaggatctgggtggcgtctgctgccctaggtgtgctggaagtccacttggaagaactgttccggaggcgctgggtcgggatgccgaacctctcctgatccgccggcagcaacgagccattaaaactgcagttcctgaccacgcactgcttcgcaggctccgagccctgcatcctccacagcccccgccttgctcactgttgggccctcagggcgggcagggtggctgtgagtcccaggtgtcatcttcctgctctgcgactttctctggagaccttgggcctttggcctgtggggcactggggatggtaacctcactgccccgtcactcccttcaaaggcgacagacccaagcccacgtcaggagaggagcgtggggtcagctccagcagggtcggggtcagtgcctgtgtctggtgggggccactcaggagagttgggttttcagggcagagatgggcttgattccacctggtggggtgggtggaccctggagactctcaggtgatgggccagcctgccccaaggctctttactgatgtcagaatcattgtttgcacctgctgggtatggcctttggggcggccggcccgggagggtcttagtctaattaggtgtgtccagcttcttggccacctttccctggggaccctaacaggcccagagcagagccccttacctcccaggtcagactacctgctcaggccctcccctcccatgcaggccgatgacaactgcagccctctctgcactccctagtccagacctggggaccactgtgggttcctgtgggtctcccggctcccttcctgcccccaatgccacccttgcagtggccatttaaaaatgcatagcaggtgacccactgcgtccctttgcgttcagcccctcctctggctttcagttacaccaagctaaaatttcaggttcccagctgcagctctctgggtcccccggtgccccagtggggctccccgcatctgaatgtgtggtccctgggggtgggcacttgggggcatcctggtcactgctggccctagcattggaccctaggagacctgactggaactggctccctccccatcagctcccagctgtcactctctcccacccccgggcagctgttttgcccaagaccactgctacctgtttacccaccctggtccctcccagacaagcaaggcctctgatttctttgaagcatttacttagctcaagtctgaagctgtagatactggaagacaatgcaccttggagggtgggcaggacacagttgattgtctctacagagctgtgacgggggcactgagccccgcgggtgtctgtggagggggctccggtccaggtactgcactggacactgctcatccctgggtgtcaggcaggtggctgcaccctaggccaggcgcagaggcctggcaggcaggcttggcatggttggccggggcgggacgtacactgggtcgccgctagctgcaccttcgcacagatgcctccgagcagcgggtgggcgtgggccgcacagcgcggcagggccttggctaccacacgcggcatcgctccttggggtgcatgggggtgccccgggcacagtggaacgtgtctgcgaaggcggccaggttctgcagcgaccccagtaccctgtgggtgggtgggtgtgacagcaggagcattgccatcttggacaaacatggccattttaagttctccgtgattaaaaaccagcccaaaacatcagcctaatggctcatgtcagtatgagcagaaacatttcaaccatgagataaacccccatctgaccagaaacatgccaatcctgagaataacctcccctccagccagagatattccaactctgcaataaaactctccttcacacagaaacattcgcagcctgcggtaggctcccccttcctaaacccttaaatgcccttagtctgtaagagaatgtccctgaccgaaatcggccagaagcccctctcaggtttattcccaaaataaacctgtctctgttga

SEQ ID NO: 424684 - DNA, 2640 bp, Homo sapiens
cgggacagcaactgtcccgcaaggcccggattgaggaggcgggagggaccgaagcaggcggacccaggatttggcgccgcgatctcgaggcttggcctggagccgtggagctgcggagcctgtggcgggagcacgcgtgcgtggtggccgggctgcggcgcttcgggtgcgtggtgtgccgctggatcgcccaggacctcagcagccttgctgggctcctggaccaacacggcgtgcgcctggtgggcgtagggcccgaggccctgggtctgcaggagttcctggacggcgactacttcgcgggagagctctacctggatgagagcaagcagctttacaaggagctaggcttcaagcggtacaacagcctgagcatcctcccagcagctctggggaagcccgtgcgtgatgtggctgccaaggccaaggctgttggcatccaggggaacttgtctggggacctgctgcagagcggagggctgctggtggtcagcaaagaagtccccaggcgactacgtccccaaggagcacatcctgcaggtcctgggcatctctgcggaggtctgtgccagcgacccgcctcagtgtgacagagaggtgtgagggaggcgaaggccctggcctccgaggatctgggtggcgtctgctgccctaggtgtgctggaagtccacttggaagaactgttccggaggcgctgggtcgggatgccgaacctctcctgatccgccggcagcaacgagccattaaaactgcagttcctgaccacgcactgcttcgcaggctccgagccctgcatcctccacagcccccgccttgctcactgttgggccctcagggcgggcagggtggctgtgagtcccaggtgtcatcttcctgctctgcgactttctctggagaccttgggcctttggcctgtggggcactggggatggtaacctcactgccccgtcactcccttcaaaggcgacagacccaagcccacgtcaggagaggagcgtggggtcagctccagcagggtcggggtcagtgcctgtgtctggtgggggccactcaggagagttgggttttcagggcagagatgggcttgattccacctggtggggtgggtggaccctggagactctcaggtgatgggccagcctgccccaaggctctttactgatgtcagaatcattgtttgcacctgctgggtatggcctttggggcggccggcccgggagggtcttagtctaattaggtgtgtccagcttcttggccacctttccctggggaccctaacaggcccagagcagagccccttacctcccaggtcagactacctgctcaggccctcccctcccatgcaggccgatgacaactgcagccctctctgcactccctagtccagacctggggaccactgtgggttcctgtgggtctcccggctcccttcctgcccccaatgccacccttgcagtggccatttaaaaatgcatagcaggtgacccactgcgtccctttgcgttcagcccctcctctggctttcagttacaccaagctaaaatttcaggttcccagctgcagctctctgggtcccccggtgccccagtggggctccccgcatctgaatgtgtggtccctgggggtgggcacttgggggcatcctggtcactgctggccctagcattggaccctaggagacctgactggaactggctccctccccatcagctcccagctgtcactctctcccacccccgggcagctgttttgcccaagaccactgctacctgtttacccaccctggtccctcccagacaagcaaggcctctgatttctttgaagcatttacttagctcaagtctgaagctgtagatactggaagacaatgcaccttggagggtgggcaggacacagttgattgtctctacagagctgtgacgggggcactgagccccgcgggtgtctgtggagggggctccggtccaggtactgcactggacactgctcatccctgggtgtcaggcaggtggctgcaccctaggccaggcgcagaggcctggcaggcaggcttggcatggttggccggggcgggacgtacactgggtcgccgctagctgcaccttcgcacagatgcctccgagcagcgggtgggcgtgggccgcacagcgcggcagggccttggctaccacacgcggcatcgctccttggggtgcatgggggtgccccgggcacagtggaacgtgtctgcgaaggcggccaggttctgcagcgaccccagtaccctgtgggtgggtgggtgtgacagcaggagcattgccatcttggacaaacatggccattttaagttctccgtgattaaaaaccagcccaaaacatcagcctaatggctcatgtcagtatgagcagaaacatttcaaccatgagataaacccccatctgaccagaaacatgccaatcctgagaataacctcccctccagccagagatattccaactctgcaataaaactctccttcacacagaaacattcgcagcctgcggtaggctcccccttcctaaacccttaaatgcccttagtctgtaagagaatgtccctgaccgaaatcggccagaagcccctctcaggtttattcccaaaataaacctgtctctgttga

SEQ ID NO: 424685 - DNA, 2672 bp, Homo sapiens
cgggacagcaactgtcccgcaaggcccggattgaggaggcgggagggaccgaagcaggcggacccaggatttggcgccgcgatctcgaggcttggcctggagccgtggagctgcggagcctgtggcgggagcacgcgtgcgtggtggccgggctgcggcgcttcgggtgcgtggtgtgccgctggatcgcccaggacctcagcagccttgctgggctcctggaccaacacggcgtgcgcctggtgggcgtagggcccgaggccctgggtctgcaggagttcctggacggcgactacttcgcgggagagctctacctggatgagagcaagcagctttacaaggagctaggcttcaagcggtacaacagcctgagcatcctcccagcagctctggggaagcccgtgcgtgatgtggctgccaaggccaaggctgttggcatccaggggaacttgtctggggacctgctgcagagcggagggctgctggtggtcagcaaaggtggtgataaagtgctcctgcatttcgtccagaagtccccaggcgactacgtccccaaggagcacatcctgcaggtcctgggcatctctgcggaggtctgtgccagcgacccgcctcagtgtgacagagaggtgtgagggaggcgaaggccctggcctccgaggatctgggtggcgtctgctgccctaggtgtgctggaagtccacttggaagaactgttccggaggcgctgggtcgggatgccgaacctctcctgatccgccggcagcaacgagccattaaaactgcagttcctgaccacgcactgcttcgcaggctccgagccctgcatcctccacagcccccgccttgctcactgttgggccctcagggcgggcagggtggctgtgagtcccaggtgtcatcttcctgctctgcgactttctctggagaccttgggcctttggcctgtggggcactggggatggtaacctcactgccccgtcactcccttcaaaggcgacagacccaagcccacgtcaggagaggagcgtggggtcagctccagcagggtcggggtcagtgcctgtgtctggtgggggccactcaggagagttgggttttcagggcagagatgggcttgattccacctggtggggtgggtggaccctggagactctcaggtgatgggccagcctgccccaaggctctttactgatgtcagaatcattgtttgcacctgctgggtatggcctttggggcggccggcccgggagggtcttagtctaattaggtgtgtccagcttcttggccacctttccctggggaccctaacaggcccagagcagagccccttacctcccaggtcagactacctgctcaggccctcccctcccatgcaggccgatgacaactgcagccctctctgcactccctagtccagacctggggaccactgtgggttcctgtgggtctcccggctcccttcctgcccccaatgccacccttgcagtggccatttaaaaatgcatagcaggtgacccactgcgtccctttgcgttcagcccctcctctggctttcagttacaccaagctaaaatttcaggttcccagctgcagctctctgggtcccccggtgccccagtggggctccccgcatctgaatgtgtggtccctgggggtgggcacttgggggcatcctggtcactgctggccctagcattggaccctaggagacctgactggaactggctccctccccatcagctcccagctgtcactctctcccacccccgggcagctgttttgcccaagaccactgctacctgtttacccaccctggtccctcccagacaagcaaggcctctgatttctttgaagcatttacttagctcaagtctgaagctgtagatactggaagacaatgcaccttggagggtgggcaggacacagttgattgtctctacagagctgtgacgggggcactgagccccgcgggtgtctgtggagggggctccggtccaggtactgcactggacactgctcatccctgggtgtcaggcaggtggctgcaccctaggccaggcgcagaggcctggcaggcaggcttggcatggttggccggggcgggacgtacactgggtcgccgctagctgcaccttcgcacagatgcctccgagcagcgggtgggcgtgggccgcacagcgcggcagggccttggctaccacacgcggcatcgctccttggggtgcatgggggtgccccgggcacagtggaacgtgtctgcgaaggcggccaggttctgcagcgaccccagtaccctgtgggtgggtgggtgtgacagcaggagcattgccatcttggacaaacatggccattttaagttctccgtgattaaaaaccagcccaaaacatcagcctaatggctcatgtcagtatgagcagaaacatttcaaccatgagataaacccccatctgaccagaaacatgccaatcctgagaataacctcccctccagccagagatattccaactctgcaataaaactctccttcacacagaaacattcgcagcctgcggtaggctcccccttcctaaacccttaaatgcccttagtctgtaagagaatgtccctgaccgaaatcggccagaagcccctctcaggtttattcccaaaataaacctgtctctgttga

SEQ ID NO: 424686 - DNA, 2735 bp, Homo sapiens
agcgggggatccaggagcgaggagccgggagcggggaacagggagtcggggagccgggaaccggggctggcagcggccgccatgagcacggtggaccttgctcgcgtgggcgcgtgcatcctgaagcatgcggtgaccggggaggccgtggagctgcggagcctgtggcgggagcacgcgtgcgtggtggccgggctgcggcgcttcgggtgcgtggtgtgccgctggatcgcccaggacctcagcagccttgctgggctcctggaccaacacggcgtgcgcctggtgggcgtagggcccgaggccctgggtctgcaggagttcctggacggcgactacttcgcgggagagctctacctggatgagagcaagcagctttacaaggagctaggcttcaagcggtacaacagcctgagcatcctcccagcagctctggggaagcccgtgcgtgatgtggctgccaaggctgtacccactcctgacaggccaaggctgttggcatccaggggaacttgtctggggacctgctgcagagcggagggctgctggtggtcagcaaaggtggtgataaagtgctcctgcatttcgtccagaagtccccaggcgactacgtccccaaggagcacatcctgcaggtcctgggcatctctgcggaggtctgtgccagcgacccgcctcagtgtgacagagaggtgtgagggaggcgaaggccctggcctccgaggatctgggtggcgtctgctgccctaggtgtgctggaagtccacttggaagaactgttccggaggcgctgggtcgggatgccgaacctctcctgatccgccggcagcaacgagccattaaaactgcagttcctgaccacgcactgcttcgcaggctccgagccctgcatcctccacagcccccgccttgctcactgttgggccctcagggcgggcagggtggctgtgagtcccaggtgtcatcttcctgctctgcgactttctctggagaccttgggcctttggcctgtggggcactggggatggtaacctcactgccccgtcactcccttcaaaggcgacagacccaagcccacgtcaggagaggagcgtggggtcagctccagcagggtcggggtcagtgcctgtgtctggtgggggccactcaggagagttgggttttcagggcagagatgggcttgattccacctggtggggtgggtggaccctggagactctcaggtgatgggccagcctgccccaaggctctttactgatgtcagaatcattgtttgcacctgctgggtatggcctttggggcggccggcccgggagggtcttagtctaattaggtgtgtccagcttcttggccacctttccctggggaccctaacaggcccagagcagagccccttacctcccaggtcagactacctgctcaggccctcccctcccatgcaggccgatgacaactgcagccctctctgcactccctagtccagacctggggaccactgtgggttcctgtgggtctcccggctcccttcctgcccccaatgccacccttgcagtggccatttaaaaatgcatagcaggtgacccactgcgtccctttgcgttcagcccctcctctggctttcagttacaccaagctaaaatttcaggttcccagctgcagctctctgggtcccccggtgccccagtggggctccccgcatctgaatgtgtggtccctgggggtgggcacttgggggcatcctggtcactgctggccctagcattggaccctaggagacctgactggaactggctccctccccatcagctcccagctgtcactctctcccacccccgggcagctgttttgcccaagaccactgctacctgtttacccaccctggtccctcccagacaagcaaggcctctgatttctttgaagcatttacttagctcaagtctgaagctgtagatactggaagacaatgcaccttggagggtgggcaggacacagttgattgtctctacagagctgtgacgggggcactgagccccgcgggtgtctgtggagggggctccggtccaggtactgcactggacactgctcatccctgggtgtcaggcaggtggctgcaccctaggccaggcgcagaggcctggcaggcaggcttggcatggttggccggggcgggacgtacactgggtcgccgctagctgcaccttcgcacagatgcctccgagcagcgggtgggcgtgggccgcacagcgcggcagggccttggctaccacacgcggcatcgctccttggggtgcatgggggtgccccgggcacagtggaacgtgtctgcgaaggcggccaggttctgcagcgaccccagtaccctgtgggtgggtgggtgtgacagcaggagcattgccatcttggacaaacatggccattttaagttctccgtgattaaaaaccagcccaaaacatcagcctaatggctcatgtcagtatgagcagaaacatttcaaccatgagataaacccccatctgaccagaaacatgccaatcctgagaataacctcccctccagccagagatattccaactctgcaataaaactctccttcacacagaaacattcgcagcctgcggtaggctcccccttcctaaacccttaaatgcccttagtctgtaagagaatgtccctgaccgaaatcggccagaagcccctctcaggtttattcccaaaataaacctgtctctgttga

SEQ ID NO: 424687 - DNA, 2639 bp, Homo sapiens
agcgggggatccaggagcgaggagccgggagcggggaacagggagtcggggagccgggaaccggggctggcagcggccgccatgagcacggtggaccttgctcgcgtgggcgcgtgcatcctgaagcatgcggtgaccggggaggccgtggagctgcggagcctgtggcgggagcacgcgtgcgtggtggccgggctgcggcgcttcgggtgcgtggtgtgccgctggatcgcccaggacctcagcagccttgctgggctcctggaccaacacggcgtgcgcctggtgggcgtagggcccgaggccctgggtctgcaggagttcctggacggcgactacttcgcgggagagctctacctggatgagagcaagcagctttacaaggagctaggcttcaagcggtacaacagcctgagcatcctcccagcagctctggggaagcccgtgcgtgatgtggctgccaaggtggtgataaagtgctcctgcatttcgtccagaagtccccaggcgactacgtccccaaggagcacatcctgcaggtcctgggcatctctgcggaggtctgtgccagcgacccgcctcagtgtgacagagaggtgtgagggaggcgaaggccctggcctccgaggatctgggtggcgtctgctgccctaggtgtgctggaagtccacttggaagaactgttccggaggcgctgggtcgggatgccgaacctctcctgatccgccggcagcaacgagccattaaaactgcagttcctgaccacgcactgcttcgcaggctccgagccctgcatcctccacagcccccgccttgctcactgttgggccctcagggcgggcagggtggctgtgagtcccaggtgtcatcttcctgctctgcgactttctctggagaccttgggcctttggcctgtggggcactggggatggtaacctcactgccccgtcactcccttcaaaggcgacagacccaagcccacgtcaggagaggagcgtggggtcagctccagcagggtcggggtcagtgcctgtgtctggtgggggccactcaggagagttgggttttcagggcagagatgggcttgattccacctggtggggtgggtggaccctggagactctcaggtgatgggccagcctgccccaaggctctttactgatgtcagaatcattgtttgcacctgctgggtatggcctttggggcggccggcccgggagggtcttagtctaattaggtgtgtccagcttcttggccacctttccctggggaccctaacaggcccagagcagagccccttacctcccaggtcagactacctgctcaggccctcccctcccatgcaggccgatgacaactgcagccctctctgcactccctagtccagacctggggaccactgtgggttcctgtgggtctcccggctcccttcctgcccccaatgccacccttgcagtggccatttaaaaatgcatagcaggtgacccactgcgtccctttgcgttcagcccctcctctggctttcagttacaccaagctaaaatttcaggttcccagctgcagctctctgggtcccccggtgccccagtggggctccccgcatctgaatgtgtggtccctgggggtgggcacttgggggcatcctggtcactgctggccctagcattggaccctaggagacctgactggaactggctccctccccatcagctcccagctgtcactctctcccacccccgggcagctgttttgcccaagaccactgctacctgtttacccaccctggtccctcccagacaagcaaggcctctgatttctttgaagcatttacttagctcaagtctgaagctgtagatactggaagacaatgcaccttggagggtgggcaggacacagttgattgtctctacagagctgtgacgggggcactgagccccgcgggtgtctgtggagggggctccggtccaggtactgcactggacactgctcatccctgggtgtcaggcaggtggctgcaccctaggccaggcgcagaggcctggcaggcaggcttggcatggttggccggggcgggacgtacactgggtcgccgctagctgcaccttcgcacagatgcctccgagcagcgggtgggcgtgggccgcacagcgcggcagggccttggctaccacacgcggcatcgctccttggggtgcatgggggtgccccgggcacagtggaacgtgtctgcgaaggcggccaggttctgcagcgaccccagtaccctgtgggtgggtgggtgtgacagcaggagcattgccatcttggacaaacatggccattttaagttctccgtgattaaaaaccagcccaaaacatcagcctaatggctcatgtcagtatgagcagaaacatttcaaccatgagataaacccccatctgaccagaaacatgccaatcctgagaataacctcccctccagccagagatattccaactctgcaataaaactctccttcacacagaaacattcgcagcctgcggtaggctcccccttcctaaacccttaaatgcccttagtctgtaagagaatgtccctgaccgaaatcggccagaagcccctctcaggtttattcccaaaataaacctgtctctgttga

SEQ ID NO: 424688 - DNA, 1998 bp, Homo sapiens
ctcagtacgagccggtggttatcggccgagttggaagaactgttccggaggcgctgggtcgggatgccgaacctctcctgatccgccggcagcaacgagccattaaaactgcagttcctgaccacgcactgcttcgcaggctccgagccctgcatcctccacagcccccgccttgctcactgttgggccctcagggcgggcagggtggctgtgagtcccaggtgtcatcttcctgctctgcgactttctctggagaccttgggcctttggcctgtggggcactggggatggtaacctcactgccccgtcactcccttcaaaggcgacagacccaagcccacgtcaggagaggagcgtggggtcagctccagcagggtcggggtcagtgcctgtgtctggtgggggccactcaggagagttgggttttcagggcagagatgggcttgattccacctggtggggtgggtggaccctggagactctcaggtgatgggccagcctgccccaaggctctttactgatgtcagaatcattgtttgcacctgctgggtatggcctttggggcggccggcccgggagggtcttagtctaattaggtgtgtccagcttcttggccacctttccctggggaccctaacaggcccagagcagagccccttacctcccaggtcagactacctgctcaggccctcccctcccatgcaggccgatgacaactgcagccctctctgcactccctagtccagacctggggaccactgtgggttcctgtgggtctcccggctcccttcctgcccccaatgccacccttgcagtggccatttaaaaatgcatagcaggtgacccactgcgtccctttgcgttcagcccctcctctggctttcagttacaccaagctaaaatttcaggttcccagctgcagctctctgggtcccccggtgccccagtggggctccccgcatctgaatgtgtggtccctgggggtgggcacttgggggcatcctggtcactgctggccctagcattggaccctaggagacctgactggaactggctccctccccatcagctcccagctgtcactctctcccacccccgggcagctgttttgcccaagaccactgctacctgtttacccaccctggtccctcccagacaagcaaggcctctgatttctttgaagcatttacttagctcaagtctgaagctgtagatactggaagacaatgcaccttggagggtgggcaggacacagttgattgtctctacagagctgtgacgggggcactgagccccgcgggtgtctgtggagggggctccggtccaggtactgcactggacactgctcatccctgggtgtcaggcaggtggctgcaccctaggccaggcgcagaggcctggcaggcaggcttggcatggttggccggggcgggacgtacactgggtcgccgctagctgcaccttcgcacagatgcctccgagcagcgggtgggcgtgggccgcacagcgcggcagggccttggctaccacacgcggcatcgctccttggggtgcatgggggtgccccgggcacagtggaacgtgtctgcgaaggcggccaggttctgcagcgaccccagtaccctgtgggtgggtgggtgtgacagcaggagcattgccatcttggacaaacatggccattttaagttctccgtgattaaaaaccagcccaaaacatcagcctaatggctcatgtcagtatgagcagaaacatttcaaccatgagataaacccccatctgaccagaaacatgccaatcctgagaataacctcccctccagccagagatattccaactctgcaataaaactctccttcacacagaaacattcgcagcctgcggtaggctcccccttcctaaacccttaaatgcccttagtctgtaagagaatgtccctgaccgaaatcggccagaagcccctctcaggtttattcccaaaataaacctgtctctgttga

SEQ ID NO: 424689 - DNA, 1358 bp, Homo sapiens
agcgggggatccaggagcgaggagccgggagcggggaacagggagtcggggagccgggaaccggggccgatgacaactgcagccctctctgcactccctagtccagacctggggaccactgtgggttcctgtgggtctcccggctcccttcctgcccccaatgccacccttgcagtggccatttaaaaatgcatagcaggtgacccactgcgtccctttgcgttcagcccctcctctggctttcagttacaccaagctaaaatttcaggttcccagctgcagctctctgggtcccccggtgccccagtggggctccccgcatctgaatgtgtggtccctgggggtgggcacttgggggcatcctggtcactgctggccctagcattggaccctaggagacctgactggaactggctccctccccatcagctcccagctgtcactctctcccacccccgggcagctgttttgcccaagaccactgctacctgtttacccaccctggtccctcccagacaagcaaggcctctgatttctttgaagcatttacttagctcaagtctgaagctgtagatactggaagacaatgcaccttggagggtgggcaggacacagttgattgtctctacagagctgtgacgggggcactgagccccgcgggtgtctgtggagggggctccggtccaggtactgcactggacactgctcatccctgggtgtcaggcaggtggctgcaccctaggccaggcgcagaggcctggcaggcaggcttggcatggttggccggggcgggacgtacactgggtcgccgctagctgcaccttcgcacagatgcctccgagcagcgggtgggcgtgggccgcacagcgcggcagggccttggctaccacacgcggcatcgctccttggggtgcatgggggtgccccgggcacagtggaacgtgtctgcgaaggcggccaggttctgcagcgaccccagtaccctgtgggtgggtgggtgtgacagcaggagcattgccatcttggacaaacatggccattttaagttctccgtgattaaaaaccagcccaaaacatcagcctaatggctcatgtcagtatgagcagaaacatttcaaccatgagataaacccccatctgaccagaaacatgccaatcctgagaataacctcccctccagccagagatattccaactctgcaataaaactctccttcacacagaaacattcgcagcctgcggtaggctcccccttcctaaacccttaaatgcccttagtctgtaagagaatgtccctgaccgaaatcggccagaagcccctctcaggtttattcccaaaataaacctgtctctgttga

SEQ ID NO: 424690 - DNA, 2873 bp, Homo sapiens
agcgggggatccaggagcgaggagccgggagcggggaacagggagtcggggagccgggaaccggggctggcagcggccgccatgagcacggtggaccttgctcgcgtgggcgcgtgcatcctgaagcatgcggtgaccggggaggccgtggagctgcggagcctgtggcgggagcacgcgtgcgtggtggccgggctgcggcgcttcgggtgcgtggtgtgccgctggatcgcccaggacctcagcagccttgctgggctcctggaccaacacggcgtgcgcctggtgggcgtagggcccgaggccctgggtctgcaggagttcctggacggcgactacttcgcgggagagctctacctggatgagagcaagcagctttacaaggagctaggcttcaagcggtacaacagcctgagcatcctcccagcagctctggggaagcccgtgcgtgatgtggctgccaaggccaaggctgttggcatccaggggaacttgtctggggacctgctgcagagcggagggctgctggtggtcagcaaaggtggtgataaagtgctcctgcatttcgtccagaagtccccaggcgactacgtccccaaggagcacatcctgcaggtcctgggcatctctgcggaggtctgtgccagcgacccgcctcagtgtgacagagaggtgtgagggaggcgaaggccctggcctccgaggatctgggtggcgtctgctgccctaggtgtgctggaagtccacttggaagaactgttccggaggcgctgggtcgggatgccgaacctctcctgatccgccggcagcaacgagccattaaaactgcagttcctgaccacgcactgcttcgcaggctccgagccctgcatcctccacagcccccgccttgctcactgttgggccctcagggcgggcagggtggctgtgagtcccaggtgtcatcttcctgctctgcgactttctctggagaccttgggcctttggcctgtggggcactggggatggtaacctcactgccccgtcactcccttcaaaggcgacagacccaagcccacgtcaggagaggagcgtggggtcagctccagcagggtcggggtcagtgcctgtgtctggtgggggccactcaggagagttgggttttcagggcagagatgggcttgattccacctggtggggtgggtggaccctggagactctcaggtgatgggccagcctgccccaaggctctttactgatgtcagaatcattgtttgcacctgctgggtatggcctttggggcggccggcccgggagggtcttagtctaattaggtgtgtccagcttcttggccacctttccctggggaccctaacaggcccagagcagagccccttacctcccaggtcagactacctgctcaggccctcccctcccatgcaggccgatgacaactgcagccctctctgcactccctagtccagacctggggaccactgtgggttcctgtgggtctcccggctcccttcctgcccccaatgccacccttgcagtggccatttaaaaatgcatagcaggtgacccactgcgtccctttgcgttcagcccctcctctggctttcagttacaccaagctaaaatttcaggttcccagctgcagctctctgggtcccccggtgccccagtggggctccccgcatctgaatgtgtggtccctgggggtgggcacttgggggcatcctggtcactgctggccctagcattggaccctaggagacctgactggaactggctccctccccatcagctcccagctgtcactctctcccacccccgggcagctgttttgcccaagaccactgctacctgtttacccaccctggtccctcccagacaagcaaggcctctgatttctttgaagcatttacttagctcaagtctgaagctgtagatactggaagacaatgcaccttggagggtgggcaggacacagttgattgtctctacagagctgtgacgggggcactgagccccgcgggtgtctgtggagggggctccggtccaggtactgcactggacactgctcatccctgggtgtcaggcaggtggctgcaccctaggccaggcgcagaggcctggcaggcaggcttggcatggttggccggggcgggacgtacactgggtcgccgctagctgcaccttcgcacagatgcctccgagcagcgggtgggcgtgggccgcacagcgcggcagggccttggctaccacacgcggcatcgctccttggggtgcatgggggtgccccgggcacagtggaacgtgtctgcgaaggcggccaggttctgcagcgaccccagtaccctgtgggtgggtgggtgtgacagcaggagcattgccatcttggacaaacatggccattttaagttctccgtgattaaaaaccagcccaaaacatcagcctaatggctcatgtcagtatgagcagaaacatttcaaccatgagataaacccccatctgaccagaaacatgccaatcctgagaataacctcccctccagccagagatattccaactctgcaataaaactctccttcacacagaaacattcgcagcctgcggtaggctcccccttcctaaacccttaaatgcccttagtctgtaagagaatgtccctgaccgaaatcggccagaagcccctctcaggtttattcccaaaataaacctgtctctgttgaaacaccacagaacaacaaaactccgcacaagggacacagctctcgagccgaagggcgacagcaccacacggacgaagcagagagagagagcaaccccgagcagaggagagacacgagcacagcgcgagagagccgcgacaacaggagccgcatagcag

SEQ ID NO: 424691 - DNA, 877 bp, Homo sapiens
gctgactcttgaggatcccacggtcacgcttcaaacacggaaggatggtgatagctgtttcgcatttacttagctcaagtctgaagctgtagatactggaagacaatgcaccttggagggtgggcaggacacagttgattgtctctacagagctgtgacgggggcactgagccccgcgggtgtctgtggagggggctccggtccaggtactgcactggacactgctcatccctgggtgtcaggcaggtggctgcaccctaggccaggcgcagaggcctggcaggcaggcttggcatggttggccggggcgggacgtacactgggtcgccgctagctgcaccttcgcacagatgcctccgagcagcgggtgggcgtgggccgcacagcgcggcagggccttggctaccacacgcggcatcgctccttggggtgcatgggggtgccccgggcacagtggaacgtgtctgcgaaggcggccaggttctgcagcgaccccagtaccctgtgggtgggtgggtgtgacagcaggagcattgccatcttggacaaacatggccattttaagttctccgtgattaaaaaccagcccaaaacatcagcctaatggctcatgtcagtatgagcagaaacatttcaaccatgagataaacccccatctgaccagaaacatgccaatcctgagaataacctcccctccagccagagatattccaactctgcaataaaactctccttcacacagaaacattcgcagcctgcggtaggctcccccttcctaaacccttaaatgcccttagtctgtaagagaatgtccctgaccgaaatcggccagaagcccctctcaggtttattcccaaaataaacctgtctctgttga

SEQ ID NO: 424692 - DNA, 2567 bp, Homo sapiens
agcgggggatccaggagcgaggagccgggagcggggaacagggagtcggggagccgggaaccggggctggcagcggccgccatgagcacggtggaccttgctcgcgtgggcgcgtgcatcctgaagcatgcggtgaccggggaggccgtggagctgcggagcctgtggcgggagcacgcgtgcgtggtggccgggctgcggcgcttcgggtgcgtggtgtgccgctggatcgcccaggacctcagcagccttgctgggctcctggaccaacacggcgtgcgcctggtgggcgtagggcccgaggccctgggtctgcaggagttcctggacggcgactacttcgcgggagagctctacctggatgagagcaagcagctttacaaggagctaggcttcaagcggtacaacagcctgagcatcctcccagcagctctggggaagcccgtgcgtgatgtggctgccaaggccaaggctgttggcatccaggggaacttgtctggggacctgctgcagagcggagggctgctggtggtcagcaaaggtggtgataaagtgctcctgcatttcgtccagaagtccccaggcgactacgtccccaaggagcacatcctgcaggtcctgggcatctctgcggaggtctgtgccagcgacccgcctcagtgtgacagagaggtgtgagggaggcgaaggccctggcctccgaggatctgggtggcgtctgctgccctaggtgtgctggaagtccacttggaagaactgttccggaggcgctgggtcgggatgccgaacctctcctgatccgccggcagcaacgagccattaaaactgcagttcctgaccacgcactgcttcgcaggctccgagccctgcatcctccacagcccccgccttgctcactgttgggccctcagggcgggcagggtggctgtgagtcccaggtgtcatcttcctgctctgcgactttctctggagaccttgggcctttggcctgtggggcactggggatggtaacctcactgccccgtcactcccttcaaaggcgacagacccaagcccacgtcaggagaggagcgtggggtcagctccagcagggtcggggtcagtgcctgtgtctggtgggggccactcaggagagttgggttttcagggcagagatgggcttgattccacctggtggggtgggtggaccctggagactctcaggtgatgggccagcctgccccaaggctctttactgatgtcagaatcattgtttgcacctgctgggtatggcctttggggcggccggcccgggagggtcttagtctaattaggtgtgtccagcttcttggccacctttccctggggaccctaacaggcccagagcagagccccttacctcccaggtcagactacctgctcaggccctcccctcccatgcaggccgatgacaactgcagccctctctgcactccctagtccagacctggggaccactgtgggttcctgtgggtctcccggctcccttcctgcccccaatgccacccttgcagtggccatttaaaaatgcatagcaggtgacccactgcgtccctttgcgttcagcccctcctctggctttcagttacaccaagctaaaatttcaggttcccagctgcagctctctgggtcccccggtgccccagtggggctccccgcatctgaatgtgtggtccctgggggtgggcacttgggggcatcctggtcactgctggccctagcattggaccctaggagacctgactggaactggctccctccccatcagctcccagctgtcactctctcccacccccgggcagctgttttgcccaagaccactgctacctgtttacccaccctggtccctcccagacaagcaaggcctctgatttctttgaagcatttacttagctcaagtctgaagctgtagatactggaagacaatgcaccttggagggtgggcaggacacagttgattgtctctacagagctgtgacgggggcactgagccccgcgggtgtctgtggagggggctccggtccaggtactgcactggacactgctcatccctgggtgtcaggcaggtggctgcaccctaggccaggcgcagaggcctggcaggcaggcttggcatggttggccggggcgggacgtacactgggtcgccgctagctgcaccttcgcacagatgcctccgagcagcgggtgggcgtgggccgcacagcgcggcagggccttggctaccacacgcggcatcgctccttggggtgcatggggtcatgtcagtatgagcagaaacatttcaaccatgagataaacccccatctgaccagaaacatgccaatcctgagaataacctcccctccagccagagatattccaactctgcaataaaactctccttcacacagaaacattcgcagcctgcggtaggctcccccttcctaaacccttaaatgcccttagtctgtaagagaatgtccctgaccgaaatcggccagaagcccctctcaggtttattcccaaaataaacctgtctctgttgatctgttgagccactttttgtg

SEQ ID NO: 424693 - DNA, 1622 bp, Homo sapiens
agcgggggatccaggagcgaggagccgggagcggggaacagggagtcggggagccgggaaccggggctggcagcggccgccatgagcacggtggaccttgctcgcgtgggcgcgtgcatcctgaagcatgcggtgaccggggaggccgtggagctgcggagcctgtggcgggagcacgcgtgcgtggtggccgggctgcggcgcttcgggtgcgtggtgtgccgctggatcgcccaggacctcagcagccttgctgggctcctggaccaacacggcgtgcgcctggtgggcgtagggcccgaggccctgggtctgcaggagttcctggacggcgactacttcgcgggagagctctacctggatgagagcaagcagctttacaaggagctaggcttcaagcggtacaacagcctgagcatcctcccagcagctctggggaagcccgtgcgtgatgtggctgccaaggccaaggctgttggcatccaggggaacttgtctggggacctgctgcagagcggagggctgctggtggtcagcaaaggtggtgataaagtgctcctgcatttcgtccagaagtccccaggcgactacgtccccaaggagcacatcctgcaggtcctgggcatctctgcggaggtctgtgccagcgacccgcctcagtgtgacagagaggtgtgagggaggcgaaggccctggcctccgaggatctgggtggcgtctgctgccctaggtgtgctggaagtccacttggaagaactgttccggaggcgctgggtcgggatgccgaacctctcctgatccgccggcagcaacgagccattaaaactgcagttcctgaccacgcactgcttcgcaggctccgagccctgcatcctccacagcccccgccttgctcactgttgggccctcagggcgggcagggtggctgtgagtcccaggtgtcatcttcctgctctgcgactttctctggagaccttgggcctttggcctgtggggcactggggatggtaacctcactgccccgtcactcccttcaaaggcgacagacccaagcccacgtcaggagaggagcgtggggtcagctccagcagggtcggggtcagtgcctgtgtctggtgggggccactcaggagagttgggttttcagggcagagatgggcttgattccacctggtggggtgggtggaccctggagactctcaggtgatgggccagcctgccccaaggctctttactgatgtcagaatcattgtttgcacctgctgggtatggcctttggggcggccggcccgggagggtcttagtctaattaggtgtgtccagcttcttggccacctttccctggggaccctaacaggcccagagcagagccccttacctcccaggtcagactacctgctcaggccctcccctcccatgcaggccgatgacaactgcagccctctctgcactccctagtccagacctggggaccactgtgggttcctgtgggtctcccggctcccttcctgcccccaatgccacccttgcagtggccatttaaaaatgcatagcaggtgacccactgcgtccctttgcgttcagcccctctcgccaggtattcaccgtcacgactgtgtaat

SEQ ID NO: 424694 - DNA, 3064 bp, Homo sapiens
  misc_feature (832)..(832): n is a, c, g, or t
cgggacagcaactgtcccgcaaggcccggattgaggaggcgggagggaccgaagcaggcggacccaggatttggcgccgcgatctcgaggcttggcctggagccgtggagctgcggagcctgtggcgggagcacgcgtgcgtggtggccgggctgcggcgcttcgggtgcgtggtgtgccgctggatcgcccaggacctcagcagccttgctgggctcctggaccaacacggcgtgcgcctggtgggcgtagggcccgaggccctgggtctgcaggagttcctggacggcgactacttcgcgggagagctctacctggatgagagcaagcagctttacaaggagctaggcttcaagcggtacaacagcctgagcatcctcccagcagctctggggaagcccgtgcgtgatgtggctgccaaggtgtgtgcgggtcaagggtgtacaggccggggggtggtgggagctcccaggagcctttcttctaggattgactcaggctgtacccactcctgacaggccaaggctgttggcatccaggggaacttgtctggggacctgctgcagagcggagggctgctggtggtcagcaaaggtgggtcgagggaggggcctcggccactgcctcaaggagggccttgctgaacttggtggcccagcccaggccctctctctggcttgtcagtctcatcacagcccctccgccgcaatgtggcctggttctgcgtgtctgctgggctgagtggggctgtggcagaacagctcactcatctgggtagccgggtgggggatatggctggccagggctgccctaccctccctcctcctggtangtggctgtgaggtgcaggcggcctccggggtgccgtgactgcctgcccgctgctacaggtggtgataaagtgctcctgcatttcgtccagaagtccccaggcgactacgtccccaaggagcacatcctgcaggtcctgggcatctctgcggaggtctgtgccagcgacccgcctcagtgtgacagagaggtgtgagggaggcgaaggccctggcctccgaggatctgggtggcgtctgctgccctaggtgtgctggaagtccacttggaagaactgttccggaggcgctgggtcgggatgccgaacctctcctgatccgccggcagcaacgagccattaaaactgcagttcctgaccacgcactgcttcgcaggctccgagccctgcatcctccacagcccccgccttgctcactgttgggccctcagggcgggcagggtggctgtgagtcccaggtgtcatcttcctgctctgcgactttctctggagaccttgggcctttggcctgtggggcactggggatggtaacctcactgccccgtcactcccttcaaaggcgacagacccaagcccacgtcaggagaggagcgtggggtcagctccagcagggtcggggtcagtgcctgtgtctggtgggggccactcaggagagttgggttttcagggcagagatgggcttgattccacctggtggggtgggtggaccctggagactctcaggtgatgggccagcctgccccaaggctctttactgatgtcagaatcattgtttgcacctgctgggtatggcctttggggcggccggcccgggagggtcttagtctaattaggtgtgtccagcttcttggccacctttccctggggaccctaacaggcccagagcagagccccttacctcccaggtcagactacctgctcaggccctcccctcccatgcaggccgatgacaactgcagccctctctgcactccctagtccagacctggggaccactgtgggttcctgtgggtctcccggctcccttcctgcccccaatgccacccttgcagtggccatttaaaaatgcatagcaggtgacccactgcgtccctttgcgttcagcccctcctctggctttcagttacaccaagctaaaatttcaggttcccagctgcagctctctgggtcccccggtgccccagtggggctccccgcatctgaatgtgtggtccctgggggtgggcacttgggggcatcctggtcactgctggccctagcattggaccctaggagacctgactggaactggctccctccccatcagctcccagctgtcactctctcccacccccgggcagctgttttgcccaagaccactgctacctgtttacccaccctggtccctcccagacaagcaaggcctctgatttctttgaagcatttacttagctcaagtctgaagctgtagatactggaagacaatgcaccttggagggtgggcaggacacagttgattgtctctacagagctgtgacgggggcactgagccccgcgggtgtctgtggagggggctccggtccaggtactgcactggacactgctcatccctgggtgtcaggcaggtggctgcaccctaggccaggcgcagaggcctggcaggcaggcttggcatggttggccggggcgggacgtacactgggtcgccgctagctgcaccttcgcacagatgcctccgagcagcgggtgggcgtgggccgcacagcgcggcagggccttggctaccacacgcggcatcgctccttggggtgcatgggggtgccccgggcacagtggaacgtgtctgcgaaggcggccaggttctgcagcgaccccagtaccctgtgggtgggtgggtgtgacagcaggagcattgccatcttggacaaacatggccattttaagttctccgtgattaaaaaccagcccaaaacatcagcctaatggctcatgtcagtatgagcagaaacatttcaaccatgagataaacccccatctgaccagaaacatgccaatcctgagaataacctcccctccagccagagatattccaactctgcaataaaactctccttcacacagaaacattcgcagcctgcggtaggctcccccttcctaaacccttaaatgcccttagtctgtaagagaatgtccctgaccgaaatcggccagaagcccctctcaggtttattcccaaaataaacctgtctctgttga

SEQ ID NO: 424695 - DNA, 2715 bp, Homo sapiens
agcgggggatccaggagcgaggagccgggagcggggaacagggagtcggggagccgggaaccggggctggcagcggccgccatgagcacggtggaccttgctcgcgtgggcgcgtgcatcctgaagcatgcggtgaccggggaggccgtggagctgcggagcctgtggcgggagcacgcgtgcgtggtggccgggctgcggcgcttcgggtgcgtggtgtgccgctggatcgcccaggacctcagcagccttgctgggctcctggaccaacacggcgtgcgcctggtgggcgtagggcccgaggccctgggtctgcaggagttcctggacggcgactacttcgcgggagagctctacctggatgagagcaagcagctttacaaggagctaggcttcaagcggtacaacagcctgagcatcctcccagcagctctggggaagcccgtgcgtgatgtggctgccaaggccaaggctgttggcatccaggggaacttgtctggggacctgctgcagagcggagggctgctggtggtcagcaaaggtggtgataaagtgctcctgcatttcgtccagaagtccccaggcgactacgtccccaaggagcacatcctgcaggtcctgggcatctctgcggaggtctgtgccagcgacccgcctcagtgtgacagagaggtgtgagggaggcgaaggccctggcctccgaggatctgggtggcgtctgctgccctaggtgtgctggaagtccacttggaagaactgttccggaggcgctgggtcgggatgccgaacctctcctgatccgccggcagcaacgagccattaaaactgcagttcctgaccacgcactgcttcgcaggctccgagccctgcatcctccacagcccccgccttgctcactgttgggccctcagggcgggcagggtggctgtgagtcccaggtgtcatcttcctgctctgcgactttctctggagaccttgggcctttggcctgtggggcactggggatggtaacctcactgccccgtcactcccttcaaaggcgacagacccaagcccacgtcaggagaggagcgtggggtcagctccagcagggtcggggtcagtgcctgtgtctggtgggggccactcaggagagttgggttttcagggcagagatgggcttgattccacctggtggggtgggtggaccctggagactctcaggtgatgggccagcctgccccaaggctctttactgatgtcagaatcattgtttgcacctgctgggtatggcctttggggcggccggcccgggagggtcttagtctaattaggtgtgtccagcttcttggccacctttccctggggaccctaacaggcccagagcagagccccttacctcccaggtcagactacctgctcaggccctcccctcccatgcaggccgatgacaactgcagccctctctgcactccctagtccagacctggggaccactgtgggttcctgtgggtctcccggctcccttcctgcccccaatgccacccttgcagtggccatttaaaaatgcatagcaggtgacccactgcgtccctttgcgttcagcccctcctctggctttcagttacaccaagctaaaatttcaggttcccagctgcagctctctgggtcccccggtgccccagtggggctccccgcatctgaatgtgtggtccctgggggtgggcacttgggggcatcctggtcactgctggccctagcattggaccctaggagacctgactggaactggctccctccccatcagctcccagctgtcactctctcccacccccgggcagctgttttgcccaagaccactgctacctgtttacccaccctggtccctcccagacaagcaaggcctctgatttctttgaagcatttacttagctcaagtctgaagctgtagatactggaagacaatgcaccttggagggtgggcaggacacagttgattgtctctacagagctgtgacgggggcactgagccccgcgggtgtctgtggagggggctccggtccaggtactgcactggacactgctcatccctgggtgtcaggcaggtggctgcaccctaggccaggcgcagaggcctggcaggcaggcttggcatggttggccggggcgggacgtacactgggtcgccgctagctgcaccttcgcacagatgcctccgagcagcgggtgggcgtgggccgcacagcgcggcagggccttggctaccacacgcggcatcgctccttggggtgcatgggggtgccccgggcacagtggaacgtgtctgcgaaggcggccaggttctgcagcgaccccagtaccctgtgggtgggtgggtgtgacagcaggagcattgccatcttggacaaacatggccattttaagttctccgtgattaaaaaccagcccaaaacatcagcctaatggctcatgtcagtatgagcagaaacatttcaaccatgagataaacccccatctgaccagaaacatgccaatcctgagaataacctcccctccagccagagatattccaactctgcaataaaactctccttcacacagaaacattcgcagcctgcggtaggctcccccttcctaaacccttaaatgcccttagtctgtaagagaatgtccctgaccgaaatcggccagaagcccctctcaggtttattcccaaaataaacctgtctctgttga

SEQ ID NO: 424696 - DNA, 2640 bp, Homo sapiens
ggcggggctgggggcaacggggcgcgcccatgacccagccgcccggcaggccgtggagctgcggagcctgtggcgggagcacgcgtgcgtggtggccgggctgcggcgcttcgggtgcgtggtgtgccgctggatcgcccaggacctcagcagccttgctgggctcctggaccaacacggcgtgcgcctggtgggcgtagggcccgaggccctgggtctgcaggagttcctggacggcgactacttcgcgggagagctctacctggatgagagcaagcagctttacaaggagctaggcttcaagcggtacaacagcctgagcatcctcccagcagctctggggaagcccgtgcgtgatgtggctgccaaggctgtacccactcctgacaggccaaggctgttggcatccaggggaacttgtctggggacctgctgcagagcggagggctgctggtggtcagcaaaggtggtgataaagtgctcctgcatttcgtccagaagtccccaggcgactacgtccccaaggagcacatcctgcaggtcctgggcatctctgcggaggtctgtgccagcgacccgcctcagtgtgacagagaggtgtgagggaggcgaaggccctggcctccgaggatctgggtggcgtctgctgccctaggtgtgctggaagtccacttggaagaactgttccggaggcgctgggtcgggatgccgaacctctcctgatccgccggcagcaacgagccattaaaactgcagttcctgaccacgcactgcttcgcaggctccgagccctgcatcctccacagcccccgccttgctcactgttgggccctcagggcgggcagggtggctgtgagtcccaggtgtcatcttcctgctctgcgactttctctggagaccttgggcctttggcctgtggggcactggggatggtaacctcactgccccgtcactcccttcaaaggcgacagacccaagcccacgtcaggagaggagcgtggggtcagctccagcagggtcggggtcagtgcctgtgtctggtgggggccactcaggagagttgggttttcagggcagagatgggcttgattccacctggtggggtgggtggaccctggagactctcaggtgatgggccagcctgccccaaggctctttactgatgtcagaatcattgtttgcacctgctgggtatggcctttggggcggccggcccgggagggtcttagtctaattaggtgtgtccagcttcttggccacctttccctggggaccctaacaggcccagagcagagccccttacctcccaggtcagactacctgctcaggccctcccctcccatgcaggccgatgacaactgcagccctctctgcactccctagtccagacctggggaccactgtgggttcctgtgggtctcccggctcccttcctgcccccaatgccacccttgcagtggccatttaaaaatgcatagcaggtgacccactgcgtccctttgcgttcagcccctcctctggctttcagttacaccaagctaaaatttcaggttcccagctgcagctctctgggtcccccggtgccccagtggggctccccgcatctgaatgtgtggtccctgggggtgggcacttgggggcatcctggtcactgctggccctagcattggaccctaggagacctgactggaactggctccctccccatcagctcccagctgtcactctctcccacccccgggcagctgttttgcccaagaccactgctacctgtttacccaccctggtccctcccagacaagcaaggcctctgatttctttgaagcatttacttagctcaagtctgaagctgtagatactggaagacaatgcaccttggagggtgggcaggacacagttgattgtctctacagagctgtgacgggggcactgagccccgcgggtgtctgtggagggggctccggtccaggtactgcactggacactgctcatccctgggtgtcaggcaggtggctgcaccctaggccaggcgcagaggcctggcaggcaggcttggcatggttggccggggcgggacgtacactgggtcgccgctagctgcaccttcgcacagatgcctccgagcagcgggtgggcgtgggccgcacagcgcggcagggccttggctaccacacgcggcatcgctccttggggtgcatgggggtgccccgggcacagtggaacgtgtctgcgaaggcggccaggttctgcagcgaccccagtaccctgtgggtgggtgggtgtgacagcaggagcattgccatcttggacaaacatggccattttaagttctccgtgattaaaaaccagcccaaaacatcagcctaatggctcatgtcagtatgagcagaaacatttcaaccatgagataaacccccatctgaccagaaacatgccaatcctgagaataacctcccctccagccagagatattccaactctgcaataaaactctccttcacacagaaacattcgcagcctgcggtaggctcccccttcctaaacccttaaatgcccttagtctgtaagagaatgtccctgaccgaaatcggccagaagcccctctcaggtttattcccaaaataaacctgtctctgttga

SEQ ID NO: 424697 - DNA, 1367 bp, Homo sapiens
cgggacagcaactgtcccgcaaggcccggattgaggaggcgggagggaccgaagcaggcggacccaggatttggcgccgcgatctcgaggcttggcctggagccgtggagctgcggagcctgtggcgggagcacgcgtgcgtggtggccgggctgcggcgcttcgggtgcgtggtgtgccgctggatcgcccaggacctcagcagccttgctgggctcctggaccaacacggcgtgcgcctggtgggcgtagggcccgaggccctgggtctgcaggagttcctggacggcgactacttcgcgggagagctctacctggatgagagcaagcagctttacaaggagctaggcttcaagcggtacaacagcctgagcatcctcccagcagctctggggaagcccgtgcgtgatgtggctgccaaggccaaggctgttggcatccaggggaacttgtctggggacctgctgcagagcggagggctgctggtggtcagcaaagaagtccccaggcgactacgtccccaaggagcacatcctgcaggtcctgggcatctctgcggaggtctgtgccagcgacccgcctcagtgtgacagagaggtgtgagggaggcgaaggccctggcctccgaggatctgggtggcgtctgctgccctaggtgtgctggaagtccacttggaagaactgttccggaggcgctgggtcgggatgccgaacctctcctgatccgccggcagcaacgagccattaaaactgcagttcctgaccacgcactgcttcgcaggctccgagccctgcatcctccacagcccccgccttgctcactgttgggccctcagggcgggcagggtggctgtgagtcccaggtgtcatcttcctgctctgcgactttctctggagaccttgggcctttggcctgtggggcactggggatggtaacctcactgccccgtcactcccttcaaaggcgacagacccaagcccacgtcaggagaggagcgtggggtcagctccagcagggtcggggtcagtgcctgtgtctggtgggggccactcaggagagttgggtccaagcacgagatgggctagacttgccaacatgagaggcggctgggcgggaccggaagaactagtcagggtgagcgggcaagacatgcccgaggatcgagaatgatgatcacgaatcccagaacgcaacagcggcgggaatcgccagagggacgacaggcccagacggcctaaacccactcggtgtgaccagcacggcgcagcaggccggagagccacaagccacccaagcaccgcgcgcacaccccacaccaccaaccgacacacacagacacacacccagccaacgagccgagaaggga

SEQ ID NO: 424698 - DNA, 353 bp, Homo sapiens
ccccaggggtctgcagtagtcccttcattagactctcttcattcaaaccctcggaggcagattcagtttccagccaagaccccagtgtaaccagtttttaaaataaagataaaggtgtccctttcctggctaagaatgatgagcaaacacaaaagacctatacctatgaaaaatatgcatgagtaaaacaaacttccactagccttctcttttagcaaacttagtgtatttaatgtcaaacttaatggcaaaaaatgcaaattacagctaatattcctcttttctaacttctactcctggtttgaaatgagggggaaaaaatcatacccactcacactcaccatcaaaaaaaa

SEQ ID NO: 424699 - DNA, 1220 bp, Homo sapiens
  misc_feature (149)..(149): n is a, c, g, or t
aatttttcatatttcaaaacgtttaaataagtaacgggactttttagtttaatatcaaaaatgagggaggaccaaaggaaaaaaaaagccccataaattaagaaaagctgggccaaaaaaaaaaaaaaggccctttagtaatttactantaaataacttttgcttcaaagaaatcaaaattgattaaaaaatattaaggccgggcgcggtggcgcgtgcctgtagtcccaagtagctgggattacaggctcctgccaccatgcccagctaatttttttttttttttttttttttgtatttttagtagagacggagttttaccttgttggccaggctagtctcgaactcgtgacctcaggtgatccgtctgcctcagcatcccaaagtgctgggattacaggcgttagccaccatgcagcccctttcaagccttttaacatcatgtcaccttcacaatgagcagttgctcccattacccagtgaactcaccttctgatgggacagttaccctagttggggcttctcagccttgagagatgtgcagagcagggacctgtccagggcagagcagccagacagcgtggaaataatccaaacagagaaagcattcaagaacttggcctctggttgacttaacacactacttcaagtatatggcaggtctgtataataaactcctgcctgtctagtcttcagcctcatagaaagcaagaaagcaggtggcgtatgttgcagaacaattcttgggtagaacaaggggacatttgatggtttgggtttttcagtaagaaagatgaagtcctggagtatagggtagagtggtacagtggaaaatatttcagcttgggggttagaaaataaacatgccgattcttgctttgccataaatgatgtcacctaacttgtgtgaccctgttttctcatccctaaaatgatttgataagtttaagattaggctatttttaaatgtatggaagaaattgggtgttacccttcttgaaagacattttccctgcaagtatggcaggctgtatctttcagtgtaacaaagttctattaaaggtcataactgctgccctgtaacttttgccttattctagaaacttctactccttgaatgacatgtgttggtacatgtttcttctctttcagatagaatggttaattttgacttgttgcttctgcacacgtgtcctggaaataaaagtttcttcccacta

SEQ ID NO: 424700 - DNA, 1586 bp, Homo sapiens
  misc_feature (149)..(149): n is a, c, g, or t
aatttttcatatttcaaaacgtttaaataagtaacgggactttttagtttaatatcaaaaatgagggaggaccaaaggaaaaaaaaagccccataaattaagaaaagctgggccaaaaaaaaaaaaaaggccctttagtaatttactantaaataacttttgcttcaaagaaatcaaaattgattaaaaaatattaaggccgggcgcggtggcgcgtgcctgtagtcccaagtagctgggattacaggctcctgccaccatgcccagctaatttttttttttttttttttttttgtatttttagtagagacggagttttaccttgttggccaggctagtctcgaactcgtgacctcaggtgatccgtctgcctcagcatcccaaagtgctgggattacaggcgttagccaccatgcagcccctttcaagccttttaacatcatgtcaccttcacaatgagcagttgctcccattacccagtgaactcaccttctgatgggacagttaccctagttggggcttctcagccttgagagatgtgcagagcagggacctgtccagggcagagcagccagacagcgtggaaataatccaaacagagaaagcattcaagaacttggcctctggttgacttaacacactacttcaagtatatggcaggtctgtataataaactcctgcctgtctagtcttcagcctcatagaaagcaagaaagcaggtggcgtatgttgcagaacaattcttgggtagaacaaggggacatttgatggtttgggtttttcagtaagaaagatgaagtcctggagtatagggtagagtggtacagtggaaaatatttcagcttgggggttagaaaataaacatgccgattcttgctttgccataaatgatgtcacctaacttgtgtgaccctgttttctcatccctaaaatgatttgataagtttaagattaggctatttttaaatgtatggaagaaattgggtgttacccttcttgaaagacattttccctgcaagtatggcaggctgtatctttcagtgtaacaaagttctattaaaggtcataactgctgccctgtaacttttgccttattctagaaacttctactccttgaatgacatgtgttggtacatgtttcttctctttcagatagaatggttaattttgacttgttgcttctgcacacgtgtcctggaaataaaagtttcttcccactacttattgctgatttatttcataggaagtcttaaggaaagaggcaaaaaacgggctcatgggtcacttgaagttggaaaattctgtggagattgacaaaggagactcacttttgagcatctgttctcagtgtaaccttcaaatctgtggaaacataactaggcacattttatgattatttagaatgttaataaattgctctgagtttcctcaagtccattttgtaagatcagaccataggtgggtgttgtttcttttaagtgtgtgtactgtgtccaatgttacatttttagaagtgttcatgctttttgtaaagtgattcgttttaagcacattaaaggtcgtttgagtattgtcatgtattttaa

SEQ ID NO: 424701 - DNA, 1070 bp, Homo sapiens
gtttttcaggtaagaaagatgaagtcctggaggtatacggtagagtggtacagggtggaaaatatttcagcttgggggttagaaaataaacatgccgattcttgctttgccataaatgatgtcacctaacttgtgtgaccctgttttctcatccctaaaatgatttgataagtttaagattaggctagtctcgaactcgtgacctcaggtgatccgtctgcctcagcatcccaaagtgctgggattacaggcgttagccaccatgcagcccctttcaagccttttaacatcatgtcaccttcacaatgagcagttgctcccattacccagtgaactcaccttctgatgggacagttaccctagttggggcttctcagccttgagagatgtgcagagcagggacctgtccagggcagagcagccagacagcgtggaaataatccaaacagagaaagcattcaagaacttggcctctggttgacttaacacactacttcaagtatatggcaggtctgtataataaactcctgcctgtctagtcttcagcctcatagaaagcaagaaagcaggtggcgtatgttgcagaacaattcttgggtagaacaaggggacatttgatggtttgggtttttcagtaagaaagatgaagtcctggagtatagggtagagtggtacagtggaaaatatttcagcttgggggttagaaaataaacatgccgattcttgctttgccataaatgatgtcacctaacttgtgtgaccctgttttctcatccctaaaatgatttgataagtttaagattaggctatttttaaatgtatggaagaaattgggtgttacccttcttgaaagacattttccctgcaagtatggcaggctgtatctttcagtgtaacaaagttctattaaaggtcataactgctgccctgtaacttttgccttattctagaaacttctactccttgaatgacatgtgttggtacatgtttcttctctttcagatagaatggttaattttgacttgttgcttctgcacacgtgtcctggaaataaaagtttcttcccacta

SEQ ID NO: 424702 - DNA, 645 bp, Homo sapiens
  misc_feature (149)..(149): n is a, c, g, or t
  misc_feature (613)..(613): n is a, c, g, or t
aatttttcatatttcaaaacgtttaaataagtaacgggactttttagtttaatatcaaaaatgagggaggaccaaaggaaaaaaaaagccccataaattaagaaaagctgggccaaaaaaaaaaaaaaggccctttagtaatttactantaaataacttttgcttcaaagaaatcaaaattgattaaaaaatattaaggccgggcgcggtggcgcgtgcctgtagtcccaagtagctgggattacaggctcctgccaccatgcccagctaatttttttttttttttttttttttgtatttttagtagagacggagttttaccttgttggccaggctagtctcgaactcgtgacctcaggtgatccgtctgcctcagcatcccaaagtgctgggattacaggcgttagccaccatgcagcccctttcaagccttttaacatcatgtcaccttcacaatgagcagttgctcccattacccagtgaactcaccttctgatgggacagttaccctagttggggcttctcagccttgagagatgtgcagagcagggacctgtccagggcagagcagccagacagcgtggccaacaaggtaaaactccgtctcaactanaaatacaaaaaaaatacaaaacacaatttact

SEQ ID NO: 424703 - DNA, 11925 bp, Homo sapiens
  misc_feature (280)..(280): n is a, c, g, or t
  misc_feature (496)..(496): n is a, c, g, or t
  misc_feature (793)..(793): n is a, c, g, or t
  misc_feature (887)..(887): n is a, c, g, or t
  misc_feature (1012)..(1012): n is a, c, g, or t
  misc_feature (1096)..(1096): n is a, c, g, or t
  misc_feature (2408)..(2408): n is a, c, g, or t
  misc_feature (2497)..(2497): n is a, c, g, or t
  misc_feature (2944)..(2944): n is a, c, g, or t
  misc_feature (2973)..(2973): n is a, c, g, or t
  misc_feature (3003)..(3003): n is a, c, g, or t
  misc_feature (9497)..(9497): n is a, c, g, or t
ccgcgcgtccctgtgcgtccccgggtccctgcgggcgggcgggcgcggtcgccgccgagcaacccggcctgcgcccggcacgactgtagatgtcaggctttgcccggggagccgagcggcagcggggctgtgagtttcaaattaaccttccgctttgttgctgtgtaatgtggatccccgaaggccccccgccccgcccgccccccttccccgggcggtgcgcgctgcaaactgcgagttgggcttcatttacataaagcgattccgggcgggcggcggnagaggaggaggcggcggcggcgggcaggccggggacccggacgccagcgccgcgccccgtgggtgaatccccgccgcgtcccggggacctccctccggggacgggccgaccgccagccctgccgccaccatgagctcccctcccctgtctccgggccccctgctcctgaccagagccacctccgagtcctggggccagcgggaggtggggagcatnccgcctggggtgggtgagctcggggctcgggtgccactggaatttcccgttgttgcgcatggcggcgcggcccccggacctgcaagtgccgcctccctccggaggtgcgcggaggcttggtgtgccaggtccgagcctccgtactgggtgcaatgaaagctccacgcaggccttaccatggaaggctgtgactcgcccgtcgtctcggggaaggacaatgggtgcggtatccctcagcaccagcaatggactgaactcaacagcacccacctccctgacaaacccagtagcatggancagtccacaggcgagagccacgggcccttggacagcctgagggcccccttcaatgagcgcctcgcggagagcaccgcgtcggccgggccccccnccgagcccgccagcaaggaggtcacctgcaacgaatgttcggcctcctttgccagcctccagacctacatggagcaccactgccccagcgcgcgccccccgccacccctgagagaggagagcgcnagcgacaccggtgaggagggggacgaggagagtgacgtggagaacctggccggggagatcgtctaccagccggacggctccgcntacattgtggagagcctgagccagctgacccagggcgggggcgcctgtgggagtggcagtggcagtgggcctctcccctcgcttttcctgaactctctccctggcgcggggggcaagcaaggggacccttcgtgtgctgcacccgtgtacccgcagatcatcaacactttccacatagcctcatccttcgggaaatggtttgagggcccagaccaggctttcccgaatacctcagccctggcggggctcagccccgtcctgcacagcttccgcgtgtttgacgtgcgacacaaaagcaacaaggattacctgaacagcgacggttctgccaaaagctcctgcgtatccaaagatgttcccaacaatgtggacctgtccaaattcgatggctttgtgctctatggcaagaggaagcccatcctgatgtgtttcttgtgcaaactctcctttgggtacgtccgttcgtttgtgacccacgcggtgcatgaccatcgaatgaccctgagcgaagacgagcggaaaattcttagcaataagaacatctccgctatcatccaagggatcggcaaagacaaggaaccccttgtaagttttctggaaccaaaaaacaaaaactttcaacaccctttagtttccacagctaacctcataggccccggacacagtttttatggtaaatttagtggcattcgaatggaaggggaggaagctctcccagcgggctccgccgctggccccgagcagccccaggctggtctcttgacccccagcaccctgttgaaccttggcgggctcaccagctcggtactgaagacccccattacctcagtccccctggggcctctggcttccagtcctaccaaatcctcagagggcaaggactctggggcggcagaaggagagaagcaggaagtgggcgacggggattgcttctctgagaaggtagagccagccgaagaggaggcggaggaggaagaggaggaggaagaggcggaggaggaggaggaagaagaggaggaggaagaagaggaggaggaagacgagggttgcaaaggactctttccaagcgagttggatgaggaactggaggacaggccccatgaggagcctggggccgcagcaggtagtagcagcaaaaaggaccttgctctctcaaaccaaagcatttctaactcccccttaatgcctaacgtgctccagaccctgtcgaggggcacagcttctactagttctaattctgcttcttcctttgttgtctttgatggtgcgaacaggaggaatcgtttaagctttaacagtgagggcgtcaggnccaatgtggcagagggcggcaggaggctggacttcgctgacgaaagtgccaataaagacaatgccacagcaccagaaccaaatgaaagnacagagggtgacgatgggggcttcgttccccatcaccagcacgctggctccctctgcgagcttggggttggggagtgcccctcggggagtggcgtggagtgccccaaatgcgacacggtcctgggctcctcccgctcgctgggcggccacatgaccatgatgcattctcgtaactcgtgtaagacactcaagtgccccaagtgcaactggcactataagtaccagcagaccctggaggcacacatgaaggagaagcacccggagccggggggctcctgtgtctactgcaaaagcgggcagccccacccccggctggcacgaggcgagagctacacgtgtggttacaagcctttccgctgcgaggtgtgtaactactccacaactaccaaaggcaacctcagtattcatatgcagtctgacaagcatctcaacaacatgcagaacctncagaatggagggggggagcaggtcttcanccacactgccggggcggcggcggcggcggnggctgcggcggcggcggcagccaatatcagtagctcctgcggggccccctcgcccaccaaaccaaaaaccaaacccacctggcggtgcgaggtgtgtgattatgagaccaacgtggccaggaacctccgcattcacatgaccagtgagaagcacatgcataacatgatgttactgcaacagaacatgacccagatccaacacaaccgccaccgtgggcctcggcagcctgccctcacccgccgaggccgagctctaccaatactacctggcccagaacatgaacctgcccaacctgaagatggacagtgctgcctcggacgcccagttcatgatgagcggattccagctggatcccgccgggcccatggccgccatgacgcctgctctagtgggcggtgagatccccctagacatgcggctcgggggcgggcagctggtgtcagaggagctgatgaacctgggcgagagcttcatccagaccaacgacccgtcgctgaagctcttccagtgcgccgtctgcaacaagttcacgacggacaacctggacatgctgggcctgcacatgaacgtggagcgcagcctgtcggaggacgagtggaaggcggtgatgggggactcataccagtgcaagctctgccgctacaacacccagctcaaggccaacttccagctgcactgcaagacagacaagcacgtgcagaagtaccagctggtggcccacatcaaggagggcggcaaggccaacgagtggaggctcaagtgtgtggccatcggcaaccccgtgcacctcaagtgcaacgcctgtgactactacaccaacagcctggagaagctgcggctgcacacggtcaactccaggcacgaggccagcctgaagttgtacaagcacctgcagcagcatgagagtggtgtagaaggtgagagctgctactaccactgcgttctgtgcaactactccaccaaggccaagctcaacctcatccagcatgtgcgctccatgaagcaccagcgaagcgagagcctgcgaaagctgcagcggctgcagaagggccttccagaggaggacgaggacctggggcagatcttcaccatccgcaggtgcccctccacggacccagaagaagccattgaagatgttgaaggacccagtgaaacagctgctgatccagaggagcttgctaaggaccaagagggcggagcatcgtccagccaagcagagaaggagctgacagattctcctgcaacctccaaacgcatctccttcccaggtagctcagagtctcccctctcttcgaagcgaccaaaaacagctgaggagatcaaaccggagcagatgtaccagtgtccctactgcaagtacagtaatgccgatgtcaaccggctccgggtgcatgccatgacgcagcactcggtgcaacccatgcttcgctgccccctgtgccaggacatgctcaacaacaagatccacctccagctgcacctcacccacctccacagcgtggcacctgactgcgtggagaagctcattatgacggtgaccacccctgagatggtgatgccaagcagcatgttcctcccagcagctgttccagatcgagatgggaattccaatttggaagaggcaggaaagcagcctgaaacctcagaggatctgggaaagaacatcttgccatccgcaagcacagagcaaagcggagatttgaaaccatcccctgctgacccaggctctgtgagagaagactcaggcttcatctgctggaagaaggggtgcaaccaggttttcaaaacttctgctgcccttcagacgcattttaatgaagtgcatgccaagaggcctcagctgccggtgtcagatcgccatgtgtacaagtaccgctgtaatcagtgtagcctggccttcaagaccattgaaaagttgcagctccattctcagtaccatgtgatcagagctgccaccatgtgctgtctttgtcagcgcagtttccgaactttccaggctctgaagaagcaccttgagacaagccacctggagctgagtgaggctgacatccaacagctttatggtggcctgctggccaatggggacctcctggcaatgggagaccccactctggctgaggaccataccataattgttgaggaagacaaggaggaagagagtgacttggaagataaacagagcccaacgggcagtgactctgggtcagtacaagaagactcgggctcagagccaaagagagctctgcctttcagaaaaggtcccaattttactatggaaaagttcctagacccttctcgcccttacaagtgtaccgtctgcaaggaatctttcactcaaaagaatatcctgctagtacactacaattctgtctcccacctgcataagttaaagagagcccttcaagaatcagcaaccggtcagccagaacccaccagcagcccagacaacaaaccttttaagtgtaacacttgtaatgtggcctacagccagagttccactctggagatccatatgaggtctgtgttacatcaaaccaaggcccgggcagccaagctggaggctgcaagtggcagcagcaatgggactgggaacagcagcagtatttccttgagctcctccacgccaagtcctgtgagcaccagtggcagtaacacctttaccacctccaatccaagcagtgctggcattgctccaagctctaacttactaagccaagtgcccactgagagtgtagggatgccacccctggggaatcctattggtgccaacattgcttccccttcagagcccaaagaggccaatcggaagaaactggcagatatgattgcatccaggcagcagcaacaacagcagcagcaacagcaacaacaacaacaacaacaacaacaacaagcacaaacgctggcccaggcccaggctcaagttcaagctcacctgcagcaggagctgcagcaacaggctgccctgatccagtctcagctgtttaaccccaccctccttcctcacttccccatgacaactgagaccctgctgcaactacagcagcagcagcacctcctcttccctttctacatccccagtgctgagttccagcttaaccccgaggtgagcttgccagtgaccagtggggcactgacactgactgggacaggcccaggcctgctggaagatctgaaggctcaggttcaggtcccacagcagagccatcagcagatcttgccgcagcagcagcagaaccaactctctatagcccagagtcactctgccctccttcagccaagccagcaccccgaaaagaagaacaaattggtcatcaaagaaaaggaaaaagaaagccagagagagagggacagcgccgaggggggagagggcaacaccggtccgaaggaaacactgccagatgccttgaaggccaaagagaagaaagagttggcaccagggggtggttctgagccttccatgctccctccacgcattgcttcagatgccagagggaacgccaccaaggccctgctggagaactttggctttgagttggtcatccagtataatgagaacaagcagaaggtgcagaaaaagaatgggaagactgaccagggagagaacctggaaaagctcgagtgtgactcctgcggcaagttgttttccaacatcttgattttaaagagtcatcaagagcacgttcatcagaattactttcctttcaaacagctcgagaggtttgccaaacagtacagagaccactacgataaactgtacccactgaggccccagaccccagagccaccaccacctccccctccaccccctccacccccacttccggcagcgccgcctcagccggcgtccacaccagccatccccgcatcagccccacccatcacctcacctacaattgcaccggcccagccatcagtgccgctcacccagctctccatgccgatggagctgcccatcttctcgccgctgatgatgcagacgatgccgctgcagaccttgccggctcagctacccccgcagctgggacctgtggagcctctgcctgcggacctggcccaactctaccagcatcagctcaatccaaccctgctccagcagcagaacaagaggcctcgcaccaggatcacagatgatcagctccgagtcttgcggcaatattttgacattaacaactcccccagtgaagagcaaataaaagagatggcagacaagtccgggttgccccagaaagtgatcaagcactggttcaggaacactctcttcaaagagaggcagcgtaacaaggactccccttacaacttcagtaatcctcctatcaccagcctggaggagctcaagattgactcccggcccccttcgccggaacctccaaagcaggagtactggggaagcaagaggtcttcaagaacaaggtttacggactaccagctgagggtcttacaggacttcttcgatgccaatgcttacccaaaggatgatgaatttgagcaactctctaatttactgaaccttccaacccgagtgatagtggtgtggtttcagaatgcccgacagaaggccaggaagaattatgagaatcagggagagggcaaagatggagagcggcgtgagcttacaaatgatagatacattcgaacaagcaacttgaactaccagtgcaaaaaatgtagcctggtgtttcagcgcatctttgatctcatcaagcaccagaagaagctgtgttacaaggatgaggatgaggaggggcaggacgacagccaaaatgaggattccatggatgccatggaaatcctgacgcctaccagctcatcctgcagtaccccgatgccctcacaggcttacagcgccccagcaccatcagccaataatacagcttcctccgctttcttgcagcttacagcggaggctgaggaactggccaccttcaattcaaaaacagaggcaggcgatgagaaaccaaagctggcggaagctcccagtgcacagccaaaccaaacccaagaaaagcaaggacaaccaaagccagagctgcagcagcaagagcagcccgagcagaagaccaacactccccagcagaagctcccccagctggtgtccctgccttcgttgccacagcctcctccacaagcgccccctccacagtgccccttaccccagtcgagccccagtccttcccagctctcccacctgcccctcaagcccctccacacatcaactcctcaacagctcgcaaacctacctcctcagctaatcccctaccagtgtgaccagtgtaagttggcatttccgtcatttgagcactggcaggagcatcagcagctccacttcctgagcgcgcagaaccagttcatccacccccagtttttggacaggtccctggatatgcctttcatgctctttgatcccagtaacccactcctggccagccagctgctctctggggccatacctcagattccagcaagctcagccacttctccttcaactccaacctccacaatgaacactctcaagaggaagctggaggaaaaggccagtgcaagccctggcgaaaacgacagtgggacaggaggagaagagcctcagagagacaagcgtttgagaacaaccatcacaccggaacaactagaaattctctaccagaagtatctactggattccaatccgactcgaaagatgttggatcacattgcacacgaggtgggcttgaagaaacgtgtggtacaagtctggtttcagaacacccgagctcgggaaaggaaaggacagttccgggctgtaggcccagcgcaggcccacaggagatgccctttttgcagagcgctcttcaaagccaagactgctcttgaggctcatatccggtcccgtcactggcatgaagccaagagagctggctacaacctaactctgtctgcgatgctcttagactgtgatgggggactccagatgaaaggagatatttttgacggaactagcttttcccacctacccccaagcagtagtgatggtcagggtgtccccctctcacctgtgagtaaaaccatggaattgtcacccagaactcttctaagcccttcctccattaaggtggaagggattgaagactttgaaagcccctccatgtcctcagttaatctaaactttgaccaaactaagctggacaacgatgactgttcctctgtcaacacagcaatcacagataccacaactggagacgagggcaacgcagataacgacagtgcaacgggaatagcaactgaaaccaaatcctcttctgcacccaacgaagggttgaccaaagcggccatgatggcaatgtctgagtatgaagatcggttgtcatctggtctggtcagcccggccccgagcttttatagcaaggaatatgacaatgaaggtacagtggactacagtgaaacctcaagccttgcagatccctgctccccgagtcctggtgcgagtggatctgcaggcaaatctggtgacagcggngatcggcctgggcagaaacgttttcgcactcaaatgaccaatctgcagctgaaggtcctcaagtcatgctttaatgactacaggacacccactatgctagaatgtgaggtcctgggcaatgacattggactgccaaagagagtcgttcaggtctggttccagaatgcccgggcaaaagaaaagaagtccaagttaagcatggccaagcattttggtataaaccaaacgagttatgagggacccaaaacagagtgcactttgtgtggcatcaagtacagcgctcggctgtctgtacgtgaccatatcttttcccaacagcatatctccaaagttaaagacaccattggaagccagctggacaaggagaaagaatactttgacccagccaccgtacgtcagttgatggctcaacaagagttggaccggattaaaaaggccaacgaggtccttggactggcagctcagcagcaagggatgtttgacaacacccctcttcaggcccttaaccttcctacagcatatccagcgctccagggcattcctcctgtgttgctcccgggcctcaacagcccctccttgccaggctttactccatccaacacagctttaacgtctcctaagccgaacttgatgggtctgcccagcacaactgttccttcccctggcctccccacttctggattaccaaataaaccgtcctcagcgtcgctgagctccccaaccccagcacaagccacgatggcgatgggccctcagcaacccccccagcagcagcagcagcagcagcaaccacaggtgcagcagcctcccccgccgccagcagcccagccgccacccacaccacagctcccactgcaacagcagcagcaacgcaaggacaaagacagtgagaaagtaaaggagaaggaaaaggcacacaaagggaaaggggaacccctgcctgtccccaagaaggagaaaggagaggcccccacggcaactgcagccacgatctcagccccgctgcccaccatggagtatgcggtagaccctgcacagctgcaggccctgcaggccgcgttgacttcggaccccacagcattgctcacaagccagttccttccttactttgtaccaggcttttctccttattatgctccccagatccctggcgccctgcagagcgggtacctgcagcctatgtatggcatggaaggcctgttcccctacagccctgcactgtcgcaggccctgatggggctgtccccaggctccctactgcagcagtaccagcaataccagcagagtctgcaggaggcaattcagcagcagcagcagcggcaactacagcagcagcagcagcaaaaagtgcagcagcagcagcccaaagcaagccaaaccccagtcccccccggggctccttccccagacaaagaccctgccaaagaatcccccaaaccagaagaacagaaaaacaccccccgtgaggtgtcccccctcctgccgaaactccctgaagagccagaagcagaaagcaaaagtgcggactccctctacgaccccttcattgttccaaaggtgcagtacaagttggtctgccgcaagtgccaggcgggcttcagcgacgaggaggcagcgaggagccacctgaagtccctctgcttcttcggccagtctgtggtgaacctgcaagagatggtgcttcacgtccccaccggcggcggcggcggtggcagtggcggcggcggcggcggtggcggcggcggcggcggcggcggctcgtaccactgcctggcgtgcgagagcgcgctctgtggggaggaagctctgagtcaacatctcgagtcggccttgcacaaacacagaacaatcacgagagcagcaagaaacgccaaagagcaccctagtttattacctcactctgcctgcttccccgatcctagcaccgcatctacctcgcagtctgccgctcactcaaacgacagcccccctcccccgtcggccgccgccccctcctccgcttccccccacgcctccaggaagtcttggccgcaagtggtctcccgggcttcggcagcgaagcccccttcttttcctcctctctcctcatcttcaacggttacctcaagttcatgcagcacctcaggggttcagccctcgatgccaacagacgactattcggaggagtctgacacggatctcagccaaaagtccgacggaccggcgagcccggtggagggtcccaaagaccccagctgccccaaggacagtggtctgaccagtgtaggaacggacaccttcagattgtaagctttgaagatgaacaatacaaacaaatgaatttaaatacaaaaattaataacaaaccaatttcaaaaatagactaactgcaattccaaagcttctaaccaaaaaacaaaaaaaaaaaaaaaaagaaaaaaaagaaaaa

SEQ ID NO: 424704 - DNA, 11887 bp, Homo sapiens
  misc_feature (280)..(280): n is a, c, g, or t
  misc_feature (496)..(496): n is a, c, g, or t
  misc_feature (793)..(793): n is a, c, g, or t
  misc_feature (887)..(887): n is a, c, g, or t
  misc_feature (1012)..(1012): n is a, c, g, or t
  misc_feature (1096)..(1096): n is a, c, g, or t
  misc_feature (2408)..(2408): n is a, c, g, or t
  misc_feature (2497)..(2497): n is a, c, g, or t
  misc_feature (2944)..(2944): n is a, c, g, or t
  misc_feature (2973)..(2973): n is a, c, g, or t
  misc_feature (3003)..(3003): n is a, c, g, or t
  misc_feature (9497)..(9497): n is a, c, g, or t
ccgcgcgtccctgtgcgtccccgggtccctgcgggcgggcgggcgcggtcgccgccgagcaacccggcctgcgcccggcacgactgtagatgtcaggctttgcccggggagccgagcggcagcggggctgtgagtttcaaattaaccttccgctttgttgctgtgtaatgtggatccccgaaggccccccgccccgcccgccccccttccccgggcggtgcgcgctgcaaactgcgagttgggcttcatttacataaagcgattccgggcgggcggcggnagaggaggaggcggcggcggcgggcaggccggggacccggacgccagcgccgcgccccgtgggtgaatccccgccgcgtcccggggacctccctccggggacgggccgaccgccagccctgccgccaccatgagctcccctcccctgtctccgggccccctgctcctgaccagagccacctccgagtcctggggccagcgggaggtggggagcatnccgcctggggtgggtgagctcggggctcgggtgccactggaatttcccgttgttgcgcatggcggcgcggcccccggacctgcaagtgccgcctccctccggaggtgcgcggaggcttggtgtgccaggtccgagcctccgtactgggtgcaatgaaagctccacgcaggccttaccatggaaggctgtgactcgcccgtcgtctcggggaaggacaatgggtgcggtatccctcagcaccagcaatggactgaactcaacagcacccacctccctgacaaacccagtagcatggancagtccacaggcgagagccacgggcccttggacagcctgagggcccccttcaatgagcgcctcgcggagagcaccgcgtcggccgggccccccnccgagcccgccagcaaggaggtcacctgcaacgaatgttcggcctcctttgccagcctccagacctacatggagcaccactgccccagcgcgcgccccccgccacccctgagagaggagagcgcnagcgacaccggtgaggagggggacgaggagagtgacgtggagaacctggccggggagatcgtctaccagccggacggctccgcntacattgtggagagcctgagccagctgacccagggcgggggcgcctgtgggagtggcagtggcagtgggcctctcccctcgcttttcctgaactctctccctggcgcggggggcaagcaaggggacccttcgtgtgctgcacccgtgtacccgcagatcatcaacactttccacatagcctcatccttcgggaaatggtttgagggcccagaccaggctttcccgaatacctcagccctggcggggctcagccccgtcctgcacagcttccgcgtgtttgacgtgcgacacaaaagcaacaaggattacctgaacagcgacggttctgccaaaagctcctgcgtatccaaagatgttcccaacaatgtggacctgtccaaattcgatggctttgtgctctatggcaagaggaagcccatcctgatgtgtttcttgtgcaaactctcctttgggtacgtccgttcgtttgtgacccacgcggtgcatgaccatcgaatgaccctgagcgaagacgagcggaaaattcttagcaataagaacatctccgctatcatccaagggatcggcaaagacaaggaaccccttgtaagttttctggaaccaaaaaacaaaaactttcaacaccctttagtttccacagctaacctcataggccccggacacagtttttatggtaaatttagtggcattcgaatggaaggggaggaagctctcccagcgggctccgccgctggccccgagcagccccaggctggtctcttgacccccagcaccctgttgaaccttggcgggctcaccagctcggtactgaagacccccattacctcagtccccctggggcctctggcttccagtcctaccaaatcctcagagggcaaggactctggggcggcagaaggagagaagcaggaagtgggcgacggggattgcttctctgagaaggtagagccagccgaagaggaggcggaggaggaagaggaggaggaagaggcggaggaggaggaggaagaagaggaggaggaagaagaggaggaggaagacgagggttgcaaaggactctttccaagcgagttggatgaggaactggaggacaggccccatgaggagcctggggccgcagcaggtagtagcagcaaaaaggaccttgctctctcaaaccaaagcatttctaactcccccttaatgcctaacgtgctccagaccctgtcgaggggcacagcttctactagttctaattctgcttcttcctttgttgtctttgatggtgcgaacaggaggaatcgtttaagctttaacagtgagggcgtcaggnccaatgtggcagagggcggcaggaggctggacttcgctgacgaaagtgccaataaagacaatgccacagcaccagaaccaaatgaaagnacagagggtgacgatgggggcttcgttccccatcaccagcacgctggctccctctgcgagcttggggttggggagtgcccctcggggagtggcgtggagtgccccaaatgcgacacggtcctgggctcctcccgctcgctgggcggccacatgaccatgatgcattctcgtaactcgtgtaagacactcaagtgccccaagtgcaactggcactataagtaccagcagaccctggaggcacacatgaaggagaagcacccggagccggggggctcctgtgtctactgcaaaagcgggcagccccacccccggctggcacgaggcgagagctacacgtgtggttacaagcctttccgctgcgaggtgtgtaactactccacaactaccaaaggcaacctcagtattcatatgcagtctgacaagcatctcaacaacatgcagaacctncagaatggagggggggagcaggtcttcanccacactgccggggcggcggcggcggcggnggctgcggcggcggcggcagccaatatcagtagctcctgcggggccccctcgcccaccaaaccaaaaaccaaacccacctggcggtgcgaggtgtgtgattatgagaccaacgtggccaggaacctccgcattcacatgaccagtgagaagcacatgcataacatgatgttactgcaacagaacatgacccagatccaacacaaccgccaccgtgggcctcggcagcctgccctcacccgccgaggccgagctctaccaatactacctggcccagaacatgaacctgcccaacctgaagatggacagtgctgcctcggacgcccagttcatgatgagcggattccagctggatcccgccgggcccatggccgccatgacgcctgctctagtgggcggtgagatccccctagacatgcggctcgggggcgggcagctggtgtcagaggagctgatgaacctgggcgagagcttcatccagaccaacgacccgtcgctgaagctcttccagtgcgccgtctgcaacaagttcacgacggacaacctggacatgctgggcctgcacatgaacgtggagcgcagcctgtcggaggacgagtggaaggcggtgatgggggactcataccagtgcaagctctgccgctacaacacccagctcaaggccaacttccagctgcactgcaagacagacaagcacgtgcagaagtaccagctggtggcccacatcaaggagggcggcaaggccaacgagtggaggctcaagtgtgtggccatcggcaaccccgtgcacctcaagtgcaacgcctgtgactactacaccaacagcctggagaagctgcggctgcacacggtcaactccaggcacgaggccagcctgaagttgtacaagcacctgcagcagcatgagagtggtgtagaaggtgagagctgctactaccactgcgttctgtgcaactactccaccaaggccaagctcaacctcatccagcatgtgcgctccatgaagcaccagcgaagcgagagcctgcgaaagctgcagcggctgcagaagggccttccagaggaggacgaggacctggggcagatcttcaccatccgcaggtgcccctccacggacccagaagaagccattgaagatgttgaaggacccagtgaaacagctgctgatccagaggagcttgctaaggaccaagagggcggagcatcgtccagccaagcagagaaggagctgacagattctcctgcaacctccaaacgcatctccttcccaggtagctcagagtctcccctctcttcgaagcgaccaaaaacagctgaggagatcaaaccggagcagatgtaccagtgtccctactgcaagtacagtaatgccgatgtcaaccggctccgggtgcatgccatgacgcagcactcggtgcaacccatgcttcgctgccccctgtgccaggacatgctcaacaacaagatccacctccagctgcacctcacccacctccacagcgtggcacctgactgcgtggagaagctcattatgacggtgaccacccctgagatggtgatgccaagcagcatgttcctcccagcagctgttccagatcgagatgggaattccaatttggaagaggcaggaaagcagcctgaaacctcagaggatctgggaaagaacatcttgccatccgcaagcacagagcaaagcggagatttgaaaccatcccctgctgacccaggctctgtgagagaagactcaggcttcatctgctggaagaaggggtgcaaccaggttttcaaaacttctgctgcccttcagacgcattttaatgaagtgcatgccaagaggcctcagctgccggtgtcagatcgccatgtgtacaagtaccgctgtaatcagtgtagcctggccttcaagaccattgaaaagttgcagctccattctcagtaccatgtgatcagagctgccaccatgtgctgtctttgtcagcgcagtttccgaactttccaggctctgaagaagcaccttgagacaagccacctggagctgagtgaggctgacatccaacagctttatggtggcctgctggccaatggggacctcctggcaatgggagaccccactctggctgaggaccataccataattgttgaggaagacaaggaggaagagagtgacttggaagataaacagagcccaacgggcagtgactctgggtcagtacaagaagactcgggctcagagccaaagagagctctgcctttcagaaaaggtcccaattttactatggaaaagttcctagacccttctcgcccttacaagtgtaccgtctgcaaggaatctttcactcaaaagaatatcctgctagtacactacaattctgtctcccacctgcataagttaaagagagcccttcaagaatcagcaaccggtcagccagaacccaccagcagcccagacaacaaaccttttaagtgtaacacttgtaatgtggcctacagccagagttccactctggagatccatatgaggtctgtgttacatcaaaccaaggcccgggcagccaagctggaggctgcaagtggcagcagcaatgggactgggaacagcagcagtatttccttgagctcctccacgccaagtcctgtgagcaccagtggcagtaacacctttaccacctccaatccaagcagtgctggcattgctccaagctctaacttactaagccaagtgcccactgagagtgtagggatgccacccctggggaatcctattggtgccaacattgcttccccttcagagcccaaagaggccaatcggaagaaactggcagatatgattgcatccaggcagcagcaacaacagcagcagcaacagcaacaacaacaacaacaacaacaacaacaagcacaaacgctggcccaggcccaggctcaagttcaagctcacctgcagcaggagctgcagcaacaggctgccctgatccagtctcagctgtttaaccccaccctccttcctcacttccccatgacaactgagaccctgctgcaactacagcagcagcagcacctcctcttccctttctacatccccagtgctgagttccagcttaaccccgaggtgagcttgccagtgaccagtggggcactgacactgactgggacaggcccaggcctgctggaagatctgaaggctcaggttcaggtcccacagcagagccatcagcagatcttgccgcagcagcagcagaaccaactctctatagcccagagtcactctgccctccttcagccaagccagcaccccgaaaagaagaacaaattggtcatcaaagaaaaggaaaaagaaagccagagagagagggacagcgccgaggggggagagggcaacaccggtccgaaggaaacactgccagatgccttgaaggccaaagagaagaaagagttggcaccagggggtggttctgagccttccatgctccctccacgcattgcttcagatgccagagggaacgccaccaaggccctgctggagaactttggctttgagttggtcatccagtataatgagaacaagcagaaggtgcagaaaaagaatgggaagactgaccagggagagaacctggaaaagctcgagtgtgactcctgcggcaagttgttttccaacatcttgattttaaagagtcatcaagagcacgttcatcagaattactttcctttcaaacagctcgagaggtttgccaaacagtacagagaccactacgataaactgtacccactgaggccccagaccccagagccaccaccacctccccctccaccccctccacccccacttccggcagcgccgcctcagccggcgtccacaccagccatccccgcatcagccccacccatcacctcacctacaattgcaccggcccagccatcagtgccgctcacccagctctccatgccgatggagctgcccatcttctcgccgctgatgatgcagacgatgccgctgcagaccttgccggctcagctacccccgcagctgggacctgtggagcctctgcctgcggacctggcccaactctaccagcatcagctcaatccaaccctgctccagcagcagaacaagaggcctcgcaccaggatcacagatgatcagctccgagtcttgcggcaatattttgacattaacaactcccccagtgaagagcaaataaaagagatggcagacaagtccgggttgccccagaaagtgatcaagcactggttcaggaacactctcttcaaagagaggcagcgtaacaaggactccccttacaacttcagtaatcctcctatcaccagcctggaggagctcaagattgactcccggcccccttcgccggaacctccaaagcaggagtactggggaagcaagaggtcttcaagaacaaggtttacggactaccagctgagggtcttacaggacttcttcgatgccaatgcttacccaaaggatgatgaatttgagcaactctctaatttactgaaccttccaacccgagtgatagtggtgtggtttcagaatgcccgacagaaggccaggaagaattatgagaatcagggagagggcaaagatggagagcggcgtgagcttacaaatgatagatacattcgaacaagcaacttgaactaccagtgcaaaaaatgtagcctggtgtttcagcgcatctttgatctcatcaagcaccagaagaagctgtgttacaaggatgaggatgaggaggggcaggacgacagccaaaatgaggattccatggatgccatggaaatcctgacgcctaccagctcatcctgcagtaccccgatgccctcacaggcttacagcgccccagcaccatcagccaataatacagcttcctccgctttcttgcagcttacagcggaggctgaggaactggccaccttcaattcaaaaacagaggcaggcgatgagaaaccaaagctggcggaagctcccagtgcacagccaaaccaaacccaagaaaagcaaggacaaccaaagccagagctgcagcagcaagagcagcccgagcagaagaccaacactccccagcagaagctcccccagctggtgtccctgccttcgttgccacagcctcctccacaagcgccccctccacagtgccccttaccccagtcgagccccagtccttcccagctctcccacctgcccctcaagcccctccacacatcaactcctcaacagctcgcaaacctacctcctcagctaatcccctaccagtgtgaccagtgtaagttggcatttccgtcatttgagcactggcaggagcatcagcagctccacttcctgagcgcgcagaaccagttcatccacccccagtttttggacaggtccctggatatgcctttcatgctctttgatcccagtaacccactcctggccagccagctgctctctggggccatacctcagattccagcaagctcagccacttctccttcaactccaacctccacaatgaacactctcaagaggaagctggaggaaaaggccagtgcaagccctggcgaaaacgacagtgggacaggaggagaagagcctcagagagacaagcgtttgagaacaaccatcacaccggaacaactagaaattctctaccagaagtatctactggattccaatccgactcgaaagatgttggatcacattgcacacgaggtgggcttgaagaaacgtgtggtacaagtctggtttcagaacacccgagctcgggaaaggaaaggacagttccgggctgtaggcccagcgcaggcccacaggagatgccctttttgcagagcgctcttcaaagccaagactgctcttgaggctcatatccggtcccgtcactggcatgaagccaagagagctggctacaacctaactctgtctgcgatgctcttagactgtgatgggggactccagatgaaaggagatatttttgacggaactagcttttcccacctacccccaagcagtagtgatggtcagggtgtccccctctcacctgtgagtaaaaccatggaattgtcacccagaactcttctaagcccttcctccattaaggtggaagggattgaagactttgaaagcccctccatgtcctcagttaatctaaactttgaccaaactaagctggacaacgatgactgttcctctgtcaacacagcaatcacagataccacaactggagacgagggcaacgcagataacgacagtgcaacgggaatagcaactgaaaccaaatcctcttctgcacccaacgaagggttgaccaaagcggccatgatggcaatgtctgagtatgaagatcggttgtcatctggtctggtcagcccggccccgagcttttatagcaaggaatatgacaatgaaggtacagtggactacagtgaaacctcaagccttgcagatccctgctccccgagtcctggtgcgagtggatctgcaggcaaatctggtgacagcggngatcggcctgggcagaaacgttttcgcactcaaatgaccaatctgcagctgaaggtcctcaagtcatgctttaatgactacaggacacccactatgctagaatgtgaggtcctgggcaatgacattggactgccaaagagagtcgttcaggtctggttccagaatgcccgggcaaaagaaaagaagtccaagttaagcatggccaagcattttggtataaaccaaacgagttatgagggacccaaaacagagtgcactttgtgtggcatcaagtacagcgctcggctgtctgtacgtgaccatatcttttcccaacagcatatctccaaagttaaagacaccattggaagccagctggacaaggagaaagaatactttgacccagccaccgtacgtcagttgatggctcaacaagagttggaccggattaaaaaggccaacgaggtccttggactggcagctcagcagcaagggatgtttgacaacacccctcttcaggcccttaaccttcctacagcatatccagcgctccagggcattcctcctgtgttgctcccgggcctcaacagcccctccttgccaggctttactccatccaacacagctttaacgtctcctaagccgaacttgatgggtctgcccagcacaactgttccttcccctggcctccccacttctggattaccaaataaaccgtcctcagcgtcgctgagctccccaaccccagcacaagccacgatggcgatgggccctcagcaacccccccagcagcagcagcagcagcagcaaccacaggtgcagcagcctcccccgccgccagcagcccagccgccacccacaccacagctcccactgcaacagcagcagcaacgcaaggacaaagacagtgagaaagtaaaggagaaggaaaaggcacacaaagggaaaggggaacccctgcctgtccccaagaaggagaaaggagaggcccccacggcaactgcagccacgatctcagccccgctgcccaccatggagtatgcggtagaccctgcacagctgcaggccctgcaggccgcgttgacttcggaccccacagcattgctcacaagccagttccttccttactttgtaccaggcttttctccttattatgctccccagatccctggcgccctgcagagcgggtacctgcagcctatgtatggcatggaaggcctgttcccctacagccctgcactgtcgcaggccctgatggggctgtccccaggctccctactgcagcagtaccagcaataccagcagagtctgcaggaggcaattcagcagcagcagcagcggcaactacagcagcagcagcagcaaaaagtgcagcagcagcagcccaaagcaagccaaaccccagtcccccccggggctccttccccagacaaagaccctgccaaagaatcccccaaaccagaagaacagaaaaacaccccccgtgaggtgtcccccctcctgccgaaactccctgaagagccagaagcagaaagcaaaagtgcggactccctctacgaccccttcattgttccaaaggtgcagtacaagttggtctgccgcaagtgccaggcgggcttcagcgacgaggaggcagcgaggagccacctgaagtccctctgcttcttcggccagtctgtggtgaacctgcaagagatggtgcttcacgtccccaccggcggcggcggcggtggcagtggcggcggcggcggcggtggcggcggcggcggcggcggcggctcgtaccactgcctggcgtgcgagagcgcgctctgtggggaggaagctctgagtcaacatctcgagtcggccttgcacaaacacagaacaatcacgagagcagcaagaaacgccaaagagcaccctagtttattacctcactctgcctgcttccccgatcctagcaccgcatctacctcgcagtctgccgctcactcaaacgacagcccccctcccccgtcggccgccgccccctcctccgcttccccccacgcctccaggaagtcttggccgcaagtggtctcccgggcttcggcagcgaagcccccttcttttcctcctctctcctcatcttcaacggttacctcaagttcatgcagcacctcaggggttcagccctcgatgccaacagacgactattcggaggagtctgacacggatctcagccaaaagtccgacggaccggcgagcccggtggagggtcccaaagaccccagctgccccaaggacagtggtctgaccagtgtaggaacggacaccttcagattgtaagctttgaagatgaacaatacaaacaaatgaatttaaatacaaaaattaataacaaaccaatttcaaaaatagactaactgcaattccaaagcttctaacca

SEQ ID NO: 424705 - DNA, 3209 bp, Homo sapiens
  misc_feature (167)..(167): n is a, c, g, or t
  misc_feature (170)..(170): n is a, c, g, or t
agtgtgtgaggcagccggggagatctgagtggcggcccgtgagcacgaagagaagaacgcacagaaggcagaaaagtggtgccgacactgaggtggggcccggcgcaccccgggcgatctggccgggaccaacccggaaactggccaggaagtatagctcccggtgnaangcgttgccagggagtggtggtagattaggggtatgaatcaaggatgggattctagcccatgagggcctggtgatatggtcagacctttgctatccataggcagtggtgcttcgggtaggttgtgatgtcttgggaattggtgtcagtatcttgggctattccacttctgacatggcttttctgcttttcctgcggttgtttctcaaccatctacagtcccactggccctcctgtgtatcattcaaacaggggcaggaaaagaagatggtcgtttctcccgcagattccagattcctattcctaggcggttatactgttgagtagacttgttgaagcaggtcagctgggccaaggcatggaagcaattttccctgaatggattgttcttatttcttcccaggcccttcctccacactttcctattcatcatcttctctctaccctccgaaagcatccagtcagctgcagcaacagaggtcagagaggaggaacacctgtagagcctgttttgtttttgttcatgtggccgtgctagctttcttgccttcgttctctcttctcctgttgccgctctcctccagataacttctctggggacctcgtggccatactatttttgtgatgaaggcctttggtgcaaatgggccccagctagaaacagctagctttggggcctctagactaattgcagttgggcagagtgaatggtagctgggagtacttggcaaagaaaatgtgaactagcgggtgtggcacattgggcaggaaggtgttggaagttgtttggctggaaggggaagtatgggagctagccaggactgaatcttcattagaatacaaggttgtccagccctgagcctggtgggatacttctggaagttgtttggctgaaaggggaagtatgggagctgacctaggactgagtcctcattagaatacaaggttgtccagctctgagcctggtgggatacttctggaagttgtttggctgaaaggggaagtatgggagctgacctaggactgagtcctcattagaatacaaggttgtccagccctgagcctggtgggatacttctgttggaaatgttcgttttgagaggatccttcaagccttgacatctcaaactgtgtgccagtgacaccggtaaaacgtcttgagcttcagccctacccctgcccagactgaccggtgatttctgtctccattcctttcagctttaacgtctcctaagccgaacttgatgggtctgcccagcacaactgttccttcccctggcctccccacttctggattaccaaataaaccgtcctcagcgtcgctgagctccccaaccccagcacaagccacgatggcgatgggccctcagcaacccccccagcagcagcagcagcagcagcaaccacaggtgcagcagcctcccccgccgccagcagcccagccgccacccacaccacagctcccactgcaacagcagcagcaacgcaaggacaaagacagtgagaaagtaaaggagaaggaaaaggcacacaaagggaaaggggaacccctgcctgtccccaagaaggagaaaggagaggcccccacggcaactgcagccacgatctcagccccgctgcccaccatggagtatgcggtagaccctgcacagctgcaggccctgcaggccgcgttgacttcggaccccacagcattgctcacaagccagttccttccttactttgtaccaggcttttctccttattatgctccccagatccctggcgccctgcagagcgggtacctgcagcctatgtatggcatggaaggcctgttcccctacagccctgcactgtcgcaggccctgatggggctgtccccaggctccctactgcagcagtaccagcaataccagcagagtctgcaggaggcaattcagcagcagcagcagcggcaactacagcagcagcagcagcaaaaagtgcagcagcagcagcccaaagcaagccaaaccccagtcccccccggggctccttccccagacaaagaccctgccaaagaatcccccaaaccagaagaacagaaaaacaccccccgtgaggtgtcccccctcctgccgaaactccctgaagagccagaagcagaaagcaaaagtgcggactccctctacgaccccttcattgttccaaaggtgcagtacaagttggtctgccgcaagtgccaggcgggcttcagcgacgaggaggcagcgaggagccacctgaagtccctctgcttcttcggccagtctgtggtgaacctgcaagagatggtgcttcacgtccccaccggcggcggcggcggtggcagtggcggcggcggcggcggtggcggcggcggcggcggcggcggctcgtaccactgcctggcgtgcgagagcgcgctctgtggggaggaagctctgagtcaacatctcgagtcggccttgcacaaacacagaacaatcacgagagcagcaagaaacgccaaagagcaccctagtttattacctcactctgcctgcttccccgatcctagcaccgcatctacctcgcagtctgccgctcactcaaacgacagcccccctcccccgtcggccgccgccccctcctccgcttccccccacgcctccaggaagtcttggccgcaagtggtctcccgggcttcggcagcgaagcccccttcttttcctcctctctcctcatcttcaacggttacctcaagttcatgcagcacctcaggggttcagccctcgatgccaacagacgactattcggaggagtctgacacggatctcagccaaaagtccgacggaccggcgagcccggtggagggtcccaaagaccccagctgccccaaggacagtggtctgaccagtgtaggaacggacaccttcagattgtaagctttgaagatgaacaatacaaacaaatgaatttaaatacaaaaattaataacaaaccaatttcaaaaatagactaactgcaattccaaagcttctaaccaaaaaacaaaaaaaaaaaaaaaaagaaaaaaaagaaaaa

SEQ ID NO: 424706 - DNA, 4423 bp, Homo sapiens
  misc_feature (280)..(280): n is a, c, g, or t
  misc_feature (496)..(496): n is a, c, g, or t
  misc_feature (793)..(793): n is a, c, g, or t
  misc_feature (887)..(887): n is a, c, g, or t
  misc_feature (1012)..(1012): n is a, c, g, or t
  misc_feature (1096)..(1096): n is a, c, g, or t
  misc_feature (2408)..(2408): n is a, c, g, or t
  misc_feature (2497)..(2497): n is a, c, g, or t
  misc_feature (2944)..(2944): n is a, c, g, or t
  misc_feature (2973)..(2973): n is a, c, g, or t
  misc_feature (3003)..(3003): n is a, c, g, or t
ccgcgcgtccctgtgcgtccccgggtccctgcgggcgggcgggcgcggtcgccgccgagcaacccggcctgcgcccggcacgactgtagatgtcaggctttgcccggggagccgagcggcagcggggctgtgagtttcaaattaaccttccgctttgttgctgtgtaatgtggatccccgaaggccccccgccccgcccgccccccttccccgggcggtgcgcgctgcaaactgcgagttgggcttcatttacataaagcgattccgggcgggcggcggnagaggaggaggcggcggcggcgggcaggccggggacccggacgccagcgccgcgccccgtgggtgaatccccgccgcgtcccggggacctccctccggggacgggccgaccgccagccctgccgccaccatgagctcccctcccctgtctccgggccccctgctcctgaccagagccacctccgagtcctggggccagcgggaggtggggagcatnccgcctggggtgggtgagctcggggctcgggtgccactggaatttcccgttgttgcgcatggcggcgcggcccccggacctgcaagtgccgcctccctccggaggtgcgcggaggcttggtgtgccaggtccgagcctccgtactgggtgcaatgaaagctccacgcaggccttaccatggaaggctgtgactcgcccgtcgtctcggggaaggacaatgggtgcggtatccctcagcaccagcaatggactgaactcaacagcacccacctccctgacaaacccagtagcatggancagtccacaggcgagagccacgggcccttggacagcctgagggcccccttcaatgagcgcctcgcggagagcaccgcgtcggccgggccccccnccgagcccgccagcaaggaggtcacctgcaacgaatgttcggcctcctttgccagcctccagacctacatggagcaccactgccccagcgcgcgccccccgccacccctgagagaggagagcgcnagcgacaccggtgaggagggggacgaggagagtgacgtggagaacctggccggggagatcgtctaccagccggacggctccgcntacattgtggagagcctgagccagctgacccagggcgggggcgcctgtgggagtggcagtggcagtgggcctctcccctcgcttttcctgaactctctccctggcgcggggggcaagcaaggggacccttcgtgtgctgcacccgtgtacccgcagatcatcaacactttccacatagcctcatccttcgggaaatggtttgagggcccagaccaggctttcccgaatacctcagccctggcggggctcagccccgtcctgcacagcttccgcgtgtttgacgtgcgacacaaaagcaacaaggattacctgaacagcgacggttctgccaaaagctcctgcgtatccaaagatgttcccaacaatgtggacctgtccaaattcgatggctttgtgctctatggcaagaggaagcccatcctgatgtgtttcttgtgcaaactctcctttgggtacgtccgttcgtttgtgacccacgcggtgcatgaccatcgaatgaccctgagcgaagacgagcggaaaattcttagcaataagaacatctccgctatcatccaagggatcggcaaagacaaggaaccccttgtaagttttctggaaccaaaaaacaaaaactttcaacaccctttagtttccacagctaacctcataggccccggacacagtttttatggtaaatttagtggcattcgaatggaaggggaggaagctctcccagcgggctccgccgctggccccgagcagccccaggctggtctcttgacccccagcaccctgttgaaccttggcgggctcaccagctcggtactgaagacccccattacctcagtccccctggggcctctggcttccagtcctaccaaatcctcagagggcaaggactctggggcggcagaaggagagaagcaggaagtgggcgacggggattgcttctctgagaaggtagagccagccgaagaggaggcggaggaggaagaggaggaggaagaggcggaggaggaggaggaagaagaggaggaggaagaagaggaggaggaagacgagggttgcaaaggactctttccaagcgagttggatgaggaactggaggacaggccccatgaggagcctggggccgcagcaggtagtagcagcaaaaaggaccttgctctctcaaaccaaagcatttctaactcccccttaatgcctaacgtgctccagaccctgtcgaggggcacagcttctactagttctaattctgcttcttcctttgttgtctttgatggtgcgaacaggaggaatcgtttaagctttaacagtgagggcgtcaggnccaatgtggcagagggcggcaggaggctggacttcgctgacgaaagtgccaataaagacaatgccacagcaccagaaccaaatgaaagnacagagggtgacgatgggggcttcgttccccatcaccagcacgctggctccctctgcgagcttggggttggggagtgcccctcggggagtggcgtggagtgccccaaatgcgacacggtcctgggctcctcccgctcgctgggcggccacatgaccatgatgcattctcgtaactcgtgtaagacactcaagtgccccaagtgcaactggcactataagtaccagcagaccctggaggcacacatgaaggagaagcacccggagccggggggctcctgtgtctactgcaaaagcgggcagccccacccccggctggcacgaggcgagagctacacgtgtggttacaagcctttccgctgcgaggtgtgtaactactccacaactaccaaaggcaacctcagtattcatatgcagtctgacaagcatctcaacaacatgcagaacctncagaatggagggggggagcaggtcttcanccacactgccggggcggcggcggcggcggnggctgcggcggcggcggcagccaatatcagtagctcctgcggggccccctcgcccaccaaaccaaaaaccaaacccacctggcggtgcgaggtgtgtgattatgagaccaacgtggccaggaacctccgcattcacatgaccagtgagaagcacatgcataacatgatgttactgcaacagaacatgacccagatccaacacaaccgccaccgtgggcctcggcagcctgccctcacccgccgaggccgagctctaccaatactacctggcccagaacatgaacctgcccaacctgaagatggacagtgctgcctcggacgcccagttcatgatgagcggattccagctggatcccgccgggcccatggccgccatgacgcctgctctagtgggcggtgagatccccctagacatgcggctcgggggcgggcagctggtgtcagaggagctgatgaacctgggcgagagcttcatccagaccaacgacccgtcgctgaagctcttccagtgcgccgtctgcaacaagttcacgacggacaacctggacatgctgggcctgcacatgaacgtggagcgcagcctgtcggaggacgagtggaaggcggtgatgggggactcataccagtgcaagctctgccgctacaacacccagctcaaggccaacttccagctgcactgcaagacagacaagcacgtgcagaagtaccagctggtggcccacatcaaggagggcggcaaggccaacgagtggaggctcaagtgtgtggccatcggcaaccccgtgcacctcaagtgcaacgcctgtgactactacaccaacagcctggagaagctgcggctgcacacggtcaactccaggcacgaggccagcctgaagttgtacaagcacctgcagcagcatgagagtggtgtagaaggtgagagctgctactaccactgcgttctgtgcaactactccaccaaggccaagctcaacctcatccagcatgtgcgctccatgaagcaccagcgaagcgagagcctgcgaaagctgcagcggctgcagaagggccttccagaggaggacgaggacctggggcagatcttcaccatccgcaggtgcccctccacggacccagaagaagccattgaagatgttgaaggacccagtgaaacagctgctgatccagaggagcttgctaaggaccaagagggcggagcatcgtccagccaagcagagaaggagctgacagattctcctgcaacctccaaacgcatctccttcccaggtagctcagagtctcccctctcttcgaagcgaccaaaaacagctgaggagatcaaaccggagcaggtgaggctggaagggactctgctggtggggaggtgaggtgttttagacattggtagggaacaaacttttgggtgggcgggcttggg

SEQ ID NO: 424707 - DNA, 367 bp, Homo sapiens
ggagaggaaggaggaatatgtcataaatgttcaacggttccatcaagttcaggcagcaccgcgggggttagcccctggatgcctaacagaggttaatgcgagggagggttcaggggttcacgtcgtaactccgacggaccggcgagcccggtggagggtcccaaagaccccagctgccccaaggacagtggtctgaccagtgtaggaacggacaccttcagattgtaagctttgaagatgaacaatacaaacaaatgaatttaaatacaaaaattaataacaaaccaatttcaaaaatagactaactgcaattccaaagcttctaaccaaaaaacaaaaaaaaaaaaaaaaagaaaaaaaagaaaaa

SEQ ID NO: 424708 - DNA, 470 bp, Homo sapiens
ggtgttttaagaaaatcctgtgctataaatgaatgttgattttcacccaacacaaaccctctgggagctggcctggtctggctgctgtattgcatcttctactttctcttttagcatcgtccagccaagcagagaaggagctgacagattctcctgcaacctccaaacgcatctccttcccaggtagctcagagtctcccctctcttcgaagcgaccaaaaacagctgaggagatcaaaccggagcaggtgaggctggaagggactctgctggtggggaggtgaggtgttttagacattggtagggaacaaacttttgggtgggcgggcttggggcacacacagttgctcaaagcagtgggtgtgttccccacagatgtaccagtgtccctactgcaagtacagtaatgccgatgtcaaccggctccgggtgcatgccatgacgcagcactcggtgcaacccatgcttcg

SEQ ID NO: 424709 - DNA, 8613 bp, Homo sapiens
  misc_feature (6210)..(6210): n is a, c, g, or t
cgcggcccgagcgcctcttttcgggattaaaagcgccgccagctcccgccgccgccgccgtcgccagcagcgccgctgcagccgccgccgccggagaagcaaccgctgggcggtgagatccccctagacatgcggctcgggggcgggcagctggtgtcagaggagctgatgaacctgggcgagagcttcatccagaccaacgacccgtcgctgaagctcttccagtgcgccgtctgcaacaagttcacgacggacaacctggacatgctgggcctgcacatgaacgtggagcgcagcctgtcggaggacgagtggaaggcggtgatgggggactcataccagtgcaagctctgccgctacaacacccagctcaaggccaacttccagctgcactgcaagacagacaagcacgtgcagaagtaccagctggtggcccacatcaaggagggcggcaaggccaacgagtggaggctcaagtgtgtggccatcggcaaccccgtgcacctcaagtgcaacgcctgtgactactacaccaacagcctggagaagctgcggctgcacacggtcaactccaggcacgaggccagcctgaagttgtacaagcacctgcagcagcatgagagtggtgtagaaggtgagagctgctactaccactgcgttctgtgcaactactccaccaaggccaagctcaacctcatccagcatgtgcgctccatgaagcaccagcgaagcgagagcctgcgaaagctgcagcggctgcagaagggccttccagaggaggacgaggacctggggcagatcttcaccatccgcaggtgcccctccacggacccagaagaagccattgaagatgttgaaggacccagtgaaacagctgctgatccagaggagcttgctaaggaccaagagggcggagcatcgtccagccaagcagagaaggagctgacagattctcctgcaacctccaaacgcatctccttcccaggtagctcagagtctcccctctcttcgaagcgaccaaaaacagctgaggagatcaaaccggagcagatgtaccagtgtccctactgcaagtacagtaatgccgatgtcaaccggctccgggtgcatgccatgacgcagcactcggtgcaacccatgcttcgctgccccctgtgccaggacatgctcaacaacaagatccacctccagctgcacctcacccacctccacagcgtggcacctgactgcgtggagaagctcattatgacggtgaccacccctgagatggtgatgccaagcagcatgttcctcccagcagctgttccagatcgagatgggaattccaatttggaagaggcaggaaagcagcctgaaacctcagaggatctgggaaagaacatcttgccatccgcaagcacagagcaaagcggagatttgaaaccatcccctgctgacccaggctctgtgagagaagactcaggcttcatctgctggaagaaggggtgcaaccaggttttcaaaacttctgctgcccttcagacgcattttaatgaagtgcatgccaagaggcctcagctgccggtgtcagatcgccatgtgtacaagtaccgctgtaatcagtgtagcctggccttcaagaccattgaaaagttgcagctccattctcagtaccatgtgatcagagctgccaccatgtgctgtctttgtcagcgcagtttccgaactttccaggctctgaagaagcaccttgagacaagccacctggagctgagtgaggctgacatccaacagctttatggtggcctgctggccaatggggacctcctggcaatgggagaccccactctggctgaggaccataccataattgttgaggaagacaaggaggaagagagtgacttggaagataaacagagcccaacgggcagtgactctgggtcagtacaagaagactcgggctcagagccaaagagagctctgcctttcagaaaaggtcccaattttactatggaaaagttcctagacccttctcgcccttacaagtgtaccgtctgcaaggaatctttcactcaaaagaatatcctgctagtacactacaattctgtctcccacctgcataagttaaagagagcccttcaagaatcagcaaccggtcagccagaacccaccagcagcccagacaacaaaccttttaagtgtaacacttgtaatgtggcctacagccagagttccactctggagatccatatgaggtctgtgttacatcaaaccaaggcccgggcagccaagctggaggctgcaagtggcagcagcaatgggactgggaacagcagcagtatttccttgagctcctccacgccaagtcctgtgagcaccagtggcagtaacacctttaccacctccaatccaagcagtgctggcattgctccaagctctaacttactaagccaagtgcccactgagagtgtagggatgccacccctggggaatcctattggtgccaacattgcttccccttcagagcccaaagaggccaatcggaagaaactggcagatatgattgcatccaggcagcagcaacaacagcagcagcaacagcaacaacaacaacaacaacaacaacaacaagcacaaacgctggcccaggcccaggctcaagttcaagctcacctgcagcaggagctgcagcaacaggctgccctgatccagtctcagctgtttaaccccaccctccttcctcacttccccatgacaactgagaccctgctgcaactacagcagcagcagcacctcctcttccctttctacatccccagtgctgagttccagcttaaccccgaggtgagcttgccagtgaccagtggggcactgacactgactgggacaggcccaggcctgctggaagatctgaaggctcaggttcaggtcccacagcagagccatcagcagatcttgccgcagcagcagcagaaccaactctctatagcccagagtcactctgccctccttcagccaagccagcaccccgaaaagaagaacaaattggtcatcaaagaaaaggaaaaagaaagccagagagagagggacagcgccgaggggggagagggcaacaccggtccgaaggaaacactgccagatgccttgaaggccaaagagaagaaagagttggcaccagggggtggttctgagccttccatgctccctccacgcattgcttcagatgccagagggaacgccaccaaggccctgctggagaactttggctttgagttggtcatccagtataatgagaacaagcagaaggtgcagaaaaagaatgggaagactgaccagggagagaacctggaaaagctcgagtgtgactcctgcggcaagttgttttccaacatcttgattttaaagagtcatcaagagcacgttcatcagaattactttcctttcaaacagctcgagaggtttgccaaacagtacagagaccactacgataaactgtacccactgaggccccagaccccagagccaccaccacctccccctccaccccctccacccccacttccggcagcgccgcctcagccggcgtccacaccagccatccccgcatcagccccacccatcacctcacctacaattgcaccggcccagccatcagtgccgctcacccagctctccatgccgatggagctgcccatcttctcgccgctgatgatgcagacgatgccgctgcagaccttgccggctcagctacccccgcagctgggacctgtggagcctctgcctgcggacctggcccaactctaccagcatcagctcaatccaaccctgctccagcagcagaacaagaggcctcgcaccaggatcacagatgatcagctccgagtcttgcggcaatattttgacattaacaactcccccagtgaagagcaaataaaagagatggcagacaagtccgggttgccccagaaagtgatcaagcactggttcaggaacactctcttcaaagagaggcagcgtaacaaggactccccttacaacttcagtaatcctcctatcaccagcctggaggagctcaagattgactcccggcccccttcgccggaacctccaaagcaggagtactggggaagcaagaggtcttcaagaacaaggtttacggactaccagctgagggtcttacaggacttcttcgatgccaatgcttacccaaaggatgatgaatttgagcaactctctaatttactgaaccttccaacccgagtgatagtggtgtggtttcagaatgcccgacagaaggccaggaagaattatgagaatcagggagagggcaaagatggagagcggcgtgagcttacaaatgatagatacattcgaacaagcaacttgaactaccagtgcaaaaaatgtagcctggtgtttcagcgcatctttgatctcatcaagcaccagaagaagctgtgttacaaggatgaggatgaggaggggcaggacgacagccaaaatgaggattccatggatgccatggaaatcctgacgcctaccagctcatcctgcagtaccccgatgccctcacaggcttacagcgccccagcaccatcagccaataatacagcttcctccgctttcttgcagcttacagcggaggctgaggaactggccaccttcaattcaaaaacagaggcaggcgatgagaaaccaaagctggcggaagctcccagtgcacagccaaaccaaacccaagaaaagcaaggacaaccaaagccagagctgcagcagcaagagcagcccgagcagaagaccaacactccccagcagaagctcccccagctggtgtccctgccttcgttgccacagcctcctccacaagcgccccctccacagtgccccttaccccagtcgagccccagtccttcccagctctcccacctgcccctcaagcccctccacacatcaactcctcaacagctcgcaaacctacctcctcagctaatcccctaccagtgtgaccagtgtaagttggcatttccgtcatttgagcactggcaggagcatcagcagctccacttcctgagcgcgcagaaccagttcatccacccccagtttttggacaggtccctggatatgcctttcatgctctttgatcccagtaacccactcctggccagccagctgctctctggggccatacctcagattccagcaagctcagccacttctccttcaactccaacctccacaatgaacactctcaagaggaagctggaggaaaaggccagtgcaagccctggcgaaaacgacagtgggacaggaggagaagagcctcagagagacaagcgtttgagaacaaccatcacaccggaacaactagaaattctctaccagaagtatctactggattccaatccgactcgaaagatgttggatcacattgcacacgaggtgggcttgaagaaacgtgtggtacaagtctggtttcagaacacccgagctcgggaaaggaaaggacagttccgggctgtaggcccagcgcaggcccacaggagatgccctttttgcagagcgctcttcaaagccaagactgctcttgaggctcatatccggtcccgtcactggcatgaagccaagagagctggctacaacctaactctgtctgcgatgctcttagactgtgatgggggactccagatgaaaggagatatttttgacggaactagcttttcccacctacccccaagcagtagtgatggtcagggtgtccccctctcacctgtgagtaaaaccatggaattgtcacccagaactcttctaagcccttcctccattaaggtggaagggattgaagactttgaaagcccctccatgtcctcagttaatctaaactttgaccaaactaagctggacaacgatgactgttcctctgtcaacacagcaatcacagataccacaactggagacgagggcaacgcagataacgacagtgcaacgggaatagcaactgaaaccaaatcctcttctgcacccaacgaagggttgaccaaagcggccatgatggcaatgtctgagtatgaagatcggttgtcatctggtctggtcagcccggccccgagcttttatagcaaggaatatgacaatgaaggtacagtggactacagtgaaacctcaagccttgcagatccctgctccccgagtcctggtgcgagtggatctgcaggcaaatctggtgacagcggngatcggcctgggcagaaacgttttcgcactcaaatgaccaatctgcagctgaaggtcctcaagtcatgctttaatgactacaggacacccactatgctagaatgtgaggtcctgggcaatgacattggactgccaaagagagtcgttcaggtctggttccagaatgcccgggcaaaagaaaagaagtccaagttaagcatggccaagcattttggtataaaccaaacgagttatgagggacccaaaacagagtgcactttgtgtggcatcaagtacagcgctcggctgtctgtacgtgaccatatcttttcccaacagcatatctccaaagttaaagacaccattggaagccagctggacaaggagaaagaatactttgacccagccaccgtacgtcagttgatggctcaacaagagttggaccggattaaaaaggccaacgaggtccttggactggcagctcagcagcaagggatgtttgacaacacccctcttcaggcccttaaccttcctacagcatatccagcgctccagggcattcctcctgtgttgctcccgggcctcaacagcccctccttgccaggctttactccatccaacacagctttaacgtctcctaagccgaacttgatgggtctgcccagcacaactgttccttcccctggcctccccacttctggattaccaaataaaccgtcctcagcgtcgctgagctccccaaccccagcacaagccacgatggcgatgggccctcagcaacccccccagcagcagcagcagcagcagcaaccacaggtgcagcagcctcccccgccgccagcagcccagccgccacccacaccacagctcccactgcaacagcagcagcaacgcaaggacaaagacagtgagaaagtaaaggagaaggaaaaggcacacaaagggaaaggggaacccctgcctgtccccaagaaggagaaaggagaggcccccacggcaactgcagccacgatctcagccccgctgcccaccatggagtatgcggtagaccctgcacagctgcaggccctgcaggccgcgttgacttcggaccccacagcattgctcacaagccagttccttccttactttgtaccaggcttttctccttattatgctccccagatccctggcgccctgcagagcgggtacctgcagcctatgtatggcatggaaggcctgttcccctacagccctgcactgtcgcaggccctgatggggctgtccccaggctccctactgcagcagtaccagcaataccagcagagtctgcaggaggcaattcacagcagcagcagcaaaaagtgcagcagcagcagcccaaagcaagccaaaccccagtcccccccggggctccttccccagacaaagaccctgccaaagaatcccccaaaccagaagaacagaaaaacaccccccgtgaggtgtcccccctcctgccgaaactccctgaagagccagaagcagaaagcaaaagtgcggactccctctacgaccccttcattgttccaaaggtgcagtacaagttggtctgccgcaagtgccaggcgggcttcagcgacgaggaggcagcgaggagccacctgaagtccctctgcttcttcggccagtctgtggtgaacctgcaagagatggtgcttcacgtccccaccggcggcggcggcggtggcagtggcggcggcggcggcggtggcggcggcggcggcggcggcggctcgtaccactgcctggcgtgcgagagcgcgctctgtggggaggaagctctgagtcaacatctcgagtcggccttgcacaaacacagaacaatcacgagagcagcaagaaacgccaaagagcaccctagtttattacctcactctgcctgcttccccgatcctagcaccgcatctacctcgcagtctgccgctcactcaaacgacagcccccctcccccgtcggccgccgccccctcctccgcttccccccacgcctccaggaagtcttggccgcaagtggtctcccgggcttcggcagcgaagcccccttcttttcctcctctctcctcatcttcaacggttacctcaagttcatgcagcacctcaggggttcagccctcgatgccaacagacgactattcggaggagtctgacacggatctcagccaaaagtccgacggaccggcgagcccggtggagggtcccaaagaccccagctgccccaaggacagtggtctgaccagtgtaggaacggacaccttcagattgtaagctttgaagatgaacaatacaaacaaatgaatttaaatacaaaaattaataacaaaccaatttcaaaaatagactaactgcaattccaaagcttctaaccaaaaaacaaaaaaaaaaaaaaaaagaaaaaaaagaaaaa

SEQ ID NO: 424710 - DNA, 11860 bp, Homo sapiens
  misc_feature (280)..(280): n is a, c, g, or t
  misc_feature (496)..(496): n is a, c, g, or t
  misc_feature (793)..(793): n is a, c, g, or t
  misc_feature (887)..(887): n is a, c, g, or t
  misc_feature (1012)..(1012): n is a, c, g, or t
  misc_feature (1096)..(1096): n is a, c, g, or t
  misc_feature (2408)..(2408): n is a, c, g, or t
  misc_feature (2497)..(2497): n is a, c, g, or t
  misc_feature (2944)..(2944): n is a, c, g, or t
  misc_feature (2973)..(2973): n is a, c, g, or t
  misc_feature (3003)..(3003): n is a, c, g, or t
  misc_feature (9432)..(9432): n is a, c, g, or t
ccgcgcgtccctgtgcgtccccgggtccctgcgggcgggcgggcgcggtcgccgccgagcaacccggcctgcgcccggcacgactgtagatgtcaggctttgcccggggagccgagcggcagcggggctgtgagtttcaaattaaccttccgctttgttgctgtgtaatgtggatccccgaaggccccccgccccgcccgccccccttccccgggcggtgcgcgctgcaaactgcgagttgggcttcatttacataaagcgattccgggcgggcggcggnagaggaggaggcggcggcggcgggcaggccggggacccggacgccagcgccgcgccccgtgggtgaatccccgccgcgtcccggggacctccctccggggacgggccgaccgccagccctgccgccaccatgagctcccctcccctgtctccgggccccctgctcctgaccagagccacctccgagtcctggggccagcgggaggtggggagcatnccgcctggggtgggtgagctcggggctcgggtgccactggaatttcccgttgttgcgcatggcggcgcggcccccggacctgcaagtgccgcctccctccggaggtgcgcggaggcttggtgtgccaggtccgagcctccgtactgggtgcaatgaaagctccacgcaggccttaccatggaaggctgtgactcgcccgtcgtctcggggaaggacaatgggtgcggtatccctcagcaccagcaatggactgaactcaacagcacccacctccctgacaaacccagtagcatggancagtccacaggcgagagccacgggcccttggacagcctgagggcccccttcaatgagcgcctcgcggagagcaccgcgtcggccgggccccccnccgagcccgccagcaaggaggtcacctgcaacgaatgttcggcctcctttgccagcctccagacctacatggagcaccactgccccagcgcgcgccccccgccacccctgagagaggagagcgcnagcgacaccggtgaggagggggacgaggagagtgacgtggagaacctggccggggagatcgtctaccagccggacggctccgcntacattgtggagagcctgagccagctgacccagggcgggggcgcctgtgggagtggcagtggcagtgggcctctcccctcgcttttcctgaactctctccctggcgcggggggcaagcaaggggacccttcgtgtgctgcacccgtgtacccgcagatcatcaacactttccacatagcctcatccttcgggaaatggtttgagggcccagaccaggctttcccgaatacctcagccctggcggggctcagccccgtcctgcacagcttccgcgtgtttgacgtgcgacacaaaagcaacaaggattacctgaacagcgacggttctgccaaaagctcctgcgtatccaaagatgttcccaacaatgtggacctgtccaaattcgatggctttgtgctctatggcaagaggaagcccatcctgatgtgtttcttgtgcaaactctcctttgggtacgtccgttcgtttgtgacccacgcggtgcatgaccatcgaatgaccctgagcgaagacgagcggaaaattcttagcaataagaacatctccgctatcatccaagggatcggcaaagacaaggaaccccttgtaagttttctggaaccaaaaaacaaaaactttcaacaccctttagtttccacagctaacctcataggccccggacacagtttttatggtaaatttagtggcattcgaatggaaggggaggaagctctcccagcgggctccgccgctggccccgagcagccccaggctggtctcttgacccccagcaccctgttgaaccttggcgggctcaccagctcggtactgaagacccccattacctcagtccccctggggcctctggcttccagtcctaccaaatcctcagagggcaaggactctggggcggcagaaggagagaagcaggaagtgggcgacggggattgcttctctgagaaggtagagccagccgaagaggaggcggaggaggaagaggaggaggaagaggcggaggaggaggaggaagaagaggaggaggaagaagaggaggaggaagacgagggttgcaaaggactctttccaagcgagttggatgaggaactggaggacaggccccatgaggagcctggggccgcagcaggtagtagcagcaaaaaggaccttgctctctcaaaccaaagcatttctaactcccccttaatgcctaacgtgctccagaccctgtcgaggggcacagcttctactagttctaattctgcttcttcctttgttgtctttgatggtgcgaacaggaggaatcgtttaagctttaacagtgagggcgtcaggnccaatgtggcagagggcggcaggaggctggacttcgctgacgaaagtgccaataaagacaatgccacagcaccagaaccaaatgaaagnacagagggtgacgatgggggcttcgttccccatcaccagcacgctggctccctctgcgagcttggggttggggagtgcccctcggggagtggcgtggagtgccccaaatgcgacacggtcctgggctcctcccgctcgctgggcggccacatgaccatgatgcattctcgtaactcgtgtaagacactcaagtgccccaagtgcaactggcactataagtaccagcagaccctggaggcacacatgaaggagaagcacccggagccggggggctcctgtgtctactgcaaaagcgggcagccccacccccggctggcacgaggcgagagctacacgtgtggttacaagcctttccgctgcgaggtgtgtaactactccacaactaccaaaggcaacctcagtattcatatgcagtctgacaagcatctcaacaacatgcagaacctncagaatggagggggggagcaggtcttcanccacactgccggggcggcggcggcggcggnggctgcggcggcggcggcagccaatatcagtagctcctgcggggccccctcgcccaccaaaccaaaaaccaaacccacctggcggtgcgaggtgtgtgattatgagaccaacgtggccaggaacctccgcattcacatgaccagtgagaagcacatgcataacatgatgttactgcaacagaacatgacccagatccaacacaaccgccaccgtgggcctcggcagcctgccctcacccgccgaggccgagctctaccaatactacctggcccagaacatgaacctgcccaacctgaagatggacagtgctgcctcggacgcccagttcatgatgagcggattccagctggatcccgccgggcccatggccgccatgacgcctgctctagtgggcggtgagatccccctagacatgcggctcgggggcgggcagctggtgtcagaggagctgatgaacctgggcgagagcttcatccagaccaacgacccgtcgctgaagctcttccagtgcgccgtctgcaacaagttcacgacggacaacctggacatgctgggcctgcacatgaacgtggagcgcagcctgtcggaggacgagtggaaggcggtgatgggggactcataccagtgcaagctctgccgctacaacacccagctcaaggccaacttccagctgcactgcaagacagacaagcacgtgcagaagtaccagctggtggcccacatcaaggagggcggcaaggccaacgagtggaggctcaagtgtgtggccatcggcaaccccgtgcacctcaagtgcaacgcctgtgactactacaccaacagcctggagaagctgcggctgcacacggtcaactccaggcacgaggccagcctgaagttgtacaagcacctgcagcagcatgagagtggtgtagaaggtgagagctgctactaccactgcgttctgtgcaactactccaccaaggccaagctcaacctcatccagcatgtgcgctccatgaagcaccagcgaagcgagagcctgcgaaagctgcagcggctgcagaagggccttccagaggaggacgaggacctggggcagatcttcaccatccgcaggtgcccctccacggacccagaagaagccattgaagatgttgaaggacccagtgaaacagctgctgatccagaggagcttgctaaggaccaagagggcggagcatcgtccagccaagcagagaaggagctgacagattctcctgcaacctccaaacgcatctccttcccaggtagctcagagtctcccctctcttcgaagcgaccaaaaacagctgaggagatcaaaccggagcagatgtaccagtgtccctactgcaagtacagtaatgccgatgtcaaccggctccgggtgcatgccatgacgcagcactcggtgcaacccatgcttcgctgccccctgtgccaggacatgctcaacaacaagatccacctccagctgcacctcacccacctccacagcgtggcacctgactgcgtggagaagctcattatgacggtgaccacccctgagatggtgatgccaagcagcatgttcctcccagcagctgttccagatcgagatgggaattccaatttggaagaggcaggaaagcagcctgaaacctcagaggatctgggaaagaacatcttgccatccgcaagcacagagcaaagcggagatttgaaaccatcccctgctgacccaggctctgtgagagaagactcaggcttcatctgctggaagaaggggtgcaaccaggttttcaaaacttctgctgcccttcagacgcattttaatgaagtgcatgccaagaggcctcagctgccggtgtcagatcgccatgtgtacaagtaccgctgtaatcagtgtagcctggccttcaagaccattgaaaagttgcagctccattctcagtaccatgtgatcagagctgccaccatgtgctgtctttgtcagcgcagtttccgaactttccaggctctgaagaagcaccttgagacaagccacctggagctgagtgaggctgacatccaacagctttatggtggcctgctggccaatggggacctcctggcaatgggagaccccactctggctgaggaccataccataattgttgaggaagacaaggaggaagagagtgacttggaagataaacagagcccaacgggcagtgactctgggtcagtacaagaagactcgggctcagagccaaagagagctctgcctttcagaaaaggtcccaattttactatggaaaagttcctagacccttctcgcccttacaagtgtaccgtctgcaaggaatctttcactcaaaagaatatcctgctagtacactacaattctgtctcccacctgcataagttaaagagagcccttcaagaatcagcaaccggtcagccagaacccaccagcagcccagacaacaaaccttttaagtgtaacacttgtaatgtggcctacagccagagttccactctggagatccatatgaggtctgtgttacatcaaaccaaggcccgggcagccaagctggaggctgcaagtggcagcagcaatgggactgggaacagcagcagtatttccttgagctcctccacgccaagtcctgtgagcaccagtggcagtaacacctttaccacctccaatccaagcagtgctggcattgctccaagctctaacttactaagccaagtgcccactgagagtgtagggatgccacccctggggaatcctattggtgccaacattgcttccccttcagagcccaaagaggccaatcggaagaaactggcagatatgattgcatccaggcagcagcaacaacagcagcagcaacagcaacaacaacaacaacaacaacaacaacaagcacaaacgctggcccaggcccaggctcaagttcaagctcacctgcagcaggagctgcagcaacaggctgccctgatccagtctcagctgtttaaccccaccctccttcctcacttccccatgtgctgagttccagcttaaccccgaggtgagcttgccagtgaccagtggggcactgacactgactgggacaggcccaggcctgctggaagatctgaaggctcaggttcaggtcccacagcagagccatcagcagatcttgccgcagcagcagcagaaccaactctctatagcccagagtcactctgccctccttcagccaagccagcaccccgaaaagaagaacaaattggtcatcaaagaaaaggaaaaagaaagccagagagagagggacagcgccgaggggggagagggcaacaccggtccgaaggaaacactgccagatgccttgaaggccaaagagaagaaagagttggcaccagggggtggttctgagccttccatgctccctccacgcattgcttcagatgccagagggaacgccaccaaggccctgctggagaactttggctttgagttggtcatccagtataatgagaacaagcagaaggtgcagaaaaagaatgggaagactgaccagggagagaacctggaaaagctcgagtgtgactcctgcggcaagttgttttccaacatcttgattttaaagagtcatcaagagcacgttcatcagaattactttcctttcaaacagctcgagaggtttgccaaacagtacagagaccactacgataaactgtacccactgaggccccagaccccagagccaccaccacctccccctccaccccctccacccccacttccggcagcgccgcctcagccggcgtccacaccagccatccccgcatcagccccacccatcacctcacctacaattgcaccggcccagccatcagtgccgctcacccagctctccatgccgatggagctgcccatcttctcgccgctgatgatgcagacgatgccgctgcagaccttgccggctcagctacccccgcagctgggacctgtggagcctctgcctgcggacctggcccaactctaccagcatcagctcaatccaaccctgctccagcagcagaacaagaggcctcgcaccaggatcacagatgatcagctccgagtcttgcggcaatattttgacattaacaactcccccagtgaagagcaaataaaagagatggcagacaagtccgggttgccccagaaagtgatcaagcactggttcaggaacactctcttcaaagagaggcagcgtaacaaggactccccttacaacttcagtaatcctcctatcaccagcctggaggagctcaagattgactcccggcccccttcgccggaacctccaaagcaggagtactggggaagcaagaggtcttcaagaacaaggtttacggactaccagctgagggtcttacaggacttcttcgatgccaatgcttacccaaaggatgatgaatttgagcaactctctaatttactgaaccttccaacccgagtgatagtggtgtggtttcagaatgcccgacagaaggccaggaagaattatgagaatcagggagagggcaaagatggagagcggcgtgagcttacaaatgatagatacattcgaacaagcaacttgaactaccagtgcaaaaaatgtagcctggtgtttcagcgcatctttgatctcatcaagcaccagaagaagctgtgttacaaggatgaggatgaggaggggcaggacgacagccaaaatgaggattccatggatgccatggaaatcctgacgcctaccagctcatcctgcagtaccccgatgccctcacaggcttacagcgccccagcaccatcagccaataatacagcttcctccgctttcttgcagcttacagcggaggctgaggaactggccaccttcaattcaaaaacagaggcaggcgatgagaaaccaaagctggcggaagctcccagtgcacagccaaaccaaacccaagaaaagcaaggacaaccaaagccagagctgcagcagcaagagcagcccgagcagaagaccaacactccccagcagaagctcccccagctggtgtccctgccttcgttgccacagcctcctccacaagcgccccctccacagtgccccttaccccagtcgagccccagtccttcccagctctcccacctgcccctcaagcccctccacacatcaactcctcaacagctcgcaaacctacctcctcagctaatcccctaccagtgtgaccagtgtaagttggcatttccgtcatttgagcactggcaggagcatcagcagctccacttcctgagcgcgcagaaccagttcatccacccccagtttttggacaggtccctggatatgcctttcatgctctttgatcccagtaacccactcctggccagccagctgctctctggggccatacctcagattccagcaagctcagccacttctccttcaactccaacctccacaatgaacactctcaagaggaagctggaggaaaaggccagtgcaagccctggcgaaaacgacagtgggacaggaggagaagagcctcagagagacaagcgtttgagaacaaccatcacaccggaacaactagaaattctctaccagaagtatctactggattccaatccgactcgaaagatgttggatcacattgcacacgaggtgggcttgaagaaacgtgtggtacaagtctggtttcagaacacccgagctcgggaaaggaaaggacagttccgggctgtaggcccagcgcaggcccacaggagatgccctttttgcagagcgctcttcaaagccaagactgctcttgaggctcatatccggtcccgtcactggcatgaagccaagagagctggctacaacctaactctgtctgcgatgctcttagactgtgatgggggactccagatgaaaggagatatttttgacggaactagcttttcccacctacccccaagcagtagtgatggtcagggtgtccccctctcacctgtgagtaaaaccatggaattgtcacccagaactcttctaagcccttcctccattaaggtggaagggattgaagactttgaaagcccctccatgtcctcagttaatctaaactttgaccaaactaagctggacaacgatgactgttcctctgtcaacacagcaatcacagataccacaactggagacgagggcaacgcagataacgacagtgcaacgggaatagcaactgaaaccaaatcctcttctgcacccaacgaagggttgaccaaagcggccatgatggcaatgtctgagtatgaagatcggttgtcatctggtctggtcagcccggccccgagcttttatagcaaggaatatgacaatgaaggtacagtggactacagtgaaacctcaagccttgcagatccctgctccccgagtcctggtgcgagtggatctgcaggcaaatctggtgacagcggngatcggcctgggcagaaacgttttcgcactcaaatgaccaatctgcagctgaaggtcctcaagtcatgctttaatgactacaggacacccactatgctagaatgtgaggtcctgggcaatgacattggactgccaaagagagtcgttcaggtctggttccagaatgcccgggcaaaagaaaagaagtccaagttaagcatggccaagcattttggtataaaccaaacgagttatgagggacccaaaacagagtgcactttgtgtggcatcaagtacagcgctcggctgtctgtacgtgaccatatcttttcccaacagcatatctccaaagttaaagacaccattggaagccagctggacaaggagaaagaatactttgacccagccaccgtacgtcagttgatggctcaacaagagttggaccggattaaaaaggccaacgaggtccttggactggcagctcagcagcaagggatgtttgacaacacccctcttcaggcccttaaccttcctacagcatatccagcgctccagggcattcctcctgtgttgctcccgggcctcaacagcccctccttgccaggctttactccatccaacacagctttaacgtctcctaagccgaacttgatgggtctgcccagcacaactgttccttcccctggcctccccacttctggattaccaaataaaccgtcctcagcgtcgctgagctccccaaccccagcacaagccacgatggcgatgggccctcagcaacccccccagcagcagcagcagcagcagcaaccacaggtgcagcagcctcccccgccgccagcagcccagccgccacccacaccacagctcccactgcaacagcagcagcaacgcaaggacaaagacagtgagaaagtaaaggagaaggaaaaggcacacaaagggaaaggggaacccctgcctgtccccaagaaggagaaaggagaggcccccacggcaactgcagccacgatctcagccccgctgcccaccatggagtatgcggtagaccctgcacagctgcaggccctgcaggccgcgttgacttcggaccccacagcattgctcacaagccagttccttccttactttgtaccaggcttttctccttattatgctccccagatccctggcgccctgcagagcgggtacctgcagcctatgtatggcatggaaggcctgttcccctacagccctgcactgtcgcaggccctgatggggctgtccccaggctccctactgcagcagtaccagcaataccagcagagtctgcaggaggcaattcagcagcagcagcagcggcaactacagcagcagcagcagcaaaaagtgcagcagcagcagcccaaagcaagccaaaccccagtcccccccggggctccttccccagacaaagaccctgccaaagaatcccccaaaccagaagaacagaaaaacaccccccgtgaggtgtcccccctcctgccgaaactccctgaagagccagaagcagaaagcaaaagtgcggactccctctacgaccccttcattgttccaaaggtgcagtacaagttggtctgccgcaagtgccaggcgggcttcagcgacgaggaggcagcgaggagccacctgaagtccctctgcttcttcggccagtctgtggtgaacctgcaagagatggtgcttcacgtccccaccggcggcggcggcggtggcagtggcggcggcggcggcggtggcggcggcggcggcggcggcggctcgtaccactgcctggcgtgcgagagcgcgctctgtggggaggaagctctgagtcaacatctcgagtcggccttgcacaaacacagaacaatcacgagagcagcaagaaacgccaaagagcaccctagtttattacctcactctgcctgcttccccgatcctagcaccgcatctacctcgcagtctgccgctcactcaaacgacagcccccctcccccgtcggccgccgccccctcctccgcttccccccacgcctccaggaagtcttggccgcaagtggtctcccgggcttcggcagcgaagcccccttcttttcctcctctctcctcatcttcaacggttacctcaagttcatgcagcacctcaggggttcagccctcgatgccaacagacgactattcggaggagtctgacacggatctcagccaaaagtccgacggaccggcgagcccggtggagggtcccaaagaccccagctgccccaaggacagtggtctgaccagtgtaggaacggacaccttcagattgtaagctttgaagatgaacaatacaaacaaatgaatttaaatacaaaaattaataacaaaccaatttcaaaaatagactaactgcaattccaaagcttctaaccaaaaaacaaaaaaaaaaaaaaaaagaaaaaaaagaaaaa

SEQ ID NO: 424711 - DNA, 11887 bp, Homo sapiens
  misc_feature (280)..(280): n is a, c, g, or t
  misc_feature (496)..(496): n is a, c, g, or t
  misc_feature (793)..(793): n is a, c, g, or t
  misc_feature (887)..(887): n is a, c, g, or t
  misc_feature (1012)..(1012): n is a, c, g, or t
  misc_feature (1096)..(1096): n is a, c, g, or t
  misc_feature (2408)..(2408): n is a, c, g, or t
  misc_feature (2497)..(2497): n is a, c, g, or t
  misc_feature (2944)..(2944): n is a, c, g, or t
  misc_feature (2973)..(2973): n is a, c, g, or t
  misc_feature (3003)..(3003): n is a, c, g, or t
  misc_feature (9497)..(9497): n is a, c, g, or t
ccgcgcgtccctgtgcgtccccgggtccctgcgggcgggcgggcgcggtcgccgccgagcaacccggcctgcgcccggcacgactgtagatgtcaggctttgcccggggagccgagcggcagcggggctgtgagtttcaaattaaccttccgctttgttgctgtgtaatgtggatccccgaaggccccccgccccgcccgccccccttccccgggcggtgcgcgctgcaaactgcgagttgggcttcatttacataaagcgattccgggcgggcggcggnagaggaggaggcggcggcggcgggcaggccggggacccggacgccagcgccgcgccccgtgggtgaatccccgccgcgtcccggggacctccctccggggacgggccgaccgccagccctgccgccaccatgagctcccctcccctgtctccgggccccctgctcctgaccagagccacctccgagtcctggggccagcgggaggtggggagcatnccgcctggggtgggtgagctcggggctcgggtgccactggaatttcccgttgttgcgcatggcggcgcggcccccggacctgcaagtgccgcctccctccggaggtgcgcggaggcttggtgtgccaggtccgagcctccgtactgggtgcaatgaaagctccacgcaggccttaccatggaaggctgtgactcgcccgtcgtctcggggaaggacaatgggtgcggtatccctcagcaccagcaatggactgaactcaacagcacccacctccctgacaaacccagtagcatggancagtccacaggcgagagccacgggcccttggacagcctgagggcccccttcaatgagcgcctcgcggagagcaccgcgtcggccgggccccccnccgagcccgccagcaaggaggtcacctgcaacgaatgttcggcctcctttgccagcctccagacctacatggagcaccactgccccagcgcgcgccccccgccacccctgagagaggagagcgcnagcgacaccggtgaggagggggacgaggagagtgacgtggagaacctggccggggagatcgtctaccagccggacggctccgcntacattgtggagagcctgagccagctgacccagggcgggggcgcctgtgggagtggcagtggcagtgggcctctcccctcgcttttcctgaactctctccctggcgcggggggcaagcaaggggacccttcgtgtgctgcacccgtgtacccgcagatcatcaacactttccacatagcctcatccttcgggaaatggtttgagggcccagaccaggctttcccgaatacctcagccctggcggggctcagccccgtcctgcacagcttccgcgtgtttgacgtgcgacacaaaagcaacaaggattacctgaacagcgacggttctgccaaaagctcctgcgtatccaaagatgttcccaacaatgtggacctgtccaaattcgatggctttgtgctctatggcaagaggaagcccatcctgatgtgtttcttgtgcaaactctcctttgggtacgtccgttcgtttgtgacccacgcggtgcatgaccatcgaatgaccctgagcgaagacgagcggaaaattcttagcaataagaacatctccgctatcatccaagggatcggcaaagacaaggaaccccttgtaagttttctggaaccaaaaaacaaaaactttcaacaccctttagtttccacagctaacctcataggccccggacacagtttttatggtaaatttagtggcattcgaatggaaggggaggaagctctcccagcgggctccgccgctggccccgagcagccccaggctggtctcttgacccccagcaccctgttgaaccttggcgggctcaccagctcggtactgaagacccccattacctcagtccccctggggcctctggcttccagtcctaccaaatcctcagagggcaaggactctggggcggcagaaggagagaagcaggaagtgggcgacggggattgcttctctgagaaggtagagccagccgaagaggaggcggaggaggaagaggaggaggaagaggcggaggaggaggaggaagaagaggaggaggaagaagaggaggaggaagacgagggttgcaaaggactctttccaagcgagttggatgaggaactggaggacaggccccatgaggagcctggggccgcagcaggtagtagcagcaaaaaggaccttgctctctcaaaccaaagcatttctaactcccccttaatgcctaacgtgctccagaccctgtcgaggggcacagcttctactagttctaattctgcttcttcctttgttgtctttgatggtgcgaacaggaggaatcgtttaagctttaacagtgagggcgtcaggnccaatgtggcagagggcggcaggaggctggacttcgctgacgaaagtgccaataaagacaatgccacagcaccagaaccaaatgaaagnacagagggtgacgatgggggcttcgttccccatcaccagcacgctggctccctctgcgagcttggggttggggagtgcccctcggggagtggcgtggagtgccccaaatgcgacacggtcctgggctcctcccgctcgctgggcggccacatgaccatgatgcattctcgtaactcgtgtaagacactcaagtgccccaagtgcaactggcactataagtaccagcagaccctggaggcacacatgaaggagaagcacccggagccggggggctcctgtgtctactgcaaaagcgggcagccccacccccggctggcacgaggcgagagctacacgtgtggttacaagcctttccgctgcgaggtgtgtaactactccacaactaccaaaggcaacctcagtattcatatgcagtctgacaagcatctcaacaacatgcagaacctncagaatggagggggggagcaggtcttcanccacactgccggggcggcggcggcggcggnggctgcggcggcggcggcagccaatatcagtagctcctgcggggccccctcgcccaccaaaccaaaaaccaaacccacctggcggtgcgaggtgtgtgattatgagaccaacgtggccaggaacctccgcattcacatgaccagtgagaagcacatgcataacatgatgttactgcaacagaacatgacccagatccaacacaaccgccaccgtgggcctcggcagcctgccctcacccgccgaggccgagctctaccaatactacctggcccagaacatgaacctgcccaacctgaagatggacagtgctgcctcggacgcccagttcatgatgagcggattccagctggatcccgccgggcccatggccgccatgacgcctgctctagtgggcggtgagatccccctagacatgcggctcgggggcgggcagctggtgtcagaggagctgatgaacctgggcgagagcttcatccagaccaacgacccgtcgctgaagctcttccagtgcgccgtctgcaacaagttcacgacggacaacctggacatgctgggcctgcacatgaacgtggagcgcagcctgtcggaggacgagtggaaggcggtgatgggggactcataccagtgcaagctctgccgctacaacacccagctcaaggccaacttccagctgcactgcaagacagacaagcacgtgcagaagtaccagctggtggcccacatcaaggagggcggcaaggccaacgagtggaggctcaagtgtgtggccatcggcaaccccgtgcacctcaagtgcaacgcctgtgactactacaccaacagcctggagaagctgcggctgcacacggtcaactccaggcacgaggccagcctgaagttgtacaagcacctgcagcagcatgagagtggtgtagaaggtgagagctgctactaccactgcgttctgtgcaactactccaccaaggccaagctcaacctcatccagcatgtgcgctccatgaagcaccagcgaagcgagagcctgcgaaagctgcagcggctgcagaagggccttccagaggaggacgaggacctggggcagatcttcaccatccgcaggtgcccctccacggacccagaagaagccattgaagatgttgaaggacccagtgaaacagctgctgatccagaggagcttgctaaggaccaagagggcggagcatcgtccagccaagcagagaaggagctgacagattctcctgcaacctccaaacgcatctccttcccaggtagctcagagtctcccctctcttcgaagcgaccaaaaacagctgaggagatcaaaccggagcagatgtaccagtgtccctactgcaagtacagtaatgccgatgtcaaccggctccgggtgcatgccatgacgcagcactcggtgcaacccatgcttcgctgccccctgtgccaggacatgctcaacaacaagatccacctccagctgcacctcacccacctccacagcgtggcacctgactgcgtggagaagctcattatgacggtgaccacccctgagatggtgatgccaagcagcatgttcctcccagcagctgttccagatcgagatgggaattccaatttggaagaggcaggaaagcagcctgaaacctcagaggatctgggaaagaacatcttgccatccgcaagcacagagcaaagcggagatttgaaaccatcccctgctgacccaggctctgtgagagaagactcaggcttcatctgctggaagaaggggtgcaaccaggttttcaaaacttctgctgcccttcagacgcattttaatgaagtgcatgccaagaggcctcagctgccggtgtcagatcgccatgtgtacaagtaccgctgtaatcagtgtagcctggccttcaagaccattgaaaagttgcagctccattctcagtaccatgtgatcagagctgccaccatgtgctgtctttgtcagcgcagtttccgaactttccaggctctgaagaagcaccttgagacaagccacctggagctgagtgaggctgacatccaacagctttatggtggcctgctggccaatggggacctcctggcaatgggagaccccactctggctgaggaccataccataattgttgaggaagacaaggaggaagagagtgacttggaagataaacagagcccaacgggcagtgactctgggtcagtacaagaagactcgggctcagagccaaagagagctctgcctttcagaaaaggtcccaattttactatggaaaagttcctagacccttctcgcccttacaagtgtaccgtctgcaaggaatctttcactcaaaagaatatcctgctagtacactacaattctgtctcccacctgcataagttaaagagagcccttcaagaatcagcaaccggtcagccagaacccaccagcagcccagacaacaaaccttttaagtgtaacacttgtaatgtggcctacagccagagttccactctggagatccatatgaggtctgtgttacatcaaaccaaggcccgggcagccaagctggaggctgcaagtggcagcagcaatgggactgggaacagcagcagtatttccttgagctcctccacgccaagtcctgtgagcaccagtggcagtaacacctttaccacctccaatccaagcagtgctggcattgctccaagctctaacttactaagccaagtgcccactgagagtgtagggatgccacccctggggaatcctattggtgccaacattgcttccccttcagagcccaaagaggccaatcggaagaaactggcagatatgattgcatccaggcagcagcaacaacagcagcagcaacagcaacaacaacaacaacaacaacaacaacaagcacaaacgctggcccaggcccaggctcaagttcaagctcacctgcagcaggagctgcagcaacaggctgccctgatccagtctcagctgtttaaccccaccctccttcctcacttccccatgacaactgagaccctgctgcaactacagcagcagcagcacctcctcttccctttctacatccccagtgctgagttccagcttaaccccgaggtgagcttgccagtgaccagtggggcactgacactgactgggacaggcccaggcctgctggaagatctgaaggctcaggttcaggtcccacagcagagccatcagcagatcttgccgcagcagcagcagaaccaactctctatagcccagagtcactctgccctccttcagccaagccagcaccccgaaaagaagaacaaattggtcatcaaagaaaaggaaaaagaaagccagagagagagggacagcgccgaggggggagagggcaacaccggtccgaaggaaacactgccagatgccttgaaggccaaagagaagaaagagttggcaccagggggtggttctgagccttccatgctccctccacgcattgcttcagatgccagagggaacgccaccaaggccctgctggagaactttggctttgagttggtcatccagtataatgagaacaagcagaaggtgcagaaaaagaatgggaagactgaccagggagagaacctggaaaagctcgagtgtgactcctgcggcaagttgttttccaacatcttgattttaaagagtcatcaagagcacgttcatcagaattactttcctttcaaacagctcgagaggtttgccaaacagtacagagaccactacgataaactgtacccactgaggccccagaccccagagccaccaccacctccccctccaccccctccacccccacttccggcagcgccgcctcagccggcgtccacaccagccatccccgcatcagccccacccatcacctcacctacaattgcaccggcccagccatcagtgccgctcacccagctctccatgccgatggagctgcccatcttctcgccgctgatgatgcagacgatgccgctgcagaccttgccggctcagctacccccgcagctgggacctgtggagcctctgcctgcggacctggcccaactctaccagcatcagctcaatccaaccctgctccagcagcagaacaagaggcctcgcaccaggatcacagatgatcagctccgagtcttgcggcaatattttgacattaacaactcccccagtgaagagcaaataaaagagatggcagacaagtccgggttgccccagaaagtgatcaagcactggttcaggaacactctcttcaaagagaggcagcgtaacaaggactccccttacaacttcagtaatcctcctatcaccagcctggaggagctcaagattgactcccggcccccttcgccggaacctccaaagcaggagtactggggaagcaagaggtcttcaagaacaaggtttacggactaccagctgagggtcttacaggacttcttcgatgccaatgcttacccaaaggatgatgaatttgagcaactctctaatttactgaaccttccaacccgagtgatagtggtgtggtttcagaatgcccgacagaaggccaggaagaattatgagaatcagggagagggcaaagatggagagcggcgtgagcttacaaatgatagatacattcgaacaagcaacttgaactaccagtgcaaaaaatgtagcctggtgtttcagcgcatctttgatctcatcaagcaccagaagaagctgtgttacaaggatgaggatgaggaggggcaggacgacagccaaaatgaggattccatggatgccatggaaatcctgacgcctaccagctcatcctgcagtaccccgatgccctcacaggcttacagcgccccagcaccatcagccaataatacagcttcctccgctttcttgcagcttacagcggaggctgaggaactggccaccttcaattcaaaaacagaggcaggcgatgagaaaccaaagctggcggaagctcccagtgcacagccaaaccaaacccaagaaaagcaaggacaaccaaagccagagctgcagcagcaagagcagcccgagcagaagaccaacactccccagcagaagctcccccagctggtgtccctgccttcgttgccacagcctcctccacaagcgccccctccacagtgccccttaccccagtcgagccccagtccttcccagctctcccacctgcccctcaagcccctccacacatcaactcctcaacagctcgcaaacctacctcctcagctaatcccctaccagtgtgaccagtgtaagttggcatttccgtcatttgagcactggcaggagcatcagcagctccacttcctgagcgcgcagaaccagttcatccacccccagtttttggacaggtccctggatatgcctttcatgctctttgatcccagtaacccactcctggccagccagctgctctctggggccatacctcagattccagcaagctcagccacttctccttcaactccaacctccacaatgaacactctcaagaggaagctggaggaaaaggccagtgcaagccctggcgaaaacgacagtgggacaggaggagaagagcctcagagagacaagcgtttgagaacaaccatcacaccggaacaactagaaattctctaccagaagtatctactggattccaatccgactcgaaagatgttggatcacattgcacacgaggtgggcttgaagaaacgtgtggtacaagtctggtttcagaacacccgagctcgggaaaggaaaggacagttccgggctgtaggcccagcgcaggcccacaggagatgccctttttgcagagcgctcttcaaagccaagactgctcttgaggctcatatccggtcccgtcactggcatgaagccaagagagctggctacaacctaactctgtctgcgatgctcttagactgtgatgggggactccagatgaaaggagatatttttgacggaactagcttttcccacctacccccaagcagtagtgatggtcagggtgtccccctctcacctgtgagtaaaaccatggaattgtcacccagaactcttctaagcccttcctccattaaggtggaagggattgaagactttgaaagcccctccatgtcctcagttaatctaaactttgaccaaactaagctggacaacgatgactgttcctctgtcaacacagcaatcacagataccacaactggagacgagggcaacgcagataacgacagtgcaacgggaatagcaactgaaaccaaatcctcttctgcacccaacgaagggttgaccaaagcggccatgatggcaatgtctgagtatgaagatcggttgtcatctggtctggtcagcccggccccgagcttttatagcaaggaatatgacaatgaaggtacagtggactacagtgaaacctcaagccttgcagatccctgctccccgagtcctggtgcgagtggatctgcaggcaaatctggtgacagcggngatcggcctgggcagaaacgttttcgcactcaaatgaccaatctgcagctgaaggtcctcaagtcatgctttaatgactacaggacacccactatgctagaatgtgaggtcctgggcaatgacattggactgccaaagagagtcgttcaggtctggttccagaatgcccgggcaaaagaaaagaagtccaagttaagcatggccaagcattttggtataaaccaaacgagttatgagggacccaaaacagagtgcactttgtgtggcatcaagtacagcgctcggctgtctgtacgtgaccatatcttttcccaacagcatatctccaaagttaaagacaccattggaagccagctggacaaggagaaagaatactttgacccagccaccgtacgtcagttgatggctcaacaagagttggaccggattaaaaaggccaacgaggtccttggactggcagctcagcagcaagggatgtttgacaacacccctcttcaggcccttaaccttcctacagcatatccagcgctccagggcattcctcctgtgttgctcccgggcctcaacagcccctccttgccaggctttactccatccaacacagctttaacgtctcctaagccgaacttgatgggtctgcccagcacaactgttccttcccctggcctccccacttctggattaccaaataaaccgtcctcagcgtcgctgagctccccaaccccagcacaagccacgatggcgatgggccctcagcaacccccccagcagcagcagcagcagcagcaaccacaggtgcagcagcctcccccgccgccagcagcccagccgccacccacaccacagctcccactgcaacagcagcagcaacgcaaggacaaagacagtgagaaagtaaaggagaaggaaaaggcacacaaagggaaaggggaacccctgcctgtccccaagaaggagaaaggagaggcccccacggcaactgcagccacgatctcagccccgctgcccaccatggagtatgcggtagaccctgcacagctgcaggccctgcaggccgcgttgacttcggaccccacagcattgctcacaagccagttccttccttactttgtaccaggcttttctccttattatgctccccagatccctggcgccctgcagagcgggtacctgcagcctatgtatggcatggaaggcctgttcccctacagccctgcactgtcgcaggccctgatggggctgtccccaggctccctactgcagcagtaccagcaataccagcagagtctgcaggaggcaattcagcagcagcagcagcggcaactacagcagcagcagcagcaaaaagtgcagcagcagcagcccaaagcaagccaaaccccagtcccccccggggctccttccccagacaaagaccctgccaaagaatcccccaaaccagaagaacagaaaaacaccccccgtgaggtgtcccccctcctgccgaaactccctgaagagccagaagcagaaagcaaaagtgcggactccctctacgaccccttcattgttccaaaggtgcagtacaagttggtctgccgcaagtgccaggcgggcttcagcgacgaggaggcagcgaggagccacctgaagtccctctgcttcttcggccagtctgtggtgaacctgcaagagatggtgcttcacgtccccaccggcggcggcggcggtggcagtggcggcggcggcggcggtggcggcggcggcggcggcggcggctcgtaccactgcctggcgtgcgagagcgcgctctgtggggaggaagctctgagtcaacatctcgagtcggccttgcacaaacacagaacaatcacgagagcagcaagaaacgccaaagagcaccctagtttattacctcactctgcctgcttccccgatcctagcaccgcatctacctcgcagtctgccgctcactcaaacgacagccccccacgcctccaggaagtcttggccgcaagtggtctcccgggcttcggcagcgaagcccccttcttttcctcctctctcctcatcttcaacggttacctcaagttcatgcagcacctcaggggttcagccctcgatgccaacagacgactattcggaggagtctgacacggatctcagccaaaagtccgacggaccggcgagcccggtggagggtcccaaagaccccagctgccccaaggacagtggtctgaccagtgtaggaacggacaccttcagattgtaagctttgaagatgaacaatacaaacaaatgaatttaaatacaaaaattaataacaaaccaatttcaaaaatagactaactgcaattccaaagcttctaaccaaaaaacaaaaaaaaaaaaaaaaagaaaaaaaagaaaaa

SEQ ID NO: 424712 - DNA, 743 bp, Homo sapiens
cactcatcagctcccacttccagcgcgtccctccgaccgctgcagccgccaccgccgccgcctcctcctcctcctcctcccggcggtggcggcggcggcggcggcggcggctcgtaccactgcctggcgtgcgagagcgcgctctgtggggaggaagctctgagtcaacatctcgagtcggccttgcacaaacacagaacaatcacgagagcagcaagaaacgccaaagagcaccctagtttattacctcactctgcctgcttccccgatcctagcaccgcatctacctcgcagtctgccgctcactcaaacgacagccccccacgcctccaggaagtcttggccgcaagtggtctcccgggcttcggcagcgaagcccccttcttttcctcctctctcctcatcttcaacggttacctcaagttcatgcagcacctcaggggttcagccctcgatgccaacagacgactattcggaggagtctgacacggatctcagccaaaagtccgacggaccggcgagcccggtggagggtcccaaagaccccagctgccccaaggacagtggtctgaccagtgtaggaacggacaccttcagattgtaagctttgaagatgaacaatacaaacaaatgaatttaaatacaaaaattaataacaaaccaatttcaaaaatagactaactgcaattccaaagcttctaaccaaaaaacaaaaaaaaaaaaaaaaagaaaaaaaagaaaaa

SEQ ID NO: 424713 - DNA, 2786 bp, Homo sapiens
tcatcagtagggaagtagctatggcagtgcctgatacaaaataaactccaaatgtgtatttattagatggttggatggaagttatttgcgtgtgaaagcgcgttttacccgaaggcgctctgtgagggccagcgggtccccttcggccctggagccggggtcacacgctccccaccgcgtgcggtcacgagacgcccccaagggagtatcctggtacccggaagccgcgactcctggccctgagcccgggcttagccttcgggtccacgtggccggaggccggcagctgattggacgcgggccgccccaccccctggccgtcgcgggacccgcaggactgagaccatggaggcggtggcggtggccgcggcggtgggggtccttctcctggccggggccgggggcgcggcaggcgacgaggcccgggaggcggcggccgtgcgggcgctcgtggcccggctgctggggccaggccccgcggccgacttctccgtgtcggtggagcgcgctctggctgccaagccgggcttggacacctacagcctgggcggcggcggcgcggcgcgcgtgcgggtgcgcggctccacgggcgtggcggccgccgcggggctgcaccgctacctgcgcgacttctgtggctgccacgtggcctggtccggctctcagctgcgcctgccgcggccactgccagccgtgccgggggagctgaccgaggccacgcccaacaggtaccgctattaccagaatgtgtgcacgcaaagctactccttcgtgtggtgggactgggcccgctgggagcgagagatagactggatggcgctgaatggcatcaacctggcactggcctggagcggccaggaggccatctggcagcgggtgtacctggccttgggcctgacccaggcagagatcaatgagttctttactggtcctgccttcctggcctgggggcgaatgggcaacctgcacacctgggatggccccctgcccccctcctggcacatcaagcagctttacctgcagcaccgggtcctggaccagatgcgctccttcggcatgaccccagtgctgcctgcattcgcggggcatgttcccgaggctgtcaccagggtgttccctcaggtcaatgtcacgaagatgggcagttggggccactttaactgttcctactcctgctccttccttctggctccggaagaccccatattccccatcatcgggagcctcttcctgcgagagctgatcaaagagtttggcacagaccacatctatggggccgacactttcaatgagatgcagccaccttcctcagagccctcctaccttgccgcagccaccactgccgtctatgaggccatgactgcagtggatactgaggctgtgtggctgctccaaggctggctcttccagcaccagccgcagttctgggggcccgcccagatcagggctgtgctgggagctgtgccccgtggccgcctcctggttctggacctgtttgctgagagccagcctgtgtatacccgcactgcctccttccagggccagcccttcatctggtgcatgctgcacaactttgggggaaaccatggtctttttggagccctagaggctgtgaacggaggcccagaagctgcccgcctcttccccaactccaccatggtaggcacgggcatggcccccgagggcatcagccagaacgaagtggtctattccctcatggctgagctgggctggcgaaaggacccagtgccagatttggcagcctgggtgaccagctttgccgcccggcggtatggggtctcccacccggacgcaggggcagcgtggaggctactgctccggagtgtgtacaactgctccggggaggcctgcaggggccacaatcgtagcccgctggtcaggcggccgtccctacagatgaataccagcatctggtacaaccgatctgatgtgtttgaggcctggcggctgctgctcacatctgctccctccctggccaccagccccgccttccgctacgacctgctggacctcactcggcaggcagtgcaggagctggtcagcttgtactatgaggaggcaagaagcgcctacctgagcaaggagctggcctccctgttgagggctggaggcgtcctggcctatgagctgctgccggcactggacgaggtgctggctagtgacagccgcttcttgctgggcagctggctagagcaggcccgagcagcggcagtcagtgaggccgaggccgatttctacgagcagaacagccgctaccagctgaccttgtgggggccagaaggcaacatcctggactatgccaacaagcagctggcggggttggtggccaactactacacccctcgctggcggcttttcctggaggcgctggttgacagtgtggcccagggcatccctttccaacagcaccagtttgacaaaaatgtcttccaactggagcaggccttcgttctcagcaagcagaggtaccccagccagccgcgaggagacactgtggacctggccaagaagatcttcctcaaatattaccccggctgggtggccggctcttggtgatagattcgccaccactgggccttgttttccgctaattccagggcagattccagggcccagagctggacagacatcacaggataacccaggcctgggaggaggccccacggcctgctggtggggtctgacctggggggattggagggaaatgacctgccctccaccaccacccaaagtgtgggattaaagtactgttttctttccactta

SEQ ID NO: 424714 - DNA, 1445 bp, Homo sapiens
tcatcagtagggaagtagctatggcagtgcctgatacaaaataaactccaaatgtgtatttattagatggttggatggaagttatttgcgtgtgaaagcgcgttttacccgaaggcgctctgtgagggccagcgggtccccttcggccctggagccggggtcacacgctccccaccgcgtgcggtcacgagacgcccccaagggagtatcctggtacccggaagccgcgactcctggccctgagcccgggcttagccttcgggtccacgtggccggaggccggcagctgattggacgcgggccgccccaccccctggccgtcgcgggacccgcaggactgagaccatggaggcggtggcggtggccgcggcggtgggggtccttctcctggccggggccgggggcgcggcaggcgacgaggcccgggaggcggcggccgtgcgggcgctcgtggcccggctgctggggccaggccccgcggccgacttctccgtgtcggtggagcgcgctctggctgccaagccgggcttggacacctacagcctgggcggcggcggcgcggcgcgcgtgcgggtgcgcggctccacgggcgtggcggccgccgcggggctgcaccgctacctgcgcgacttctgtggctgccacgtggcctggtccggctctcagctgcgcctgccgcggccactgccagccgtgccgggggagctgaccgaggccacgcccaacaggtaccgctattaccagaatgtgtgcacgcaaagctactccttcgtgtggtgggactgggcccgctgggagcgagagatagactggatggcgctgaatggcatcaacctggcactggcctggagcggccaggaggccatctggcagcgggtgtacctggccttgggcctgacccaggcagagatcaatgagttctttactggtcctgccttcctggcctgggggcgaatgggcaacctgcacacctgggatggccccctgcccccctcctggcacatcaagcagctttacctgcagcaccgggtcctggaccagatgcgctccttcggcatgaccccagtgctgcctgcattcgcggggcatgttcccgaggctgtcaccaggtgaggttccgctcaccccgaggccccacggcctgctggtggggtctgacctggggggattggagggaaatgacctgccctccaccaccacccaaagtgtgggattaaagtactgttttctttccacttaaactgatgagtcccctgggtctgtcaaaatgagaaggtcactgctgccacgcttgggaggactcagggctatagcatggccctggggtgggacctgttctcccatcccttgcctcacgtccctgtttttgtttgtttgtttgtttgtgacggagccttggtctgttgcccaggcttgagtacaatggcacagtctcggctcactgc

SEQ ID NO: 424715 - DNA, 2638 bp, Homo sapiens
tcatcagtagggaagtagctatggcagtgcctgatacaaaataaactccaaatgtgtatttattagatggttggatggaagttatttgcgtgtgaaagcgcgttttacccgaaggcgctctgtgagggccagcgggtccccttcggccctggagccggggtcacacgctccccaccgcgtgcggtcacgagacgcccccaagggagtatcctggtacccggaagccgcgactcctggccctgagcccgggcttagccttcgggtccacgtggccggaggccggcagctgattggacgcgggccgccccaccccctggccgtcgcgggacccgcaggactgagaccatggaggcggtggcggtggccgcggcggtgggggtccttctcctggccggggccgggggcgcggcaggcgacgaggcccgggaggcggcggccgtgcgggcgctcgtggcccggctgctggggccaggccccgcggccgacttctccgtgtcggtggagcgcgctctggctgccaagccgggcttggacacctacagcctgggcggcggcggcgcggcgcgcgtgcgggtgcgcggctccacgggcgtggcggccgccgcggggctgcaccgctacctgcgcgacttctgtggctgccacgtggcctggtccggctctcagctgcgcctgccgcggccactgccagccgtgccgggggagctgaccgaggccacgcccaacaggtgtacctggccttgggcctgacccaggcagagatcaatgagttctttactggtcctgccttcctggcctgggggcgaatgggcaacctgcacacctgggatggccccctgcccccctcctggcacatcaagcagctttacctgcagcaccgggtcctggaccagatgcgctccttcggcatgaccccagtgctgcctgcattcgcggggcatgttcccgaggctgtcaccagggtgttccctcaggtcaatgtcacgaagatgggcagttggggccactttaactgttcctactcctgctccttccttctggctccggaagaccccatattccccatcatcgggagcctcttcctgcgagagctgatcaaagagtttggcacagaccacatctatggggccgacactttcaatgagatgcagccaccttcctcagagccctcctaccttgccgcagccaccactgccgtctatgaggccatgactgcagtggatactgaggctgtgtggctgctccaaggctggctcttccagcaccagccgcagttctgggggcccgcccagatcagggctgtgctgggagctgtgccccgtggccgcctcctggttctggacctgtttgctgagagccagcctgtgtatacccgcactgcctccttccagggccagcccttcatctggtgcatgctgcacaactttgggggaaaccatggtctttttggagccctagaggctgtgaacggaggcccagaagctgcccgcctcttccccaactccaccatggtaggcacgggcatggcccccgagggcatcagccagaacgaagtggtctattccctcatggctgagctgggctggcgaaaggacccagtgccagatttggcagcctgggtgaccagctttgccgcccggcggtatggggtctcccacccggacgcaggggcagcgtggaggctactgctccggagtgtgtacaactgctccggggaggcctgcaggggccacaatcgtagcccgctggtcaggcggccgtccctacagatgaataccagcatctggtacaaccgatctgatgtgtttgaggcctggcggctgctgctcacatctgctccctccctggccaccagccccgccttccgctacgacctgctggacctcactcggcaggcagtgcaggagctggtcagcttgtactatgaggaggcaagaagcgcctacctgagcaaggagctggcctccctgttgagggctggaggcgtcctggcctatgagctgctgccggcactggacgaggtgctggctagtgacagccgcttcttgctgggcagctggctagagcaggcccgagcagcggcagtcagtgaggccgaggccgatttctacgagcagaacagccgctaccagctgaccttgtgggggccagaaggcaacatcctggactatgccaacaagcagctggcggggttggtggccaactactacacccctcgctggcggcttttcctggaggcgctggttgacagtgtggcccagggcatccctttccaacagcaccagtttgacaaaaatgtcttccaactggagcaggccttcgttctcagcaagcagaggtaccccagccagccgcgaggagacactgtggacctggccaagaagatcttcctcaaatattaccccggctgggtggccggctcttggtgatagattcgccaccactgggccttgttttccgctaattccagggcagattccagggcccagagctggacagacatcacaggataacccaggcctgggaggaggccccacggcctgctggtggggtctgacctggggggattggagggaaatgacctgccctccaccaccacccaaagtgtgggattaaagtactgttttctttccactta

SEQ ID NO: 424716 - DNA, 2207 bp, Homo sapiens
tcatcagtagggaagtagctatggcagtgcctgatacaaaataaactccaaatgtgtatttattagatggttggatggaagttatttgcgtgtgaaagcgcgttttacccgaaggcgctctgtgagggccagcgggtccccttcggccctggagccggggtcacacgctccccaccgcgtgcggtcacgagacgcccccaagggagtatcctggtacccggaagccgcgactcctggccctgagcccgggcttagccttcgggtccacgtggccggaggccggcagctgattggacgcgggccgccccaccccctggccgtcgcgggacccgcaggactgagaccatggaggcggtggcggtggccgcggcggtgggggtccttctcctggccggggccgggggcgcggcaggcgacgaggcccgggaggcggcggccgtgcgggcgctcgtggcccggctgctggggccaggccccgcggccgacttctccgtgtcggtggagcgcgctctggctgccaagccgggcttggacacctacagcctgggcggcggcggcgcggcgcgcgtgcgggtgcgcggctccacgggcgtggcggccgccgcggggctgcaccgctacctgcgcgacttctgtggctgccacgtggcctggtccggctctcagctgcgcctgccgcggccactgccagccgtgccgggggagctgaccgaggccacgcccaacaggtaccgctattaccagaatgtgtgcacgcaaagctactccttcgtgtggtgggactgggcccgctgggagcgagagatagactggatggcgctgaatggcatcaacctggcactggcctggagcggccaggaggccatctggcagcgggtgtacctggccttgggcctgacccaggcagagatcaatgagttctttactggtcctgccttcctggcctgggggcgaatgggcaacctgcacacctgggatggccccctgcccccctcctggcacatcaagcagctttacctgcagcaccgggtcctggaccagatgcgctccttcggcatgaccccagtgctgcctgcattcgcggggcatgttcccgaggctgtcaccaggaggctgagacaggagaattgcttaaacctgggaggcagacgttgcagtgagtcaagatcacgccattgcactccagcctgggtgacgagcgaaactctgtctcaaacaaacaaacaagctctggacgtaggcctgggtttgatttctgactctgctactaattagctgtgtgacttcgggcagatgacatgactgctctgtgcctcagtttccttacttgtaaaatgggatctctacccacttcgctgtagggtttgtaattatctctcgatctatctgtgactttgcacagagtgctagcaaatggcagcccttgggagtggcagcaggggtgctccagtgtcccttgtccctcctgttcctctgtgcttcccagccatcctctcacatgtggttgggaaaagtcttcaaggctcacctgagacctcccctccttcaggaagccttgctagtgccccgcatgacctcctttgcacctgctaatgtctggctcccatactctcgtaggacttaatgcatgccagtggcctccctgcccgcctctttgcccccatcaccaggtggcaggaaactcactcattcattcaataaacttggtccagctgtctgaggctgccagaactggctgtgctgggtcctgggaggcggcaagaaaggtgcccaagggcttacccctgataggagagatatgttggctgaaggatacaatgtggggacaaggacaggaatatatgtgggttccgctctcctctgccgggagagaggggcaggaagggctcagggcagagcccagccttgaaaaatgagtgttgcttggacggacgcttggctaatgcttgtaatcctagcgttttgggaggctgaggcgtatggatcacctgcggtcaggagttaaagaccagcctggccaacatggcgaaaccccatctctactaaaagtacaaaaattagccaggcgtggtggcgggctcctgtaatcccagctactcggtaggctgaggcatgagaatctcttgaagccaggggccagagactgcagtgagccgagatcacaccacttcactccagcctgggtgacagagtgagactccgtctca

SEQ ID NO: 424717 - DNA, 1190 bp, Homo sapiens
tcatcagtagggaagtagctatggcagtgcctgatacaaaataaactccaaatgtgtatttattagatggttggatggaagttatttgcgtgtgaaagcgcgttttacccgaaggcgctctgtgagggccagcgggtccccttcggccctggagccggggtcacacgctccccaccgcgtgcggtcacgagacgcccccaagggagtatcctggtacccggaagccgcgactcctggccctgagcccgggcttagccttcgggtccacgtggccggaggccggcagctgattggacgcgggccgccccaccccctggccgtcgcgggacccgcaggactgagaccatggaggcggtggcggtggccgcggcggtgggggtccttctcctggccggggccgggggcgcggcaggcgacgaggcccgggaggcggcggccgtgcgggcgctcgtggcccggctgctggggccaggccccgcggccgacttctccgtgtcggtggagcgcgctctggctgccaagccgggcttggacacctacagcctgggcggcggcggcgcggcgcgcgtgcgggtgcgcggctccacgggcgtggcggccgccgcggggctgcaccgctacctgcgcgacttctgtggctgccacgtggcctggtccggctctcagctgcgcctgccgcggccactgccagccgtgccgggggagctgaccgaggccacgcccaacaggtaccgctattaccagaatgtgtgcacgcaaagctactccttcgtgtggtgggactgggcccgctgggagcgagagatagactggatggcgctgaatggcatcaacctggcactggcctggagcggccaggaggccatctggcagcgggtgcgtgcccactgtcccttccccaccctcctctatggcgggagccaccgtaggtgttttcacccgccccccagcatgggcgcagtgtctctctctagaagtgctttcagcgtgcacagtggcttgggcctcctaaaaactgaggcttccggccgggcgcggtggctcacgcctgtcatcccagcacttcgggaggcctaggcgggcggatcaggagttcaggagatcgagaccatcctggccaacattgtgaaaccccgtctctactaaaatacaaagaaatagcaacctgggcaacagagcgagactctgtc

SEQ ID NO: 424718 - DNA, 366 bp, Homo sapiens
cccagcactttgggaggccgagttgggcggatcacctgaggtcaggagttcgagaccagcctggccaacatggtgaaaccctgtctctactaaaaatataaaaattagctgggcatggtggcacgcgcctgtaatcccatctacttaggaggctgagacaggagaattgcttaaacctgggaggcagacgttgcagtgagtcaagatcacgccattgcactccagcctgggtgacgagcgaaactctgtctcaaacaaacaaacaagctctggacgtaggcctgggtttgatttctgactctgctactaattagctgtgtgacttcgggcagatgacatgactgctctgtgcctcagtttccttac

SEQ ID NO: 424719 - DNA, 2992 bp, Homo sapiens
tcatcagtagggaagtagctatggcagtgcctgatacaaaataaactccaaatgtgtatttattagatggttggatggaagttatttgcgtgtgaaagcgcgttttacccgaaggcgctctgtgagggccagcgggtccccttcggccctggagccggggtcacacgctccccaccgcgtgcggtcacgagacgcccccaagggagtatcctggtacccggaagccgcgactcctggccctgagcccgggcttagccttcgggtccacgtggccggaggccggcagctgattggacgcgggccgccccaccccctggccgtcgcgggacccgcaggactgagaccatggaggcggtggcggtggccgcggcggtgggggtccttctcctggccggggccgggggcgcggcaggcgacgaggcccgggaggcggcggccgtgcgggcgctcgtggcccggctgctggggccaggccccgcggccgacttctccgtgtcggtggagcgcgctctggctgccaagccgggcttggacacctacagcctgggcggcggcggcgcggcgcgcgtgcgggtgcgcggctccacgggcgtggcggccgccgcggggctgcaccgctacctgcgcgacttctgtggctgccacgtggcctggtccggctctcagctgcgcctgccgcggccactgccagccgtgccgggggagctgaccgaggccacgcccaacaggtaccgctattaccagaatgtgtgcacgcaaagctactccttcgtgtggtgggactgggcccgctgggagcgagagatagactggatggcgctgaatggcatcaacctggcactggcctggagcggccaggaggccatctggcagcgggtgtacctggccttgggcctgacccaggcagagatcaatgagttctttactggtcctgccttcctggcctgggggcgaatgggcaacctgcacacctgggatggccccctgcccccctcctggcacatcaagcagctttacctgcagcaccgggtcctggaccagatgcgctccttcggcatgaccccagtgctgcctgcattcgcggggcatgttcccgaggctgtcaccagggtgttccctcaggtcaatgtcacgaagatgggcagttggggccactttaactgttcctactcctgctccttccttctggctccggaagaccccatattccccatcatcgggagcctcttcctgcgagagctgatcaaagagtttggcacagaccacatctatggggccgacactttcaatgagatgcagccaccttcctcagagccctcctaccttgccgcagccaccactgccgtctatgaggccatgactgcagtggatactgaggctgtgtggctgctccaaggctggctcttccagcaccagccgcagttctgggggcccgcccagatcagggctgtgctgggagctgtgccccgtggccgcctcctggttctggacctgtttgctgagagccagcctgtgtatacccgcactgcctccttccagggccagcccttcatctggtgcatgctgcacaactttgggggaaaccatggtctttttggagccctagaggctgtgaacggaggcccagaagctgcccgcctcttccccaactccaccatggtaggcacgggcatggcccccgagggcatcagccagaacgaagtggtctattccctcatggctgagctgggctggcgaaaggacccagtgccagatttggcagcctgggtgaccagctttgccgcccggcggtatggggtctcccacccggacgcaggggcagcgtggaggctactgctccggagtgtgtacaactgctccggggaggcctgcaggggccacaatcgtagcccgctggtcaggcggccgtccctacagatgaataccagcatctggtacaaccgatctgatgtgtttgaggcctggcggctgctgctcacatctgctccctccctggccaccagccccgccttccgctacgacctgctggacctcactcggcaggcagtgcaggagctggtcagcttgtactatgaggaggcaagaagcgcctacctgagcaaggagctggcctccctgttgagggctggaggcgtcctggcctatgagctgctgccggcactggacgaggtgctggctagtgacagccgcttcttgctgggcagctggctagagcaggcccgagcagcggcagtcagtgaggccgaggccgatttctacgagcagaacagccgctaccagctgaccttgtgggggccagaaggcaacatcctggactatgccaacaagcagctggcggggttggtggccaactactacacccctcgctggcggcttttcctggaggcgctggttgacagtgtggcccagggcatccctttccaacagcaccagtttgacaaaaatgtcttccaactggagcaggccttcgttctcagcaagcagaggtaccccagccagccgcgaggagacactgtggacctggccaagaagatcttcctcaaatattaccccggctgggtggccggctcttggtgatagattcgccaccactgggccttgttttccgctaattccagggcagattccagggcccagagctggacagacatcacaggataacccaggcctgggaggaggccccacggcctgctggtggggtctgacctggggggattggagggaaatgacctgccctccaccaccacccaaagtgtgggattaaagtactgttttctttccacttaaactgatgagtcccctgggtctgtcaaaatgagaaggtcactgctgccacgcttgggaggactcagggctatagcatggccctggggtgggacctgttctcccatcccttgcctcacgtccctgtttttgtttgtttgtttgtttgtgacggagccttggtctgttgcccaggcttgagtacaatggcacagtctcggctcactgc

SEQ ID NO: 424720 - DNA, 1258 bp, Homo sapiens
tcatcagtagggaagtagctatggcagtgcctgatacaaaataaactccaaatgtgtatttattagatggttggatggaagttatttgcgtgtgaaagcgcgttttacccgaaggcgctctgtgagggccagcgggtccccttcggccctggagccggggtcacacgctccccaccgcgtgcggtcacgagacgcccccaagggagtatcctggtacccggaagccgcgactcctggccctgagcccgggcttagccttcgggtccacgtggccggaggccggcagctgattggacgcgggccgccccaccccctggccgtcgcgggacccgcaggactgagaccatggaggcggtggcggtggccgcggcggtgggggtccttctcctggccggggccgggggcgcggcaggcgacgaggcccgggaggcggcggccgtgcgggcgctcgtggcccggctgctggggccaggccccgcggccgacttctccgtgtcggtggagcgcgctctggctgccaagccgggcttggacacctacagcctgggcggcggcggcgcggcgcgcgtgcgggtgcgcggctccacgggcgtggcggccgccgcggggctgcaccgctacctgcgcgacttctgtggctgccacgtggcctggtccggctctcagctgcgcctgccgcggccactgccagccgtgccgggggagctgaccgaggccacgcccaacaggtaccgccccgaagcttccccgcgtccgcccgaggcgcttaccccctcccggagccgctgccacccaaatcgggaggctgagcggggagcgctggccggaaggcccagctgcgccgcctccagcagctgtgtggccttgagccagccactctgcctttcagagcctcggctggcccacctgaaaaacggaaagaagacgcctaccgtgcagtgttattgtgaggatttgcacgatgatgggcatagaatttgtggtgcacaattggtgatgagtgaattttcttgccttcctcccccaccttctctttgaacctgcggactgaggaaggacgcctccatcccccaccctacaggcctgtgttccagcgcctgccacactatggagtgatgtgttcacacagctgtcctcccctgcccatctgttagactgtgggggcagggattccccgttccaggaaaacaccgtgcagaggaggggctctggcagtgtggcatgaaagtggaatatgccacccaaatacccgccaggc

SEQ ID NO: 424721 - DNA, 1206 bp, Homo sapiens
acccttccttctgttcctccagcaccgggtcctggaccagatgcgctccttcggcatgaccccagtgctgcctgcattcgcggggcatgttcccgaggctgtcaccaggaggctgagacaggagaattgcttaaacctgggaggcagacgttgcagtgagtcaagatcacgccattgcactccagcctgggtgacgagcgaaactctgtctcaaacaaacaaacaagctctggacgtaggcctgggtttgatttctgactctgctactaattagctgtgtgacttcgggcagatgacatgactgctctgtgcctcagtttccttacttgtaaaatgggatctctacccacttcgctgtagggtttgtaattatctctcgatctatctgtgactttgcacagagtgctagcaaatggcagcccttgggagtggcagcaggggtgctccagtgtcccttgtccctcctgttcctctgtgcttcccagccatcctctcacatgtggttgggaaaagtcttcaaggctcacctgagacctcccctccttcaggaagccttgctagtgccccgcatgacctcctttgcacctgctaatgtctggctcccatactctcgtaggacttaatgcatgccagtggcctccctgcccgcctctttgcccccatcaccaggtggcaggaaactcactcattcattcaataaacttggtccagctgtctgaggctgccagaactggctgtgctgggtcctgggaggcggcaagaaaggtgcccaagggcttacccctgataggagagatatgttggctgaaggatacaatgtggggacaaggacaggaatatatgtgggttccgctctcctctgccgggagagaggggcaggaagggctcagggcagagcccagccttgaaaaatgagtgttgcttggacggacgcttggctaatgcttgtaatcctagcgttttgggaggctgaggcgtatggatcacctgcggtcaggagttaaagaccagcctggccaacatggcgaaaccccatctctactaaaagtacaaaaattagccaggcgtggtggcgggctcctgtaatcccagctactcggtaggctgaggcatgagaatctcttgaagccaggggccagagactgcagtgagccgagatcacaccacttcactccagcctgggtgacagagtgagactccgtctca

SEQ ID NO: 424722 - DNA, 1501 bp, Homo sapiens
gcggccgcgaattcggcacgagcggcgcacaagatggcggctctggcggcctaaagaaggcggccgcggctcagccgtgggctctaacgcggggctgggggccggagacagacttcgcccaggtgacgggtagtaggggcggcgccgcttggcctcgtggggtgtaagacccacttgctgttgcccccggaccttgccgccacaccagccctgtcctggggcggaaccgaaggaaggtcgggccctgctgccccgccccgtccttcctccttcccgggcggtcactgtgcgtggctcacttttagagtttacttcaaccacgtggagcttccatggcggcctctcaggtcctgggggagaagattaacatcctgtcgggagagactgtcaaagctggggacagggacccgctggggaacgactgtcccgagcaagataggctcccccagcgctcctggaggcagaagtgtgcctcctacgtgttggccctgaggccctggagcttcagtgcctcactcacaccggtggccctgggcagtgcccttgcctacagatcccacggtgtcctggatcccaggctcttggtgggttgtgccgtggctgtcctggctgtgcacggggccggtaatttggtcaacacttactatgacttttccaagggcattgaccacaaaaagagtgatgacaggacacttgtggaccgaatcttggagccgcaggatgtcgtccggttcggagtcttcctctacacgttgggctgcgtctgtgccgcttgcctctactacctgtcccctctgaaactggagcacttggctcttatctactttggaggcctgtctggctcctttctctacacaggaggaattggattcaagtacgtggctctgggagacctcatcatcctcatcacttttggcccgctggctgtgatgttcgcctacgccatccaggtggggtccctggccatcttcccactggtctatgccatccccctcgccctcagcaccgaggccattctccattccaacaacaccagggacatggagtccgaccgggaggctggtatcgtcacgctggccatcctcatcggccccacgttctcctacattctctacaacacactgctcttcctgccctacctggtcttcagcatcctggccacacactgcaccatcagcctggcactccccctgcttaccattcccatggccttctcccttgagagacagtttcgaagccaggccttcaacaaactgccccagaggactgccaagctcaacctcctgctgggacttttctatgtctttggcatcattctggcaccagcaggcagtctgcccaaaatttaaggggacaagtagctccccccacgacatgtctccctttcttagaatatattaaagtcagagtctctgaggaaggaatgtgatttggcagtcagggtactaagcatgggtgggaactcctgccttataaaaattgtttttgtgttcttaaagat

SEQ ID NO: 424723 - DNA, 899 bp, Homo sapiens
  misc_feature (113)..(113): n is a, c, g, or t
acgaaaacactaaaaaaaaaaaaaaaaaaaaaaaaaaaaaaaaaaaaaaaaaaaaaaaaatataaaaaaaaaaaagggcaaaaattctaggttttttttttccatcccagccnaccagtaccatttaatcctattttctcctggacagctcaattcccccagctggagaaagcccccctgttgctgcctgagagagtaagactcgaagttttccttaatcagcctcttttggctgtgcagttagacaactggagcattgaggcaggtgtgccaagggcactctgaccactgccaaggtcaaagccttctgcagaatgaaaactccgacacttccttgctgagaaacaaacaagagagaatggcggggcatttaatcatccacagctgccaatacctaatcaagatgaatggcctggagagacaaggccagggaaagcatcccgtgaagcaggagcgctgagcccaagtctcctgcgagtcaggggagcccctcagccctgggccacattgaggccaagggaataccaggtgggaggccctcagattcaggggaagtgctgagggggtcagaggtcaccatggtcaccaatgagggccttccagctgacacttgccttggccaaagacctttactgagagcctgctctgtcccaggaggcaagataaacgaggcacacccctgccctttgaggacacacagtgaactaatagcaaaagctacatgcatacattatcctgccacctgaagtgtcaacatagacacttgtccctagagatccttaaagcccctctgaaggacaggccactcacagccatgtgtgagacatagaggcataaaggctgtggggaaatgagggcagaagagatgaacttctccatgccccattgttccagactgc

SEQ ID NO: 424724 - DNA, 3659 bp, Homo sapiens
gcggccgcgaattcggcacgagcggcgcacaagatggcggctctggcggcctaaagaaggcggccgcggctcagccgtgggctctaacgcggggctgggggccggagacagacttcgcccaggtgacgggtagtaggggcggcgccgcttggcctcgtggggtgtaagacccacttgctgttgcccccggaccttgccgccacaccagccctgtcctggggcggaaccgaaggaaggtcgggccctgctgccccgccccgtccttcctccttcccgggcggtcactgtgcgtggctcacttttagagtttacttcaaccacgtggagcttccatggcggcctctcaggtcctgggggagaagattaacatcctgtcgggagagactgtcaaagctggggacagggacccgctggggaacgactgtcccgagcaagataggctcccccagcgctcctggaggcagaagtgtgcctcctacgtgttggccctgaggccctggagcttcagtgcctcactcacaccggtggccctgggcagtgcccttgcctacagatcccacggtgtcctggatcccaggctcttggtgggttgtgccgtggctgtcctggctgtgcacggggccggtaatttggtcaacacttactatgacttttccaagggcattgaccacaaaaagagtgatgacaggacacttgtggaccgaatcttggagccgcaggatgtcgtccggttcggagtcttcctctacacgttgggctgcgtctgtgccgcttgcctctactacctgtcccctctgaaactggagcacttggctcttatctactttggaggcctgtctggctcctttctctacacaggaggaattggattcaagtacgtggctctgggagacctcatcatcctcatcacttttggcccgctggctgtgatgttcgcctacgccatccaggtggggtccctggccatcttcccactggtctatgccatccccctcgccctcagcaccgaggccattctccattccaacaacaccagggacatggagtccgaccgggaggctggtatcgtcacgctggccatcctcatcggccccacgttctcctacattctctacaacacactgctcttcctgccctacctggtcttcagcatcctggccacacactgcaccatcagcctggcactccccctgcttaccattcccatggccttctcccttgagagacagtttcgaagccaggccttcaacaaactgccccagaggactgccaagctcaacctcctgctgggacttttctatgtctttggcatcattctggcaccagcaggcagtctgcccaaaatttaaggggacaagtagctccccccacgacatgtctccctttcttagaatatattaaagtcagagtctctgaggaaggaatgtgatttggcagtcagggtactaagcatgggtgggaactcctgccttataaaaattgtttttgtgttcttaaagataatatgttgtttttctgttttttgttttttccattttatggggaatttaaaaaccattcttgtatcagaaggtgaattaggcgcatggtctttgttttattaataatttccactagagggtgttctcaggtcactttgcagtgaagtggacttagttcctccttgttctgtacaaaatgtctccagactttgtaaaggagctgcccagtttggcctcctgtcccgaaaagaccctaataactaggcagagtgttgtcctgctttcttcgtctcgtaggatgtgctatgattggtgccaggcctcactaacacaggggctacctgtctcttattctcagcacctgtgtcctgagatacgctgcctgagacagagagagtccctcattaacagcctgtgtggctgtcagctttttgcctaaattgtgattcagatgcttttgttctctctcctttcacttattgccacagttgaggaaaagtgtcagattaccctgcagcaagacaagccaaggactgggagggaaaaaaaaaccactctggaggcaactgagaaaatcactgctttggataggaatcagtagggtggctgttttccctttgttgaatctactagagtgacaggaaggactcccagccctttcagtaactatcaggagccctgaaacggtagaggcactgccatccttgtgggatactcaaagcccacagggcttttccctccctattgcatcttctgatgctccccacacctaccctccacctctccacctctgtggtgttcccatttgtgtgtttcccatctgtggagccagactgagcaatagcttagcagcgagtcagggacagctgccactttccacagagccacaggatgggcagagcagggacccagggaatgaatagccagtggacaaacagtcttgagctctgttcagccagagtgatgggccctgccagttaaggggctgtgtcttcatccttgaagacagatgtgcaatattgaccctgcctctccccagggctttgtggaaagatagttgagggctttagtgagatcacactcagagtggggcaattccagcatttatcctggctgcgtttcattgcattgtctgtgaagtataatttctgggccagaattgctcagttgcatttgatccaggactatagattggaaatgggtcatcattgttttctgttgtgattatagccattctagtaggcgtttaaggtcatggcctgcagaaaatgatgtaagaactagttcttaatctttcagatcaagctaatgatgatatggaaccttgagttcgaattgattggtttacttggaaaaaaacatgtttgaaaattgcaaaagttccgccgggcgcggtggctcatgcctgtaatcccagcactttgggaggccgagacgggcggatcacgaggtcaggagatcgagaccatcttggctaacacggtgaaaccccgtttctactaaaaatacaaaaaattagccaggcgtgttggcgggcgcctgtagtcccagctacctgggcggctgaggcaggagcatggcgtgaacccaggaggcggagcttgcagtgagctgagatcatgccactgcactccaacctgggggacacagcaagactccgtctcaaaaaaaaaaaaaagaaaaagaaaattgcaaaagttcctctaaagttaaatcaaaggtggtttgtctagcagagagccagaatcttctaatagtgggcagagcccagagacaaggggaagaaagatgaccttctccccagtccttcccagcaccatttttgtttcacaccaggcttgtggcattttggtgctcacaggggttttgccttctgacctctccttggagtaggccattctcatgcagggctcaccctgaggcaggaggaccaagggctccctgcgtccacggaccacgtatgccttggtggtcactcccatcggggctatcagttctgcactgtgccctggtgcggattttaatgcatatttttatatataaatgttcccaaaggccaaatttgttgccaggttttatacgcaggtcaccataatttgtattatgttccctgagtcaatgaaggttttctttagacttcttaattaaaaagagaagaaagaaaatgttccaaaaaag

SEQ ID NO: 424725 - DNA, 2038 bp, Homo sapiens
gcggccgcgaattcggcacgagcggcgcacaagatggcggctctggcggcctaaagaaggcggccgcggctcagccgtgggctctaacgcggggctgggggccggagacagacttcgcccaggtgacgggtagtaggggcggcgccgcttggcctcgtggggtgtaagacccacttgctgttgcccccggaccttgccgccacaccagccctgtcctggggcggaaccgaaggaaggtcgggccctgctgccccgccccgtccttcctccttcccgggcggtcactgtgcgtggctcacttttagagtttacttcaaccacgtggagcttccatggcggcctctcaggtcctgggggagaagattaacatcctgtcgggagagactgtcaaagctggggacagggacccgctggggaacgactgtcccgagcaagataggctcccccagcgctcctggaggcagaagtgtgcctcctacgtgttggccctgaggccctggagcttcagtgcctcactcacaccggtggccctgggcagtgcccttgcctacagatcccacggtgtcctggatcccaggctcttggtgggttgtgccgtggctgtcctggctgtgcacggggccggtaatttggtcaacacttactatgacttttccaagggcattgaccacaaaaagagtgatgacaggacacttgtggaccgaatcttggagccgcaggatgtcgtccggttcggagtcttcctctacacgttgggctgcgtctgtgccgcttgcctctactacctgtcccctctgaaactggagcacttggctcttatctactttggaggcctgtctggctcctttctctacacaggagtcctcatctagccactgaagcagagtgcccacatcaggagcagccagtgctcaagctcccagaaactgcctagtgacctgccttctagacctgcctcctgagaatggggctggccaccttcgaggagagggaagtgagccccttcctgcctcggggtgggcagcatctgtagctgacaattgtatgcatgttcaggacacaggatactcaactcttcgggttcagtgtgctgtgtggagggagaggaagttgacacacgtgaaccatagaataaacaacgaccacagaacatcaaggtagagatggggctgctgggtatcaggaaggcttccaggaagaggtgacaatgagcggcgatcaaggtttctaggaagaggtggccataagaggtgactgttccatggaaaccgaggtgctgatggacagctcaattcccccagctggagaaagcccccctgttgctgcctgagagagtaagactcgaagttttccttaatcagcctcttttggctgtgcagttagacaactggagcattgaggcaggtgtgccaagggcactctgaccactgccaaggtcaaagccttctgcagaatgaaaactccgacacttccttgctgagaaacaaacaagagagaatggcggggcatttaatcatccacagctgccaatacctaatcaagatgaatggcctggagagacaaggccagggaaagcatcccgtgaagcaggagcgctgagcccaagtctcctgcgagtcaggggagcccctcagccctgggccacattgaggccaagggaataccaggtgggaggccctcagattcaggggaagtgctgagggggtcagaggtcaccatggtcaccaatgagggccttccagctgacacttgccttggccaaagacctttactgagagcctgctctgtcccaggaggcaagataaacgaggcacacccctgccctttgaggacacacagtgaactaatagcaaaagctacatgcatacattatcctgccacctgaagtgtcaacatagacacttgtccctagagatccttaaagcccctctgaaggacaggccactcacagccatgtgtgagacatagaggcataaaggctgtggggaaatgagggcagaagagatgaacttctccatgccccattgttccagactgc

SEQ ID NO: 424726 - DNA, 2127 bp, Homo sapiens
gcggccgcgaattcggcacgagcggcgcacaagatggcggctctggcggcctaaagaaggcggccgcggctcagccgtgggctctaacgcggggctgggggccggagacagacttcgcccaggtgacgggtagtaggggcggcgccgcttggcctcgtggggtgtaagacccacttgctgttgcccccggaccttgccgccacaccagccctgtcctggggcggaaccgaaggaaggtcgggccctgctgccccgccccgtccttcctccttcccgggcggtcactgtgcgtggctcacttttagagtttacttcaaccacgtggagcttccatggcggcctctcaggtcctgggggagaagattaacatcctgtcgggagagactgtcaaagctggggacagggacccgctggggaacgactgtcccgagcaagataggctcccccagcgctcctggaggcagaagtgtgcctcctacgtgttggccctgaggccctggagcttcagtgcctcactcacaccggtggccctgggcagtgcccttgcctacagatcccacggtgtcctggatcccaggctcttggtgggttgtgccgtggctgtcctggctgtgcacggggccggtaatttggtcaacacttactatgacttttccaagggcattgaccacaaaaagagtgatgacaggacacttgtggaccgaatcttggagccgcaggatgtcgtccggttcggagtcttcctctacacgttgggctgcgtctgtgccgcttgcctctactacctgtcccctctgaaactggagcacttggctcttatctactttggaggcctgtctggctcctttctctacacaggaggaattggattcaagtacgtggctctgggagacctcatcatcctcatcacttttggcccgctggctgtgatgttcgcctacgccatccagtcctcatctagccactgaagcagagtgcccacatcaggagcagccagtgctcaagctcccagaaactgcctagtgacctgccttctagacctgcctcctgagaatggggctggccaccttcgaggagagggaagtgagccccttcctgcctcggggtgggcagcatctgtagctgacaattgtatgcatgttcaggacacaggatactcaactcttcgggttcagtgtgctgtgtggagggagaggaagttgacacacgtgaaccatagaataaacaacgaccacagaacatcaaggtagagatggggctgctgggtatcaggaaggcttccaggaagaggtgacaatgagcggcgatcaaggtttctaggaagaggtggccataagaggtgactgttccatggaaaccgaggtgctgatggacagctcaattcccccagctggagaaagcccccctgttgctgcctgagagagtaagactcgaagttttccttaatcagcctcttttggctgtgcagttagacaactggagcattgaggcaggtgtgccaagggcactctgaccactgccaaggtcaaagccttctgcagaatgaaaactccgacacttccttgctgagaaacaaacaagagagaatggcggggcatttaatcatccacagctgccaatacctaatcaagatgaatggcctggagagacaaggccagggaaagcatcccgtgaagcaggagcgctgagcccaagtctcctgcgagtcaggggagcccctcagccctgggccacattgaggccaagggaataccaggtgggaggccctcagattcaggggaagtgctgagggggtcagaggtcaccatggtcaccaatgagggccttccagctgacacttgccttggccaaagacctttactgagagcctgctctgtcccaggaggcaagataaacgaggcacacccctgccctttgaggacacacagtgaactaatagcaaaagctacatgcatacattatcctgccacctgaagtgtcaacatagacacttgtccctagagatccttaaagcccctctgaaggacaggccactcacagccatgtgtgagacatagaggcataaaggctgtggggaaatgagggcagaagagatgaacttctccatgccccattgttccagactgc

SEQ ID NO: 424727 - DNA, 2386 bp, Homo sapiens
gcggccgcgaattcggcacgagcggcgcacaagatggcggctctggcggcctaaagaaggcggccgcggctcagccgtgggctctaacgcggggctgggggccggagacagacttcgcccaggtgacgggtagtaggggcggcgccgcttggcctcgtggggtgtaagacccacttgctgttgcccccggaccttgccgccacaccagccctgtcctggggcggaaccgaaggaaggtcgggccctgctgccccgccccgtccttcctccttcccgggcggtcactgtgcgtggctcacttttagagtttacttcaaccacgtggagcttccatggcggcctctcaggtcctgggggagaagattaacatcctgtcgggagagactgtcaaagctggggacagggacccgctggggaacgactgtcccgagcaagataggctcccccagcgctcctggaggcagaagtgtgcctcctacgtgttggccctgaggccctggagcttcagtgcctcactcacaccggtggccctgggcagtgcccttgcctacagatcccacggtgtcctggatcccaggctcttggtgggttgtgccgtggctgtcctggctgtgcacggggccggtaatttggtcaacacttactatgacttttccaagggcattgaccacaaaaagagtgatgacaggacacttgtggaccgaatcttggagccgcaggatgtcgtccggttcggagtcttcctctacacgttgggctgcgtctgtgccgcttgcctctactacctgtcccctctgaaactggagcacttggctcttatctactttggaggcctgtctggctcctttctctacacaggaggaattggattcaagtacgtggctctgggagacctcatcatcctcatcacttttggcccgctggctgtgatgttcgcctacgccatccaggctggagtgcaatggtgcaatctcagctcgctgcaacctctgcctccagggttcaagcgattctcctgcctcagcctcctgagtagctgggattaacagcccatctcagcactagcacagtgcatggtgcaacagagcaggcagtcagtaactggttgttgaatgactgagttacatgggaagggctgggccctccagggctgactgacaggtgtgagagtttggaccactgcatcacatcagctgtcagtaaggacagtcctcatctagccactgaagcagagtgcccacatcaggagcagccagtgctcaagctcccagaaactgcctagtgacctgccttctagacctgcctcctgagaatggggctggccaccttcgaggagagggaagtgagccccttcctgcctcggggtgggcagcatctgtagctgacaattgtatgcatgttcaggacacaggatactcaactcttcgggttcagtgtgctgtgtggagggagaggaagttgacacacgtgaaccatagaataaacaacgaccacagaacatcaaggtagagatggggctgctgggtatcaggaaggcttccaggaagaggtgacaatgagcggcgatcaaggtttctaggaagaggtggccataagaggtgactgttccatggaaaccgaggtgctgatggacagctcaattcccccagctggagaaagcccccctgttgctgcctgagagagtaagactcgaagttttccttaatcagcctcttttggctgtgcagttagacaactggagcattgaggcaggtgtgccaagggcactctgaccactgccaaggtcaaagccttctgcagaatgaaaactccgacacttccttgctgagaaacaaacaagagagaatggcggggcatttaatcatccacagctgccaatacctaatcaagatgaatggcctggagagacaaggccagggaaagcatcccgtgaagcaggagcgctgagcccaagtctcctgcgagtcaggggagcccctcagccctgggccacattgaggccaagggaataccaggtgggaggccctcagattcaggggaagtgctgagggggtcagaggtcaccatggtcaccaatgagggccttccagctgacacttgccttggccaaagacctttactgagagcctgctctgtcccaggaggcaagataaacgaggcacacccctgccctttgaggacacacagtgaactaatagcaaaagctacatgcatacattatcctgccacctgaagtgtcaacatagacacttgtccctagagatccttaaagcccctctgaaggacaggccactcacagccatgtgtgagacatagaggcataaaggctgtggggaaatgagggcagaagagatgaacttctccatgccccattgttccagactgc

SEQ ID NO: 424728 - DNA, 7446 bp, Homo sapiens
ccttttcgttcgccctctcggggcggcttcgccgaaggtagcgccgaatccggcaaccggagcctgggcgcgaagcgaagaagccggaacaaagtgagggggagccggccggctggcccgggaagccccaggggcgcaggggaagcgggactcgcgccgggcggggtttccctgcgccccggcgccccgcgggcagcatgcccctgcgggcagggggagctgggctgaactggccctcccgggggctcagcttgcgccctagagcccaccagatgtgcccccgccggggcccccgggttgcgtgaggacacctcctctgaggggcgccgcttgcccctctccggatcgcccggggccccggctggccagaggatggacgaggaggaggatggagcgggcgccgaggagtcgggacagccccggagcttcatgcggctcaacgacctgtcgggggccgggggccggccggggccggggtcagcagaaaaggacccgggcagcgcggactccgaggcggaggggctgccgtacccggcgctggccccggtggttttcttctacttgagccaggacagccgcccgcggagctggtgtctccgcacggtctgtaacccctggtttgagcgcatcagcatgttggtcatccttctcaactgcgtgaccctgggcatgttccggccatgcgaggacatcgcctgtgactcccagcgctgccggatcctgcaggcctttgatgacttcatctttgccttctttgccgtggagatggtggtgaagatggtggccttgggcatctttgggaaaaagtgttacctgggagacacttggaaccggcttgactttttcatcgtcatcgcagggatgctggagtactcgctggacctgcagaacgtcagcttctcagctgtcaggacagtccgtgtgctgcgaccgctcagggccattaaccgggtgcccagcatgcgcatccttgtcacgttgctgctggatacgctgcccatgctgggcaacgtcctgctgctctgcttcttcgtcttcttcatcttcggcatcgtcggcgtccagctgtgggcagggctgcttcggaaccgatgcttcctacctgagaatttcagcctccccctgagcgtggacctggagcgctattaccagacagagaacgaggatgagagccccttcatctgctcccagccacgcgagaacggcatgcggtcctgcagaagcgtgcccacgctgcgcggggacgggggcggtggcccaccttgcggtctggactatgaggcctacaacagctccagcaacaccacctgtgtcaactggaaccagtactacaccaactgctcagcgggggagcacaaccccttcaagggcgccatcaactttgacaacattggctatgcctggatcgccatcttccaggtcatcacgctggagggctgggtcgacatcatgtactttgtgatggatgctcattccttctacaatttcatctacttcatcctcctcatcatcgtgggctccttcttcatgatcaacctgtgcctggtggtgattgccacgcagttctcagagaccaagcagcgggaaagccagctgatgcgggagcagcgtgtgcggttcctgtccaacgccagcaccctggctagcttctctgagcccggcagctgctatgaggagctgctcaagtacctggtgtacatccttcgtaaggcagcccgcaggctggctcaggtctctcgggcagcaggtgtgcgggttgggctgctcagcagcccagcacccctcgggggccaggagacccagcccagcagcagctgctctcgctcccaccgccgcctatccgtccaccacctggtgcaccaccaccaccaccatcaccaccactaccacctgggcaatgggacgctcagggccccccgggccagcccggagatccaggacagggatgccaatgggtcccgccggctcatgctgccaccaccctcgacgcctgccctctccggggccccccctggtggcgcagagtctgtgcacagcttctaccatgccgactgccacttagagccagtccgctgccaggcgccccctcccaggtccccatctgaggcatccggcaggactgtgggcagcgggaaggtgtatcccaccgtgcacaccagccctccaccggagacgctgaaggagaaggcactagtagaggtggctgccagctctgggcccccaaccctcaccagcctcaacatcccacccgggccctacagctccatgcacaagctgctggagacacagagtacaggtgcctgccaaagctcttgcaagatctccagcccttgcttgaaagcagacagtggagcctgtggtccagacagctgcccctactgtgcccgggccggggcaggggaggtggagctcgccgaccgtgaaatgcctgactcagacagcgaggcagtttatgagttcacacaggatgcccagcacagcgacctccgggacccccacagccggcggcaacggagcctgggcccagatgcagagcccagctctgtgctggccttctggaggctaatctgtgacaccttccgaaagattgtggacagcaagtactttggccggggaatcatgatcgccatcctggtcaacacactcagcatgggcatcgaataccacgagcagcccgaggagcttaccaacgccctagaaatcagcaacatcgtcttcaccagcctctttgccctggagatgctgctgaagctgcttgtgtatggtccctttggctacatcaagaatccctacaacatcttcgatggtgtcattgtggtcatcagcgtgtgggagatcgtgggccagcaggggggcggcctgtcggtgctgcggaccttccgcctgatgcgtgtgctgaagctggtgcgcttcctgccggcgctgcagcggcagctggtggtgctcatgaagaccatggacaacgtggccaccttctgcatgctgcttatgctcttcatcttcatcttcagcatcctgggcatgcatctcttcggctgcaagtttgcctctgagcgggatggggacaccctgccagaccggaagaattttgactccttgctctgggccatcgtcactgtctttcagatcctgacccaggaggactggaacaaagtcctctacaatggtatggcctccacgtcgtcctgggcggccctttatttcattgccctcatgaccttcggcaactacgtgctcttcaatttgctggtcgccattctggtggagggcttccaggcggagggagatgccaacaagtccgaatcagagcccgatttcttctcacccagcctggatggtgatggggacaggaagaagtgcttggccttggtgtccctgggagagcacccggagctgcggaagagcctgctgccgcctctcatcatccacacggccgccacacccatgtcgctgcccaagagcaccagcacgggcctgggcgaggcgctgggccctgcgtcgcgccgcaccagcagcagcgggtcggcagagcctggggcggcccacgagatgaagtcaccgcccagcgcccgcagctctccgcacagcccctggagcgctgcaagcagctggaccagcaggcgctccagccggaacagcctcggccgtgcacccagcctgaagcggagaagcccaagtggagagcggcggtccctgttgtcgggagaaggccaggagagccaggatgaagaggagagctcagaagaggagcgggccagccctgcgggcagtgaccatcgccacagggggtccctggagcgggaggccaagagttcctttgacctgccagacacactgcaggtgccagggctgcatcgcactgccagtggccgagggtctgcttctgagcaccaggactgcaatggcaagtcggcttcagggcgcctggcccgggccctgcggcctgatgaccccccactggatggggatgacgccgatgacgagggcaacctgagcaaaggggaacgggtccgcgcgtggatccgagcccgactccctgcctgctgcctcgagcgagactcctggtcagcctacatcttccctcctcagtccaggttccgcctcctgtgtcaccggatcatcacccacaagatgttcgaccacgtggtccttgtcatcatcttccttaactgcatcaccatcgccatggagcgccccaaaattgacccccacagcgctgaacgcatcttcctgaccctctccaattacatcttcaccgcagtctttctggctgaaatgacagtgaaggtggtggcactgggctggtgcttcggggagcaggcgtacctgcggagcagttggaacgtgctggacgggctgttggtgctcatctccgtcatcgacattctggtgtccatggtctctgacagcggcaccaagatcctgggcatgctgagggtgctgcggctgctgcggaccctgcgcccgctcagggtgatcagccgggcgcaggggctgaagctggtggtggagacgctgatgtcctcactgaaacccatcggcaacattgtagtcatctgctgtgccttcttcatcattttcggcatcttgggggtgcagctcttcaaagggaagtttttcgtgtgccagggcgaggataccaggaacatcaccaataaatcggactgtgccgaggccagttaccggtgggtccggcacaagtacaactttgacaaccttggccaggccctgatgtccctgttcgttttggcctccaaggatggttgggtggacatcatgtacgatgggctggatgctgtgggcgtggaccagcagcccatcatgaaccacaacccctggatgctgctgtacttcatctcgttcctgctcattgtggccttctttgtcctgaacatgtttgtgggtgtggtggtggagaacttccacaagtgtcggcagcaccaggaggaagaggaggcccggcggcgggaggagaagcgcctacgaagactggagaaaaagagaaggagtaaggagaagcagatggctgaagcccagtgcaaaccttactactccgactactcccgcttccggctcctcgtccaccacttgtgcaccagccactacctggacctcttcatcacaggtgtcatcgggctgaacgtggtcaccatggccatggagcactaccagcagccccagattctggatgaggctctgaagatctgcaactacatcttcactgtcatctttgtcttggagtcagttttcaaacttgtggcctttggtttccgtcggttcttccaggacaggtggaaccagctggacctggccattgtgctgctgtccatcatgggcatcacgctggaggaaatcgaggtcaacgcctcgctgcccatcaaccccaccatcatccgcatcatgagggtgctgcgcattgcccgagtgctgaagctgctgaagatggctgtgggcatgcgggcgctgctggacacggtgatgcaggccctgccccaggtggggaacctgggacttctcttcatgttgttgtttttcatctttgcagctctgggcgtggagctctttggagacctggagtgtgacgagacacacccctgtgagggcctgggccgtcatgccacctttcggaactttggcatggccttcctaaccctcttccgagtctccacaggtgacaattggaatggcattatgaaggacaccctccgggactgtgaccaggagtccacctgctacaacacggtcatctcgcctatctactttgtgtccttcgtgctgacggcccagttcgtgctagtcaacgtggtgatcgccgtgctgatgaagcacctggaggagagcaacaaggaggccaaggaggaggccgagctagaggctgagctggagctggagatgaagaccctcagcccccagccccactcgccactgggcagccccttcctctggcctggggtcgagggccccgacagccccgacagccccaagcctggggctctgcacccagcggcccacgcgagatcagcctcccacttttccctggagcaccccacgatgcagccccaccccacggagctgccaggaccagacttactgactgtgcggaagtctggggtcagccgaacgcactctctgcccaatgacagctacatgtgtcggcatgggagcactgccgaggggcccctgggacacaggggctgggggctccccaaagctcagtcaggctccgtcttgtccgttcactcccagccagcagataccagctacatcctgcagcttcccaaagatgcacctcatctgctccagccccacagcgccccaacctggggcaccatccccaaactgcccccaccaggacgctcccctttggctcagaggccactcaggcgccaggcagcaataaggactgactccttggacgttcagggtctgggcagccgggaagacctgctggcagaggtgagtgggccctccccgcccctggcccgggcctactctttctggggccagtcaagtacccaggcacagcagcactcccgcagccacagcaagatctccaagcacatgaccccgccagccccttgcccaggcccagaacccaactggggcaagggccctccagagaccagaagcagcttagagttggacacggagctgagctggatttcaggagacctcctgccccctggcggccaggaggagcccccatccccacgggacctgaagaagtgctacagcgtggaggcccagagctgccagcgccggcccacgtcctggctggatgagcagaggagacactctatcgccgtcagctgcctggacagcggctcccaaccccacctgggcacagacccctctaaccttgggggccagcctcttggggggcctgggagccggcccaagaaaaaactcagcccgcctagtatcaccatagacccccccgagagccaaggtcctcggaccccgcccagccctggtatctgcctccggaggagggctccgtccagcgactccaaggatcccttggcctctggcccccctgacagcatggctgcctcgccctccccaaagaaagatgtgctgagtctctccggtttatcctctgacccagcagacctggacccctgagtcctgccccactttcccactcacctttctccactgggtgccaagtcctagctcctcctcctgggctatattcctgacaaaagttccatatagacaccaaggaggcggaggcgctcctccctgcctcagtggctctgggtacctgcaagcagaacttccaaagagagttaaaagcagcagccccggcaactctggctccaggcagaaggagaggcccggtgcagctgaggttcccgacaccagaagctgttgggagaaagcaatacgtttgtgcagaatctctatgtatattctattttattaaattaattgaatctagta

SEQ ID NO: 424729 - DNA, 7839 bp, Homo sapiens
ccttttcgttcgccctctcggggcggcttcgccgaaggtagcgccgaatccggcaaccggagcctgggcgcgaagcgaagaagccggaacaaagtgagggggagccggccggctggcccgggaagccccaggggcgcaggggaagcgggactcgcgccgggcggggtttccctgcgccccggcgccccgcgggcagcatgcccctgcgggcagggggagctgggctgaactggccctcccgggggctcagcttgcgccctagagcccaccagatgtgcccccgccggggcccccgggttgcgtgaggacacctcctctgaggggcgccgcttgcccctctccggatcgcccggggccccggctggccagaggatggacgaggaggaggatggagcgggcgccgaggagtcgggacagccccggagcttcatgcggctcaacgacctgtcgggggccgggggccggccggggccggggtcagcagaaaaggacccgggcagcgcggactccgaggcggaggggctgccgtacccggcgctggccccggtggttttcttctacttgagccaggacagccgcccgcggagctggtgtctccgcacggtctgtaacccctggtttgagcgcatcagcatgttggtcatccttctcaactgcgtgaccctgggcatgttccggccatgcgaggacatcgcctgtgactcccagcgctgccggatcctgcaggcctttgatgacttcatctttgccttctttgccgtggagatggtggtgaagatggtggccttgggcatctttgggaaaaagtgttacctgggagacacttggaaccggcttgactttttcatcgtcatcgcagggatgctggagtactcgctggacctgcagaacgtcagcttctcagctgtcaggacagtccgtgtgctgcgaccgctcagggccattaaccgggtgcccagcatgcgcatccttgtcacgttgctgctggatacgctgcccatgctgggcaacgtcctgctgctctgcttcttcgtcttcttcatcttcggcatcgtcggcgtccagctgtgggcagggctgcttcggaaccgatgcttcctacctgagaatttcagcctccccctgagcgtggacctggagcgctattaccagacagagaacgaggatgagagccccttcatctgctcccagccacgcgagaacggcatgcggtcctgcagaagcgtgcccacgctgcgcggggacgggggcggtggcccaccttgcggtctggactatgaggcctacaacagctccagcaacaccacctgtgtcaactggaaccagtactacaccaactgctcagcgggggagcacaaccccttcaagggcgccatcaactttgacaacattggctatgcctggatcgccatcttccaggtcatcacgctggagggctgggtcgacatcatgtactttgtgatggatgctcattccttctacaatttcatctacttcatcctcctcatcatcgtgggctccttcttcatgatcaacctgtgcctggtggtgattgccacgcagttctcagagaccaagcagcgggaaagccagctgatgcgggagcagcgtgtgcggttcctgtccaacgccagcaccctggctagcttctctgagcccggcagctgctatgaggagctgctcaagtacctggtgtacatccttcgtaaggcagcccgcaggctggctcaggtctctcgggcagcaggtgtgcgggttgggctgctcagcagcccagcacccctcgggggccaggagacccagcccagcagcagctgctctcgctcccaccgccgcctatccgtccaccacctggtgcaccaccaccaccaccatcaccaccactaccacctgggcaatgggacgctcagggccccccgggccagcccggagatccaggacagggatgccaatgggtcccgccggctcatgctgccaccaccctcgacgcctgccctctccggggccccccctggtggcgcagagtctgtgcacagcttctaccatgccgactgccacttagagccagtccgctgccaggcgccccctcccaggtccccatctgaggcatccggcaggactgtgggcagcgggaaggtgtatcccaccgtgcacaccagccctccaccggagacgctgaaggagaaggcactagtagaggtggctgccagctctgggcccccaaccctcaccagcctcaacatcccacccgggccctacagctccatgcacaagctgctggagacacagagtacaggtgcctgccaaagctcttgcaagatctccagcccttgcttgaaagcagacagtggagcctgtggtccagacagctgcccctactgtgcccgggccggggcaggggaggtggagctcgccgaccgtgaaatgcctgactcagacagcgaggcagtttatgagttcacacaggatgcccagcacagcgacctccgggacccccacagccggcggcaacggagcctgggcccagatgcagagcccagctctgtgctggccttctggaggctaatctgtgacaccttccgaaagattgtggacagcaagtactttggccggggaatcatgatcgccatcctggtcaacacactcagcatgggcatcgaataccacgagcagcccgaggagcttaccaacgccctagaaatcagcaacatcgtcttcaccagcctctttgccctggagatgctgctgaagctgcttgtgtatggtccctttggctacatcaagaatccctacaacatcttcgatggtgtcattgtggtcatcagcgtgtgggagatcgtgggccagcaggggggcggcctgtcggtgctgcggaccttccgcctgatgcgtgtgctgaagctggtgcgcttcctgccggcgctgcagcggcagctggtggtgctcatgaagaccatggacaacgtggccaccttctgcatgctgcttatgctcttcatcttcatcttcagcatcctgggcatgcatctcttcggctgcaagtttgcctctgagcgggatggggacaccctgccagaccggaagaattttgactccttgctctgggccatcgtcactgtctttcagatcctgacccaggaggactggaacaaagtcctctacaatggtatggcctccacgtcgtcctgggcggccctttatttcattgccctcatgaccttcggcaactacgtgctcttcaatttgctggtcgccattctggtggagggcttccaggcggagggagatgccaacaagtccgaatcagagcccgatttcttctcacccagcctggatggtgatggggacaggaagaagtgcttggccttggtgtccctgggagagcacccggagctgcggaagagcctgctgccgcctctcatcatccacacggccgccacacccatgtcgctgcccaagagcaccagcacgggcctgggcgaggcgctgggccctgcgtcgcgccgcaccagcagcagcgggtcggcagagcctggggcggcccacgagatgaagtcaccgcccagcgcccgcagctctccgcacagcccctggagcgctgcaagcagctggaccagcaggcgctccagccggaacagcctcggccgtgcacccagcctgaagcggagaagcccaagtggagagcggcggtccctgttgtcgggagaaggccaggagagccaggatgaagaggagagctcagaagaggagcgggccagccctgcgggcagtgaccatcgccacagggggtccctggagcgggaggccaagagttcctttgacctgccagacacactgcaggtgccagggctgcatcgcactgccagtggccgagggtctgcttctgagcaccaggactgcaatggcaagtcggcttcagggcgcctggcccgggccctgcggcctgatgaccccccactggatggggatgacgccgatgacgagggcaacctgagcaaaggggaacgggtccgcgcgtggatccgagcccgactccctgcctgctgcctcgagcgagactcctggtcagcctacatcttccctcctcagtccaggttccgcctcctgtgtcaccggatcatcacccacaagatgttcgaccacgtggtccttgtcatcatcttccttaactgcatcaccatcgccatggagcgccccaaaattgacccccacagcgctgaacgcatcttcctgaccctctccaattacatcttcaccgcagtctttctggctgaaatgacagtgaaggtggtggcactgggctggtgcttcggggagcaggcgtacctgcggagcagttggaacgtgctggacgggctgttggtgctcatctccgtcatcgacattctggtgtccatggtctctgacagcggcaccaagatcctgggcatgctgagggtgctgcggctgctgcggaccctgcgcccgctcagggtgatcagccgggcgcaggggctgaagctggtggtggagacgctgatgtcctcactgaaacccatcggcaacattgtagtcatctgctgtgccttcttcatcattttcggcatcttgggggtgcagctcttcaaagggaagtttttcgtgtgccagggcgaggataccaggaacatcaccaataaatcggactgtgccgaggccagttaccggtgggtccggcacaagtacaactttgacaaccttggccaggccctgatgtccctgttcgttttggcctccaaggatggttgggtggacatcatgtacgatgggctggatgctgtgggcgtggaccagcagcccatcatgaaccacaacccctggatgctgctgtacttcatctcgttcctgctcattgtggccttctttgtcctgaacatgtttgtgggtgtggtggtggagaacttccacaagtgtcggcagcaccaggaggaagaggaggcccggcggcgggaggagaagcgcctacgaagactggagaaaaagagaaggagtaaggagaagcagatggctgaagcccagtgcaaaccttactactccgactactcccgcttccggctcctcgtccaccacttgtgcaccagccactacctggacctcttcatcacaggtgtcatcgggctgaacgtggtcaccatggccatggagcactaccagcagccccagattctggatgaggctctgaagatctgcaactacatcttcactgtcatctttgtcttggagtcagttttcaaacttgtggcctttggtttccgtcggttcttccaggacaggtggaaccagctggacctggccattgtgctgctgtccatcatgggcatcacgctggaggaaatcgaggtcaacgcctcgctgcccatcaaccccaccatcatccgcatcatgagggtgctgcgcattgcccgagtgctgaagctgctgaagatggctgtgggcatgcgggcgctgctggacacggtgatgcaggccctgccccaggtggggaacctgggacttctcttcatgttgttgtttttcatctttgcagctctgggcgtggagctctttggagacctggagtgtgacgagacacacccctgtgagggcctgggccgtcatgccacctttcggaactttggcatggccttcctaaccctcttccgagtctccacaggtgacaattggaatggcattatgaaggacaccctccgggactgtgaccaggagtccacctgctacaacacggtcatctcgcctatctactttgtgtccttcgtgctgacggcccagttcgtgctagtcaacgtggtgatcgccgtgctgatgaagcacctggaggagagcaacaaggaggccaaggaggaggccgagctagaggctgagctggagctggagatgaagaccctcagcccccagccccactcgccactgggcagccccttcctctggcctggggtcgagggccccgacagccccgacagccccaagcctggggctctgcacccagcggcccacgcgagatcagcctcccacttttccctggagcaccccacgatgcagccccaccccacggagctgccaggaccagacttactgactgtgcggaagtctggggtcagccgaacgcactctctgcccaatgacagctacatgtgtcggcatgggagcactgccgaggggcccctgggacacaggggctgggggctccccaaagctcagtcaggctccgtcttgtccgttcactcccagccagcagataccagctacatcctgcagcttcccaaagatgcacctcatctgctccagccccacagcgccccaacctggggcaccatccccaaactgcccccaccaggacgctcccctttggctcagaggccactcaggcgccaggcagcaataaggactgactccttggacgttcagggtctgggcagccgggaagacctgctggcagaggtgagtgggccctccccgcccctggcccgggcctactctttctggggccagtcaagtacccaggcacagcagcactcccgcagccacagcaagatctccaagcacatgaccccgccagccccttgcccaggcccagaacccaactggggcaagggccctccagagaccagaagcagcttagagttggacacggagctgagctggatttcaggagacctcctgccccctggcggccaggaggagcccccatccccacgggacctgaagaagtgctacagcgtggaggcccagagctgccagcgccggcccacgtcctggctggatgagcagaggagacactctatcgccgtcagctgcctggacagcggctcccaaccccacctgggcacagacccctctaaccttgggggccagcctcttggggggcctgggagccggcccaagaaaaaactcagcccgcctagtatcaccatagacccccccgagagccaaggtcctcggaccccgcccagccctggtatctgcctccggaggagggctccgtccagcgactccaaggatcccttggcctctggcccccctgacagcatggctgcctcgccctccccaaagaaagatgtgctgagtctctccggtttatcctctgacccagcagacctggacccctgagtcctgccccactttcccactcacctttctccactgggtgccaagtcctagctcctcctcctgggctatattcctgacaaaagttccatatagacaccaaggaggcggaggcgctcctccctgcctcagtggctctgggtacctgcaagcagaacttccaaagagagttaaaagcagcagccccggcaactctggctccaggcagaaggagaggcccggtgcagctgaggttcccgacaccagaagctgttgggagaaagcaatacgtttgtgcagaatctctatgtatattctattttattaaattaattgaatctagtatatgcgggatgtacgacattttgtgactgaagagacttgtttccttctacttttatgtgtctcagaatatttttgaggcgaaggcgtctgtctcttggctattttaacctaaaataacagtctagttatattccctcttcttgcaaagcacaagctgggaccgcgagcacattgcagccccaacggtggcccatcttcagcggagagcgagaaccattttggaaactgtaatgtaacttattttttcctttaacctcgtcatcattttctgtagggaaaaaaaaaagaaaaagaaaaaatgagattttacaagtgaaatggaacctttttatatatacatacatacatatctatctatctatctatatatatataaaataaagtaattttcct

SEQ ID NO: 424730 - DNA, 8220 bp, Homo sapiens
ccttttcgttcgccctctcggggcggcttcgccgaaggtagcgccgaatccggcaaccggagcctgggcgcgaagcgaagaagccggaacaaagtgagggggagccggccggctggcccgggaagccccaggggcgcaggggaagcgggactcgcgccgggcggggtttccctgcgccccggcgccccgcgggcagcatgcccctgcgggcagggggagctgggctgaactggccctcccgggggctcagcttgcgccctagagcccaccagatgtgcccccgccggggcccccgggttgcgtgaggacacctcctctgaggggcgccgcttgcccctctccggatcgcccggggccccggctggccagaggatggacgaggaggaggatggagcgggcgccgaggagtcgggacagccccggagcttcatgcggctcaacgacctgtcgggggccgggggccggccggggccggggtcagcagaaaaggacccgggcagcgcggactccgaggcggaggggctgccgtacccggcgctggccccggtggttttcttctacttgagccaggacagccgcccgcggagctggtgtctccgcacggtctgtaacccctggtttgagcgcatcagcatgttggtcatccttctcaactgcgtgaccctgggcatgttccggccatgcgaggacatcgcctgtgactcccagcgctgccggatcctgcaggcctttgatgacttcatctttgccttctttgccgtggagatggtggtgaagatggtggccttgggcatctttgggaaaaagtgttacctgggagacacttggaaccggcttgactttttcatcgtcatcgcagggatgctggagtactcgctggacctgcagaacgtcagcttctcagctgtcaggacagtccgtgtgctgcgaccgctcagggccattaaccgggtgcccagcatgcgcatccttgtcacgttgctgctggatacgctgcccatgctgggcaacgtcctgctgctctgcttcttcgtcttcttcatcttcggcatcgtcggcgtccagctgtgggcagggctgcttcggaaccgatgcttcctacctgagaatttcagcctccccctgagcgtggacctggagcgctattaccagacagagaacgaggatgagagccccttcatctgctcccagccacgcgagaacggcatgcggtcctgcagaagcgtgcccacgctgcgcggggacgggggcggtggcccaccttgcggtctggactatgaggcctacaacagctccagcaacaccacctgtgtcaactggaaccagtactacaccaactgctcagcgggggagcacaaccccttcaagggcgccatcaactttgacaacattggctatgcctggatcgccatcttccaggtcatcacgctggagggctgggtcgacatcatgtactttgtgatggatgctcattccttctacaatttcatctacttcatcctcctcatcatcgtgggctccttcttcatgatcaacctgtgcctggtggtgattgccacgcagttctcagagaccaagcagcgggaaagccagctgatgcgggagcagcgtgtgcggttcctgtccaacgccagcaccctggctagcttctctgagcccggcagctgctatgaggagctgctcaagtacctggtgtacatccttcgtaaggcagcccgcaggctggctcaggtctctcgggcagcaggtgtgcgggttgggctgctcagcagcccagcacccctcgggggccaggagacccagcccagcagcagctgctctcgctcccaccgccgcctatccgtccaccacctggtgcaccaccaccaccaccatcaccaccactaccacctgggcaatgggacgctcagggccccccgggccagcccggagatccaggacagggatgccaatgggtcccgccggctcatgctgccaccaccctcgacgcctgccctctccggggccccccctggtggcgcagagtctgtgcacagcttctaccatgccgactgccacttagagccagtccgctgccaggcgccccctcccaggtccccatctgaggcatccggcaggactgtgggcagcgggaaggtgtatcccaccgtgcacaccagccctccaccggagacgctgaaggagaaggcactagtagaggtggctgccagctctgggcccccaaccctcaccagcctcaacatcccacccgggccctacagctccatgcacaagctgctggagacacagagtacaggtgcctgccaaagctcttgcaagatctccagcccttgcttgaaagcagacagtggagcctgtggtccagacagctgcccctactgtgcccgggccggggcaggggaggtggagctcgccgaccgtgaaatgcctgactcagacagcgaggcagtttatgagttcacacaggatgcccagcacagcgacctccgggacccccacagccggcggcaacggagcctgggcccagatgcagagcccagctctgtgctggccttctggaggctaatctgtgacaccttccgaaagattgtggacagcaagtactttggccggggaatcatgatcgccatcctggtcaacacactcagcatgggcatcgaataccacgagcagcccgaggagcttaccaacgccctagaaatcagcaacatcgtcttcaccagcctctttgccctggagatgctgctgaagctgcttgtgtatggtccctttggctacatcaagaatccctacaacatcttcgatggtgtcattgtggtcatcagcgtgtgggagatcgtgggccagcaggggggcggcctgtcggtgctgcggaccttccgcctgatgcgtgtgctgaagctggtgcgcttcctgccggcgctgcagcggcagctggtggtgctcatgaagaccatggacaacgtggccaccttctgcatgctgcttatgctcttcatcttcatcttcagcatcctgggcatgcatctcttcggctgcaagtttgcctctgagcgggatggggacaccctgccagaccggaagaattttgactccttgctctgggccatcgtcactgtctttcagatcctgacccaggaggactggaacaaagtcctctacaatggtatggcctccacgtcgtcctgggcggccctttatttcattgccctcatgaccttcggcaactacgtgctcttcaatttgctggtcgccattctggtggagggcttccaggcggaggaaatcagcaaacgggaagatgcgagtggacagttaagctgtattcagctgcctgtcgactcccaggggggagatgccaacaagtccgaatcagagcccgatttcttctcacccagcctggatggtgatggggacaggaagaagtgcttggccttggtgtccctgggagagcacccggagctgcggaagagcctgctgccgcctctcatcatccacacggccgccacacccatgtcgctgcccaagagcaccagcacgggcctgggcgaggcgctgggccctgcgtcgcgccgcaccagcagcagcgggtcggcagagcctggggcggcccacgagatgaagtcaccgcccagcgcccgcagctctccgcacagcccctggagcgctgcaagcagctggaccagcaggcgctccagccggaacagcctcggccgtgcacccagcctgaagcggagaagcccaagtggagagcggcggtccctgttgtcgggagaaggccaggagagccaggatgaagaggagagctcagaagaggagcgggccagccctgcgggcagtgaccatcgccacagggggtccctggagcgggaggccaagagttcctttgacctgccagacacactgcaggtgccagggctgcatcgcactgccagtggccgagggtctgcttctgagcaccaggactgcaatggcaagtcggcttcagggcgcctggcccgggccctgcggcctgatgaccccccactggatggggatgacgccgatgacgagggcaacctgagcaaaggggaacgggtccgcgcgtggatccgagcccgactccctgcctgctgcctcgagcgagactcctggtcagcctacatcttccctcctcagtccaggttccgcctcctgtgtcaccggatcatcacccacaagatgttcgaccacgtggtccttgtcatcatcttccttaactgcatcaccatcgccatggagcgccccaaaattgacccccacagcgctgaacgcatcttcctgaccctctccaattacatcttcaccgcagtctttctggctgaaatgacagtgaaggtggtggcactgggctggtgcttcggggagcaggcgtacctgcggagcagttggaacgtgctggacgggctgttggtgctcatctccgtcatcgacattctggtgtccatggtctctgacagcggcaccaagatcctgggcatgctgagggtgctgcggctgctgcggaccctgcgcccgctcagggtgatcagccgggcgcaggggctgaagctggtggtggagacgctgatgtcctcactgaaacccatcggcaacattgtagtcatctgctgtgccttcttcatcattttcggcatcttgggggtgcagctcttcaaagggaagtttttcgtgtgccagggcgaggataccaggaacatcaccaataaatcggactgtgccgaggccagttaccggtgggtccggcacaagtacaactttgacaaccttggccaggccctgatgtccctgttcgttttggcctccaaggatggttgggtggacatcatgtacgatgggctggatgctgtgggcgtggaccagcagcccatcatgaaccacaacccctggatgctgctgtacttcatctcgttcctgctcattgtggccttctttgtcctgaacatgtttgtgggtgtggtggtggagaacttccacaagtgtcggcagcaccaggaggaagaggaggcccggcggcgggaggagaagcgcctacgaagactggagaaaaagagaaggaatctaatgctggacgatgtaattgcttccggcagctcagccagcgctgcgtcagaagcccagtgcaaaccttactactccgactactcccgcttccggctcctcgtccaccacttgtgcaccagccactacctggacctcttcatcacaggtgtcatcgggctgaacgtggtcaccatggccatggagcactaccagcagccccagattctggatgaggctctgaagatctgcaactacatcttcactgtcatctttgtcttggagtcagttttcaaacttgtggcctttggtttccgtcggttcttccaggacaggtggaaccagctggacctggccattgtgctgctgtccatcatgggcatcacgctggaggaaatcgaggtcaacgcctcgctgcccatcaaccccaccatcatccgcatcatgagggtgctgcgcattgcccgagtgctgaagctgctgaagatggctgtgggcatgcgggcgctgctggacacggtgatgcaggccctgccccaggtggggaacctgggacttctcttcatgttgttgtttttcatctttgcagctctgggcgtggagctctttggagacctggagtgtgacgagacacacccctgtgagggcctgggccgtcatgccacctttcggaactttggcatggccttcctaaccctcttccgagtctccacaggtgacaattggaatggcattatgaaggacaccctccgggactgtgaccaggagtccacctgctacaacacggtcatctcgcctatctactttgtgtccttcgtgctgacggcccagttcgtgctagtcaacgtggtgatcgccgtgctgatgaagcacctggaggagagcaacaaggaggccaaggaggaggccgagctagaggctgagctggagctggagatgaagaccctcagcccccagccccactcgccactgggcagccccttcctctggcctggggtcgagggccccgacagccccgacagccccaagcctggggctctgcacccagcggcccacgcgagatcagcctcccacttttccctggagcaccccacggacaggcagctgtttgacaccatatccctgctgatccagggctccctggagtgggagctgaagctgatggacgagctggcaggcccagggggccagccctctgccttcccttctgcccccagcctgggaggctccgacccacagatccctctagctgagatggaggctctgtctctgacgtcagagattgtgtctgaaccgtcctgctctctagctctgacggatgactctttgcctgatgacatgcacacactcttacttagtgccctggagagcaatatgcagccccaccccacggagctgccaggaccagacttactgactgtgcggaagtctggggtcagccgaacgcactctctgcccaatgacagctacatgtgtcggcatgggagcactgccgaggggcccctgggacacaggggctgggggctccccaaagctcagtcaggctccgtcttgtccgttcactcccagccagcagataccagctacatcctgcagcttcccaaagatgcacctcatctgctccagccccacagcgccccaacctggggcaccatccccaaactgcccccaccaggacgctcccctttggctcagaggccactcaggcgccaggcagcaataaggactgactccttggacgttcagggtctgggcagccgggaagacctgctggcagaggtgagtgggccctccccgcccctggcccgggcctactctttctggggccagtcaagtacccaggcacagcagcactcccgcagccacagcaagatctccaagcacatgaccccgccagccccttgcccaggcccagaacccaactggggcaagggccctccagagaccagaagcagcttagagttggacacggagctgagctggatttcaggagacctcctgccccctggcggccaggaggagcccccatccccacgggacctgaagaagtgctacagcgtggaggcccagagctgccagcgccggcccacgtcctggctggatgagcagaggagacactctatcgccgtcagctgcctggacagcggctcccaaccccacctgggcacagacccctctaaccttgggggccagcctcttggggggcctgggagccggcccaagaaaaaactcagcccgcctagtatcaccatagacccccccgagagccaaggtcctcggaccccgcccagccctggtatctgcctccggaggagggctccgtccagcgactccaaggatcccttggcctctggcccccctgacagcatggctgcctcgccctccccaaagaaagatgtgctgagtctctccggtttatcctctgacccagcagacctggacccctgagtcctgccccactttcccactcacctttctccactgggtgccaagtcctagctcctcctcctgggctatattcctgacaaaagttccatatagacaccaaggaggcggaggcgctcctccctgcctcagtggctctgggtacctgcaagcagaacttccaaagagagttaaaagcagcagccccggcaactctggctccaggcagaaggagaggcccggtgcagctgaggttcccgacaccagaagctgttgggagaaagcaatacgtttgtgcagaatctctatgtatattctattttattaaattaattgaatctagtatatgcgggatgtacgacattttgtgactgaagagacttgtttccttctacttttatgtgtctcagaatatttttgaggcgaaggcgtctgtctcttggctattttaacctaaaataacagtctagttatattccctcttcttgcaaagcacaagctgggaccgcgagcacattgcagccccaacggtggcccatcttcagcggagagcgagaaccattttggaaactgtaatgtaacttattttttcctttaacctcgtcatcattttctgtagggaaaaaaaaaagaaaaagaaaaaatgagattttacaagtgaaatggaacctttttatatatacatacatacatatctatctatctatctatatatatataaaataaagtaattttcct

SEQ ID NO: 424731 - DNA, 7479 bp, Homo sapiens
ccttttcgttcgccctctcggggcggcttcgccgaaggtagcgccgaatccggcaaccggagcctgggcgcgaagcgaagaagccggaacaaagtgagggggagccggccggctggcccgggaagccccaggggcgcaggggaagcgggactcgcgccgggcggggtttccctgcgccccggcgccccgcgggcagcatgcccctgcgggcagggggagctgggctgaactggccctcccgggggctcagcttgcgccctagagcccaccagatgtgcccccgccggggcccccgggttgcgtgaggacacctcctctgaggggcgccgcttgcccctctccggatcgcccggggccccggctggccagaggatggacgaggaggaggatggagcgggcgccgaggagtcgggacagccccggagcttcatgcggctcaacgacctgtcgggggccgggggccggccggggccggggtcagcagaaaaggacccgggcagcgcggactccgaggcggaggggctgccgtacccggcgctggccccggtggttttcttctacttgagccaggacagccgcccgcggagctggtgtctccgcacggtctgtaacccctggtttgagcgcatcagcatgttggtcatccttctcaactgcgtgaccctgggcatgttccggccatgcgaggacatcgcctgtgactcccagcgctgccggatcctgcaggcctttgatgacttcatctttgccttctttgccgtggagatggtggtgaagatggtggccttgggcatctttgggaaaaagtgttacctgggagacacttggaaccggcttgactttttcatcgtcatcgcagggatgctggagtactcgctggacctgcagaacgtcagcttctcagctgtcaggacagtccgtgtgctgcgaccgctcagggccattaaccgggtgcccagcatgcgcatccttgtcacgttgctgctggatacgctgcccatgctgggcaacgtcctgctgctctgcttcttcgtcttcttcatcttcggcatcgtcggcgtccagctgtgggcagggctgcttcggaaccgatgcttcctacctgagaatttcagcctccccctgagcgtggacctggagcgctattaccagacagagaacgaggatgagagccccttcatctgctcccagccacgcgagaacggcatgcggtcctgcagaagcgtgcccacgctgcgcggggacgggggcggtggcccaccttgcggtctggactatgaggcctacaacagctccagcaacaccacctgtgtcaactggaaccagtactacaccaactgctcagcgggggagcacaaccccttcaagggcgccatcaactttgacaacattggctatgcctggatcgccatcttccaggtcatcacgctggagggctgggtcgacatcatgtactttgtgatggatgctcattccttctacaatttcatctacttcatcctcctcatcatcgtgggctccttcttcatgatcaacctgtgcctggtggtgattgccacgcagttctcagagaccaagcagcgggaaagccagctgatgcgggagcagcgtgtgcggttcctgtccaacgccagcaccctggctagcttctctgagcccggcagctgctatgaggagctgctcaagtacctggtgtacatccttcgtaaggcagcccgcaggctggctcaggtctctcgggcagcaggtgtgcgggttgggctgctcagcagcccagcacccctcgggggccaggagacccagcccagcagcagctgctctcgctcccaccgccgcctatccgtccaccacctggtgcaccaccaccaccaccatcaccaccactaccacctgggcaatgggacgctcagggccccccgggccagcccggagatccaggacagggatgccaatgggtcccgccggctcatgctgccaccaccctcgacgcctgccctctccggggccccccctggtggcgcagagtctgtgcacagcttctaccatgccgactgccacttagagccagtccgctgccaggcgccccctcccaggtccccatctgaggcatccggcaggactgtgggcagcgggaaggtgtatcccaccgtgcacaccagccctccaccggagacgctgaaggagaaggcactagtagaggtggctgccagctctgggcccccaaccctcaccagcctcaacatcccacccgggccctacagctccatgcacaagctgctggagacacagagtacaggtgcctgccaaagctcttgcaagatctccagcccttgcttgaaagcagacagtggagcctgtggtccagacagctgcccctactgtgcccgggccggggcaggggaggtggagctcgccgaccgtgaaatgcctgactcagacagcgaggcagtttatgagttcacacaggatgcccagcacagcgacctccgggacccccacagccggcggcaacggagcctgggcccagatgcagagcccagctctgtgctggccttctggaggctaatctgtgacaccttccgaaagattgtggacagcaagtactttggccggggaatcatgatcgccatcctggtcaacacactcagcatgggcatcgaataccacgagcagcccgaggagcttaccaacgccctagaaatcagcaacatcgtcttcaccagcctctttgccctggagatgctgctgaagctgcttgtgtatggtccctttggctacatcaagaatccctacaacatcttcgatggtgtcattgtggtcatcagcgtgtgggagatcgtgggccagcaggggggcggcctgtcggtgctgcggaccttccgcctgatgcgtgtgctgaagctggtgcgcttcctgccggcgctgcagcggcagctggtggtgctcatgaagaccatggacaacgtggccaccttctgcatgctgcttatgctcttcatcttcatcttcagcatcctgggcatgcatctcttcggctgcaagtttgcctctgagcgggatggggacaccctgccagaccggaagaattttgactccttgctctgggccatcgtcactgtctttcagatcctgacccaggaggactggaacaaagtcctctacaatggtatggcctccacgtcgtcctgggcggccctttatttcattgccctcatgaccttcggcaactacgtgctcttcaatttgctggtcgccattctggtggagggcttccaggcggagggagatgccaacaagtccgaatcagagcccgatttcttctcacccagcctggatggtgatggggacaggaagaagtgcttggccttggtgtccctgggagagcacccggagctgcggaagagcctgctgccgcctctcatcatccacacggccgccacacccatgtcgctgcccaagagcaccagcacgggcctgggcgaggcgctgggccctgcgtcgcgccgcaccagcagcagcgggtcggcagagcctggggcggcccacgagatgaagtcaccgcccagcgcccgcagctctccgcacagcccctggagcgctgcaagcagctggaccagcaggcgctccagccggaacagcctcggccgtgcacccagcctgaagcggagaagcccaagtggagagcggcggtccctgttgtcgggagaaggccaggagagccaggatgaagaggagagctcagaagaggagcgggccagccctgcgggcagtgaccatcgccacagggggtccctggagcgggaggccaagagttcctttgacctgccagacacactgcaggtgccagggctgcatcgcactgccagtggccgagggtctgcttctgagcaccaggactgcaatggcaagtcggcttcagggcgcctggcccgggccctgcggcctgatgaccccccactggatggggatgacgccgatgacgagggcaacctgagcaaaggggaacgggtccgcgcgtggatccgagcccgactccctgcctgctgcctcgagcgagactcctggtcagcctacatcttccctcctcagtccaggttccgcctcctgtgtcaccggatcatcacccacaagatgttcgaccacgtggtccttgtcatcatcttccttaactgcatcaccatcgccatggagcgccccaaaattgacccccacagcgctgaacgcatcttcctgaccctctccaattacatcttcaccgcagtctttctggctgaaatgacagtgaaggtggtggcactgggctggtgcttcggggagcaggcgtacctgcggagcagttggaacgtgctggacgggctgttggtgctcatctccgtcatcgacattctggtgtccatggtctctgacagcggcaccaagatcctgggcatgctgagggtgctgcggctgctgcggaccctgcgcccgctcagggtgatcagccgggcgcaggggctgaagctggtggtggagacgctgatgtcctcactgaaacccatcggcaacattgtagtcatctgctgtgccttcttcatcattttcggcatcttgggggtgcagctcttcaaagggaagtttttcgtgtgccagggcgaggataccaggaacatcaccaataaatcggactgtgccgaggccagttaccggtgggtccggcacaagtacaactttgacaaccttggccaggccctgatgtccctgttcgttttggcctccaaggatggttgggtggacatcatgtacgatgggctggatgctgtgggcgtggaccagcagcccatcatgaaccacaacccctggatgctgctgtacttcatctcgttcctgctcattgtggccttctttgtcctgaacatgtttgtgggtgtggtggtggagaacttccacaagtgtcggcagcaccaggaggaagaggaggcccggcggcgggaggagaagcgcctacgaagactggagaaaaagagaaggaatctaatgctggacgatgtaattgcttccggcagctcagccagcgctgcgtcagaagcccagtgcaaaccttactactccgactactcccgcttccggctcctcgtccaccacttgtgcaccagccactacctggacctcttcatcacaggtgtcatcgggctgaacgtggtcaccatggccatggagcactaccagcagccccagattctggatgaggctctgaagatctgcaactacatcttcactgtcatctttgtcttggagtcagttttcaaacttgtggcctttggtttccgtcggttcttccaggacaggtggaaccagctggacctggccattgtgctgctgtccatcatgggcatcacgctggaggaaatcgaggtcaacgcctcgctgcccatcaaccccaccatcatccgcatcatgagggtgctgcgcattgcccgagtgctgaagctgctgaagatggctgtgggcatgcgggcgctgctggacacggtgatgcaggccctgccccaggtggggaacctgggacttctcttcatgttgttgtttttcatctttgcagctctgggcgtggagctctttggagacctggagtgtgacgagacacacccctgtgagggcctgggccgtcatgccacctttcggaactttggcatggccttcctaaccctcttccgagtctccacaggtgacaattggaatggcattatgaaggacaccctccgggactgtgaccaggagtccacctgctacaacacggtcatctcgcctatctactttgtgtccttcgtgctgacggcccagttcgtgctagtcaacgtggtgatcgccgtgctgatgaagcacctggaggagagcaacaaggaggccaaggaggaggccgagctagaggctgagctggagctggagatgaagaccctcagcccccagccccactcgccactgggcagccccttcctctggcctggggtcgagggccccgacagccccgacagccccaagcctggggctctgcacccagcggcccacgcgagatcagcctcccacttttccctggagcaccccacgatgcagccccaccccacggagctgccaggaccagacttactgactgtgcggaagtctggggtcagccgaacgcactctctgcccaatgacagctacatgtgtcggcatgggagcactgccgaggggcccctgggacacaggggctgggggctccccaaagctcagtcaggctccgtcttgtccgttcactcccagccagcagataccagctacatcctgcagcttcccaaagatgcacctcatctgctccagccccacagcgccccaacctggggcaccatccccaaactgcccccaccaggacgctcccctttggctcagaggccactcaggcgccaggcagcaataaggactgactccttggacgttcagggtctgggcagccgggaagacctgctggcagaggtgagtgggccctccccgcccctggcccgggcctactctttctggggccagtcaagtacccaggcacagcagcactcccgcagccacagcaagatctccaagcacatgaccccgccagccccttgcccaggcccagaacccaactggggcaagggccctccagagaccagaagcagcttagagttggacacggagctgagctggatttcaggagacctcctgccccctggcggccaggaggagcccccatccccacgggacctgaagaagtgctacagcgtggaggcccagagctgccagcgccggcccacgtcctggctggatgagcagaggagacactctatcgccgtcagctgcctggacagcggctcccaaccccacctgggcacagacccctctaaccttgggggccagcctcttggggggcctgggagccggcccaagaaaaaactcagcccgcctagtatcaccatagacccccccgagagccaaggtcctcggaccccgcccagccctggtatctgcctccggaggagggctccgtccagcgactccaaggatcccttggcctctggcccccctgacagcatggctgcctcgccctccccaaagaaagatgtgctgagtctctccggtttatcctctgacccagcagacctggacccctgagtcctgccccactttcccactcacctttctccactgggtgccaagtcctagctcctcctcctgggctatattcctgacaaaagttccatatagacaccaaggaggcggaggcgctcctccctgcctcagtggctctgggtacctgcaagcagaacttccaaagagagttaaaagcagcagccccggcaactctggctccaggcagaaggagaggcccggtgcagctgaggttcccgacaccagaagctgttgggagaaagcaatacgtttgtgcagaatctctatgtatattctattttattaaattaattgaatctagta

SEQ ID NO: 424732 - DNA, 7590 bp, Homo sapiens
ccttttcgttcgccctctcggggcggcttcgccgaaggtagcgccgaatccggcaaccggagcctgggcgcgaagcgaagaagccggaacaaagtgagggggagccggccggctggcccgggaagccccaggggcgcaggggaagcgggactcgcgccgggcggggtttccctgcgccccggcgccccgcgggcagcatgcccctgcgggcagggggagctgggctgaactggccctcccgggggctcagcttgcgccctagagcccaccagatgtgcccccgccggggcccccgggttgcgtgaggacacctcctctgaggggcgccgcttgcccctctccggatcgcccggggccccggctggccagaggatggacgaggaggaggatggagcgggcgccgaggagtcgggacagccccggagcttcatgcggctcaacgacctgtcgggggccgggggccggccggggccggggtcagcagaaaaggacccgggcagcgcggactccgaggcggaggggctgccgtacccggcgctggccccggtggttttcttctacttgagccaggacagccgcccgcggagctggtgtctccgcacggtctgtaacccctggtttgagcgcatcagcatgttggtcatccttctcaactgcgtgaccctgggcatgttccggccatgcgaggacatcgcctgtgactcccagcgctgccggatcctgcaggcctttgatgacttcatctttgccttctttgccgtggagatggtggtgaagatggtggccttgggcatctttgggaaaaagtgttacctgggagacacttggaaccggcttgactttttcatcgtcatcgcagggatgctggagtactcgctggacctgcagaacgtcagcttctcagctgtcaggacagtccgtgtgctgcgaccgctcagggccattaaccgggtgcccagcatgcgcatccttgtcacgttgctgctggatacgctgcccatgctgggcaacgtcctgctgctctgcttcttcgtcttcttcatcttcggcatcgtcggcgtccagctgtgggcagggctgcttcggaaccgatgcttcctacctgagaatttcagcctccccctgagcgtggacctggagcgctattaccagacagagaacgaggatgagagccccttcatctgctcccagccacgcgagaacggcatgcggtcctgcagaagcgtgcccacgctgcgcggggacgggggcggtggcccaccttgcggtctggactatgaggcctacaacagctccagcaacaccacctgtgtcaactggaaccagtactacaccaactgctcagcgggggagcacaaccccttcaagggcgccatcaactttgacaacattggctatgcctggatcgccatcttccaggtcatcacgctggagggctgggtcgacatcatgtactttgtgatggatgctcattccttctacaatttcatctacttcatcctcctcatcatcgtgggctccttcttcatgatcaacctgtgcctggtggtgattgccacgcagttctcagagaccaagcagcgggaaagccagctgatgcgggagcagcgtgtgcggttcctgtccaacgccagcaccctggctagcttctctgagcccggcagctgctatgaggagctgctcaagtacctggtgtacatccttcgtaaggcagcccgcaggctggctcaggtctctcgggcagcaggtgtgcgggttgggctgctcagcagcccagcacccctcgggggccaggagacccagcccagcagcagctgctctcgctcccaccgccgcctatccgtccaccacctggtgcaccaccaccaccaccatcaccaccactaccacctgggcaatgggacgctcagggccccccgggccagcccggagatccaggacagggatgccaatgggtcccgccggctcatgctgccaccaccctcgacgcctgccctctccggggccccccctggtggcgcagagtctgtgcacagcttctaccatgccgactgccacttagagccagtccgctgccaggcgccccctcccaggtccccatctgaggcatccggcaggactgtgggcagcgggaaggtgtatcccaccgtgcacaccagccctccaccggagacgctgaaggagaaggcactagtagaggtggctgccagctctgggcccccaaccctcaccagcctcaacatcccacccgggccctacagctccatgcacaagctgctggagacacagagtacaggtgcctgccaaagctcttgcaagatctccagcccttgcttgaaagcagacagtggagcctgtggtccagacagctgcccctactgtgcccgggccggggcaggggaggtggagctcgccgaccgtgaaatgcctgactcagacagcgaggcagtttatgagttcacacaggatgcccagcacagcgacctccgggacccccacagccggcggcaacggagcctgggcccagatgcagagcccagctctgtgctggccttctggaggctaatctgtgacaccttccgaaagattgtggacagcaagtactttggccggggaatcatgatcgccatcctggtcaacacactcagcatgggcatcgaataccacgagcagcccgaggagcttaccaacgccctagaaatcagcaacatcgtcttcaccagcctctttgccctggagatgctgctgaagctgcttgtgtatggtccctttggctacatcaagaatccctacaacatcttcgatggtgtcattgtggtcatcagcgtgtgggagatcgtgggccagcaggggggcggcctgtcggtgctgcggaccttccgcctgatgcgtgtgctgaagctggtgcgcttcctgccggcgctgcagcggcagctggtggtgctcatgaagaccatggacaacgtggccaccttctgcatgctgcttatgctcttcatcttcatcttcagcatcctgggcatgcatctcttcggctgcaagtttgcctctgagcgggatggggacaccctgccagaccggaagaattttgactccttgctctgggccatcgtcactgtctttcagatcctgacccaggaggactggaacaaagtcctctacaatggtatggcctccacgtcgtcctgggcggccctttatttcattgccctcatgaccttcggcaactacgtgctcttcaatttgctggtcgccattctggtggagggcttccaggcggagggagatgccaacaagtccgaatcagagcccgatttcttctcacccagcctggatggtgatggggacaggaagaagtgcttggccttggtgtccctgggagagcacccggagctgcggaagagcctgctgccgcctctcatcatccacacggccgccacacccatgtcgctgcccaagagcaccagcacgggcctgggcgaggcgctgggccctgcgtcgcgccgcaccagcagcagcgggtcggcagagcctggggcggcccacgagatgaagtcaccgcccagcgcccgcagctctccgcacagcccctggagcgctgcaagcagctggaccagcaggcgctccagccggaacagcctcggccgtgcacccagcctgaagcggagaagcccaagtggagagcggcggtccctgttgtcgggagaaggccaggagagccaggatgaagaggagagctcagaagaggagcgggccagccctgcgggcagtgaccatcgccacagggggtccctggagcgggaggccaagagttcctttgacctgccagacacactgcaggtgccagggctgcatcgcactgccagtggccgagggtctgcttctgagcaccaggactgcaatggcaagtcggcttcagggcgcctggcccgggccctgcggcctgatgaccccccactggatggggatgacgccgatgacgagggcaacctgagcaaaggggaacgggtccgcgcgtggatccgagcccgactccctgcctgctgcctcgagcgagactcctggtcagcctacatcttccctcctcagtccaggttccgcctcctgtgtcaccggatcatcacccacaagatgttcgaccacgtggtccttgtcatcatcttccttaactgcatcaccatcgccatggagcgccccaaaattgacccccacagcgctgaacgcatcttcctgaccctctccaattacatcttcaccgcagtctttctggctgaaatgacagtgaaggtggtggcactgggctggtgcttcggggagcaggcgtacctgcggagcagttggaacgtgctggacgggctgttggtgctcatctccgtcatcgacattctggtgtccatggtctctgacagcggcaccaagatcctgggcatgctgagggtgctgcggctgctgcggaccctgcgcccgctcagggtgatcagccgggcgcaggggctgaagctggtggtggagacgctgatgtcctcactgaaacccatcggcaacattgtagtcatctgctgtgccttcttcatcattttcggcatcttgggggtgcagctcttcaaagggaagtttttcgtgtgccagggcgaggataccaggaacatcaccaataaatcggactgtgccgaggccagttaccggtgggtccggcacaagtacaactttgacaaccttggccaggccctgatgtccctgttcgttttggcctccaaggatggttgggtggacatcatgtacgatgggctggatgctgtgggcgtggaccagcagcccatcatgaaccacaacccctggatgctgctgtacttcatctcgttcctgctcattgtggccttctttgtcctgaacatgtttgtgggtgtggtggtggagaacttccacaagtgtcggcagcaccaggaggaagaggaggcccggcggcgggaggagaagcgcctacgaagactggagaaaaagagaaggagtaaggagaagcagatggctgaagcccagtgcaaaccttactactccgactactcccgcttccggctcctcgtccaccacttgtgcaccagccactacctggacctcttcatcacaggtgtcatcgggctgaacgtggtcaccatggccatggagcactaccagcagccccagattctggatgaggctctgaagatctgcaactacatcttcactgtcatctttgtcttggagtcagttttcaaacttgtggcctttggtttccgtcggttcttccaggacaggtggaaccagctggacctggccattgtgctgctgtccatcatgggcatcacgctggaggaaatcgaggtcaacgcctcgctgcccatcaaccccaccatcatccgcatcatgagggtgctgcgcattgcccgagtgctgaagctgctgaagatggctgtgggcatgcgggcgctgctggacacggtgatgcaggccctgccccaggtggggaacctgggacttctcttcatgttgttgtttttcatctttgcagctctgggcgtggagctctttggagacctggagtgtgacgagacacacccctgtgagggcctgggccgtcatgccacctttcggaactttggcatggccttcctaaccctcttccgagtctccacaggtgacaattggaatggcattatgaaggacaccctccgggactgtgaccaggagtccacctgctacaacacggtcatctcgcctatctactttgtgtccttcgtgctgacggcccagttcgtgctagtcaacgtggtgatcgccgtgctgatgaagcacctggaggagagcaacaaggaggccaaggaggaggccgagctagaggctgagctggagctggagatgaagaccctcagcccccagccccactcgccactgggcagccccttcctctggcctggggtcgagggccccgacagccccgacagccccaagcctggggctctgcacccagcggcccacgcgagatcagcctcccacttttccctggagcaccccacggacaggcagctgtttgacaccatatccctgctgatccagggctccctggagtgggagctgaagctgatggacgagctggcaggcccagggggccagccctctgccttcccttctgcccccagcctgggaggctccgacccacagatgcagccccaccccacggagctgccaggaccagacttactgactgtgcggaagtctggggtcagccgaacgcactctctgcccaatgacagctacatgtgtcggcatgggagcactgccgaggggcccctgggacacaggggctgggggctccccaaagctcagtcaggctccgtcttgtccgttcactcccagccagcagataccagctacatcctgcagcttcccaaagatgcacctcatctgctccagccccacagcgccccaacctggggcaccatccccaaactgcccccaccaggacgctcccctttggctcagaggccactcaggcgccaggcagcaataaggactgactccttggacgttcagggtctgggcagccgggaagacctgctggcagaggtgagtgggccctccccgcccctggcccgggcctactctttctggggccagtcaagtacccaggcacagcagcactcccgcagccacagcaagatctccaagcacatgaccccgccagccccttgcccaggcccagaacccaactggggcaagggccctccagagaccagaagcagcttagagttggacacggagctgagctggatttcaggagacctcctgccccctggcggccaggaggagcccccatccccacgggacctgaagaagtgctacagcgtggaggcccagagctgccagcgccggcccacgtcctggctggatgagcagaggagacactctatcgccgtcagctgcctggacagcggctcccaaccccacctgggcacagacccctctaaccttgggggccagcctcttggggggcctgggagccggcccaagaaaaaactcagcccgcctagtatcaccatagacccccccgagagccaaggtcctcggaccccgcccagccctggtatctgcctccggaggagggctccgtccagcgactccaaggatcccttggcctctggcccccctgacagcatggctgcctcgccctccccaaagaaagatgtgctgagtctctccggtttatcctctgacccagcagacctggacccctgagtcctgccccactttcccactcacctttctccactgggtgccaagtcctagctcctcctcctgggctatattcctgacaaaagttccatatagacaccaaggaggcggaggcgctcctccctgcctcagtggctctgggtacctgcaagcagaacttccaaagagagttaaaagcagcagccccggcaactctggctccaggcagaaggagaggcccggtgcagctgaggttcccgacaccagaagctgttgggagaaagcaatacgtttgtgcagaatctctatgtatattctattttattaaattaattgaatctagta

SEQ ID NO: 424733 - DNA, 7548 bp, Homo sapiens
ccttttcgttcgccctctcggggcggcttcgccgaaggtagcgccgaatccggcaaccggagcctgggcgcgaagcgaagaagccggaacaaagtgagggggagccggccggctggcccgggaagccccaggggcgcaggggaagcgggactcgcgccgggcggggtttccctgcgccccggcgccccgcgggcagcatgcccctgcgggcagggggagctgggctgaactggccctcccgggggctcagcttgcgccctagagcccaccagatgtgcccccgccggggcccccgggttgcgtgaggacacctcctctgaggggcgccgcttgcccctctccggatcgcccggggccccggctggccagaggatggacgaggaggaggatggagcgggcgccgaggagtcgggacagccccggagcttcatgcggctcaacgacctgtcgggggccgggggccggccggggccggggtcagcagaaaaggacccgggcagcgcggactccgaggcggaggggctgccgtacccggcgctggccccggtggttttcttctacttgagccaggacagccgcccgcggagctggtgtctccgcacggtctgtaacccctggtttgagcgcatcagcatgttggtcatccttctcaactgcgtgaccctgggcatgttccggccatgcgaggacatcgcctgtgactcccagcgctgccggatcctgcaggcctttgatgacttcatctttgccttctttgccgtggagatggtggtgaagatggtggccttgggcatctttgggaaaaagtgttacctgggagacacttggaaccggcttgactttttcatcgtcatcgcagggatgctggagtactcgctggacctgcagaacgtcagcttctcagctgtcaggacagtccgtgtgctgcgaccgctcagggccattaaccgggtgcccagcatgcgcatccttgtcacgttgctgctggatacgctgcccatgctgggcaacgtcctgctgctctgcttcttcgtcttcttcatcttcggcatcgtcggcgtccagctgtgggcagggctgcttcggaaccgatgcttcctacctgagaatttcagcctccccctgagcgtggacctggagcgctattaccagacagagaacgaggatgagagccccttcatctgctcccagccacgcgagaacggcatgcggtcctgcagaagcgtgcccacgctgcgcggggacgggggcggtggcccaccttgcggtctggactatgaggcctacaacagctccagcaacaccacctgtgtcaactggaaccagtactacaccaactgctcagcgggggagcacaaccccttcaagggcgccatcaactttgacaacattggctatgcctggatcgccatcttccaggtcatcacgctggagggctgggtcgacatcatgtactttgtgatggatgctcattccttctacaatttcatctacttcatcctcctcatcatcgtgggctccttcttcatgatcaacctgtgcctggtggtgattgccacgcagttctcagagaccaagcagcgggaaagccagctgatgcgggagcagcgtgtgcggttcctgtccaacgccagcaccctggctagcttctctgagcccggcagctgctatgaggagctgctcaagtacctggtgtacatccttcgtaaggcagcccgcaggctggctcaggtctctcgggcagcaggtgtgcgggttgggctgctcagcagcccagcacccctcgggggccaggagacccagcccagcagcagctgctctcgctcccaccgccgcctatccgtccaccacctggtgcaccaccaccaccaccatcaccaccactaccacctgggcaatgggacgctcagggccccccgggccagcccggagatccaggacagggatgccaatgggtcccgccggctcatgctgccaccaccctcgacgcctgccctctccggggccccccctggtggcgcagagtctgtgcacagcttctaccatgccgactgccacttagagccagtccgctgccaggcgccccctcccaggtccccatctgaggcatccggcaggactgtgggcagcgggaaggtgtatcccaccgtgcacaccagccctccaccggagacgctgaaggagaaggcactagtagaggtggctgccagctctgggcccccaaccctcaccagcctcaacatcccacccgggccctacagctccatgcacaagctgctggagacacagagtacaggtgcctgccaaagctcttgcaagatctccagcccttgcttgaaagcagacagtggagcctgtggtccagacagctgcccctactgtgcccgggccggggcaggggaggtggagctcgccgaccgtgaaatgcctgactcagacagcgaggcagtttatgagttcacacaggatgcccagcacagcgacctccgggacccccacagccggcggcaacggagcctgggcccagatgcagagcccagctctgtgctggccttctggaggctaatctgtgacaccttccgaaagattgtggacagcaagtactttggccggggaatcatgatcgccatcctggtcaacacactcagcatgggcatcgaataccacgagcagcccgaggagcttaccaacgccctagaaatcagcaacatcgtcttcaccagcctctttgccctggagatgctgctgaagctgcttgtgtatggtccctttggctacatcaagaatccctacaacatcttcgatggtgtcattgtggtcatcagcgtgtgggagatcgtgggccagcaggggggcggcctgtcggtgctgcggaccttccgcctgatgcgtgtgctgaagctggtgcgcttcctgccggcgctgcagcggcagctggtggtgctcatgaagaccatggacaacgtggccaccttctgcatgctgcttatgctcttcatcttcatcttcagcatcctgggcatgcatctcttcggctgcaagtttgcctctgagcgggatggggacaccctgccagaccggaagaattttgactccttgctctgggccatcgtcactgtctttcagatcctgacccaggaggactggaacaaagtcctctacaatggtatggcctccacgtcgtcctgggcggccctttatttcattgccctcatgaccttcggcaactacgtgctcttcaatttgctggtcgccattctggtggagggcttccaggcggaggaaatcagcaaacgggaagatgcgagtggacagttaagctgtattcagctgcctgtcgactcccaggggggagatgccaacaagtccgaatcagagcccgatttcttctcacccagcctggatggtgatggggacaggaagaagtgcttggccttggtgtccctgggagagcacccggagctgcggaagagcctgctgccgcctctcatcatccacacggccgccacacccatgtcgctgcccaagagcaccagcacgggcctgggcgaggcgctgggccctgcgtcgcgccgcaccagcagcagcgggtcggcagagcctggggcggcccacgagatgaagtcaccgcccagcgcccgcagctctccgcacagcccctggagcgctgcaagcagctggaccagcaggcgctccagccggaacagcctcggccgtgcacccagcctgaagcggagaagcccaagtggagagcggcggtccctgttgtcgggagaaggccaggagagccaggatgaagaggagagctcagaagaggagcgggccagccctgcgggcagtgaccatcgccacagggggtccctggagcgggaggccaagagttcctttgacctgccagacacactgcaggtgccagggctgcatcgcactgccagtggccgagggtctgcttctgagcaccaggactgcaatggcaagtcggcttcagggcgcctggcccgggccctgcggcctgatgaccccccactggatggggatgacgccgatgacgagggcaacctgagcaaaggggaacgggtccgcgcgtggatccgagcccgactccctgcctgctgcctcgagcgagactcctggtcagcctacatcttccctcctcagtccaggttccgcctcctgtgtcaccggatcatcacccacaagatgttcgaccacgtggtccttgtcatcatcttccttaactgcatcaccatcgccatggagcgccccaaaattgacccccacagcgctgaacgcatcttcctgaccctctccaattacatcttcaccgcagtctttctggctgaaatgacagtgaaggtggtggcactgggctggtgcttcggggagcaggcgtacctgcggagcagttggaacgtgctggacgggctgttggtgctcatctccgtcatcgacattctggtgtccatggtctctgacagcggcaccaagatcctgggcatgctgagggtgctgcggctgctgcggaccctgcgcccgctcagggtgatcagccgggcgcaggggctgaagctggtggtggagacgctgatgtcctcactgaaacccatcggcaacattgtagtcatctgctgtgccttcttcatcattttcggcatcttgggggtgcagctcttcaaagggaagtttttcgtgtgccagggcgaggataccaggaacatcaccaataaatcggactgtgccgaggccagttaccggtgggtccggcacaagtacaactttgacaaccttggccaggccctgatgtccctgttcgttttggcctccaaggatggttgggtggacatcatgtacgatgggctggatgctgtgggcgtggaccagcagcccatcatgaaccacaacccctggatgctgctgtacttcatctcgttcctgctcattgtggccttctttgtcctgaacatgtttgtgggtgtggtggtggagaacttccacaagtgtcggcagcaccaggaggaagaggaggcccggcggcgggaggagaagcgcctacgaagactggagaaaaagagaaggaatctaatgctggacgatgtaattgcttccggcagctcagccagcgctgcgtcagaagcccagtgcaaaccttactactccgactactcccgcttccggctcctcgtccaccacttgtgcaccagccactacctggacctcttcatcacaggtgtcatcgggctgaacgtggtcaccatggccatggagcactaccagcagccccagattctggatgaggctctgaagatctgcaactacatcttcactgtcatctttgtcttggagtcagttttcaaacttgtggcctttggtttccgtcggttcttccaggacaggtggaaccagctggacctggccattgtgctgctgtccatcatgggcatcacgctggaggaaatcgaggtcaacgcctcgctgcccatcaaccccaccatcatccgcatcatgagggtgctgcgcattgcccgagtgctgaagctgctgaagatggctgtgggcatgcgggcgctgctggacacggtgatgcaggccctgccccaggtggggaacctgggacttctcttcatgttgttgtttttcatctttgcagctctgggcgtggagctctttggagacctggagtgtgacgagacacacccctgtgagggcctgggccgtcatgccacctttcggaactttggcatggccttcctaaccctcttccgagtctccacaggtgacaattggaatggcattatgaaggacaccctccgggactgtgaccaggagtccacctgctacaacacggtcatctcgcctatctactttgtgtccttcgtgctgacggcccagttcgtgctagtcaacgtggtgatcgccgtgctgatgaagcacctggaggagagcaacaaggaggccaaggaggaggccgagctagaggctgagctggagctggagatgaagaccctcagcccccagccccactcgccactgggcagccccttcctctggcctggggtcgagggccccgacagccccgacagccccaagcctggggctctgcacccagcggcccacgcgagatcagcctcccacttttccctggagcaccccacgatgcagccccaccccacggagctgccaggaccagacttactgactgtgcggaagtctggggtcagccgaacgcactctctgcccaatgacagctacatgtgtcggcatgggagcactgccgaggggcccctgggacacaggggctgggggctccccaaagctcagtcaggctccgtcttgtccgttcactcccagccagcagataccagctacatcctgcagcttcccaaagatgcacctcatctgctccagccccacagcgccccaacctggggcaccatccccaaactgcccccaccaggacgctcccctttggctcagaggccactcaggcgccaggcagcaataaggactgactccttggacgttcagggtctgggcagccgggaagacctgctggcagaggtgagtgggccctccccgcccctggcccgggcctactctttctggggccagtcaagtacccaggcacagcagcactcccgcagccacagcaagatctccaagcacatgaccccgccagccccttgcccaggcccagaacccaactggggcaagggccctccagagaccagaagcagcttagagttggacacggagctgagctggatttcaggagacctcctgccccctggcggccaggaggagcccccatccccacgggacctgaagaagtgctacagcgtggaggcccagagctgccagcgccggcccacgtcctggctggatgagcagaggagacactctatcgccgtcagctgcctggacagcggctcccaaccccacctgggcacagacccctctaaccttgggggccagcctcttggggggcctgggagccggcccaagaaaaaactcagcccgcctagtatcaccatagacccccccgagagccaaggtcctcggaccccgcccagccctggtatctgcctccggaggagggctccgtccagcgactccaaggatcccttggcctctggcccccctgacagcatggctgcctcgccctccccaaagaaagatgtgctgagtctctccggtttatcctctgacccagcagacctggacccctgagtcctgccccactttcccactcacctttctccactgggtgccaagtcctagctcctcctcctgggctatattcctgacaaaagttccatatagacaccaaggaggcggaggcgctcctccctgcctcagtggctctgggtacctgcaagcagaacttccaaagagagttaaaagcagcagccccggcaactctggctccaggcagaaggagaggcccggtgcagctgaggttcccgacaccagaagctgttgggagaaagcaatacgtttgtgcagaatctctatgtatattctattttattaaattaattgaatctagta

SEQ ID NO: 424734 - DNA, 7515 bp, Homo sapiens
ccttttcgttcgccctctcggggcggcttcgccgaaggtagcgccgaatccggcaaccggagcctgggcgcgaagcgaagaagccggaacaaagtgagggggagccggccggctggcccgggaagccccaggggcgcaggggaagcgggactcgcgccgggcggggtttccctgcgccccggcgccccgcgggcagcatgcccctgcgggcagggggagctgggctgaactggccctcccgggggctcagcttgcgccctagagcccaccagatgtgcccccgccggggcccccgggttgcgtgaggacacctcctctgaggggcgccgcttgcccctctccggatcgcccggggccccggctggccagaggatggacgaggaggaggatggagcgggcgccgaggagtcgggacagccccggagcttcatgcggctcaacgacctgtcgggggccgggggccggccggggccggggtcagcagaaaaggacccgggcagcgcggactccgaggcggaggggctgccgtacccggcgctggccccggtggttttcttctacttgagccaggacagccgcccgcggagctggtgtctccgcacggtctgtaacccctggtttgagcgcatcagcatgttggtcatccttctcaactgcgtgaccctgggcatgttccggccatgcgaggacatcgcctgtgactcccagcgctgccggatcctgcaggcctttgatgacttcatctttgccttctttgccgtggagatggtggtgaagatggtggccttgggcatctttgggaaaaagtgttacctgggagacacttggaaccggcttgactttttcatcgtcatcgcagggatgctggagtactcgctggacctgcagaacgtcagcttctcagctgtcaggacagtccgtgtgctgcgaccgctcagggccattaaccgggtgcccagcatgcgcatccttgtcacgttgctgctggatacgctgcccatgctgggcaacgtcctgctgctctgcttcttcgtcttcttcatcttcggcatcgtcggcgtccagctgtgggcagggctgcttcggaaccgatgcttcctacctgagaatttcagcctccccctgagcgtggacctggagcgctattaccagacagagaacgaggatgagagccccttcatctgctcccagccacgcgagaacggcatgcggtcctgcagaagcgtgcccacgctgcgcggggacgggggcggtggcccaccttgcggtctggactatgaggcctacaacagctccagcaacaccacctgtgtcaactggaaccagtactacaccaactgctcagcgggggagcacaaccccttcaagggcgccatcaactttgacaacattggctatgcctggatcgccatcttccaggtcatcacgctggagggctgggtcgacatcatgtactttgtgatggatgctcattccttctacaatttcatctacttcatcctcctcatcatcgtgggctccttcttcatgatcaacctgtgcctggtggtgattgccacgcagttctcagagaccaagcagcgggaaagccagctgatgcgggagcagcgtgtgcggttcctgtccaacgccagcaccctggctagcttctctgagcccggcagctgctatgaggagctgctcaagtacctggtgtacatccttcgtaaggcagcccgcaggctggctcaggtctctcgggcagcaggtgtgcgggttgggctgctcagcagcccagcacccctcgggggccaggagacccagcccagcagcagctgctctcgctcccaccgccgcctatccgtccaccacctggtgcaccaccaccaccaccatcaccaccactaccacctgggcaatgggacgctcagggccccccgggccagcccggagatccaggacagggatgccaatgggtcccgccggctcatgctgccaccaccctcgacgcctgccctctccggggccccccctggtggcgcagagtctgtgcacagcttctaccatgccgactgccacttagagccagtccgctgccaggcgccccctcccaggtccccatctgaggcatccggcaggactgtgggcagcgggaaggtgtatcccaccgtgcacaccagccctccaccggagacgctgaaggagaaggcactagtagaggtggctgccagctctgggcccccaaccctcaccagcctcaacatcccacccgggccctacagctccatgcacaagctgctggagacacagagtacaggtgcctgccaaagctcttgcaagatctccagcccttgcttgaaagcagacagtggagcctgtggtccagacagctgcccctactgtgcccgggccggggcaggggaggtggagctcgccgaccgtgaaatgcctgactcagacagcgaggcagtttatgagttcacacaggatgcccagcacagcgacctccgggacccccacagccggcggcaacggagcctgggcccagatgcagagcccagctctgtgctggccttctggaggctaatctgtgacaccttccgaaagattgtggacagcaagtactttggccggggaatcatgatcgccatcctggtcaacacactcagcatgggcatcgaataccacgagcagcccgaggagcttaccaacgccctagaaatcagcaacatcgtcttcaccagcctctttgccctggagatgctgctgaagctgcttgtgtatggtccctttggctacatcaagaatccctacaacatcttcgatggtgtcattgtggtcatcagcgtgtgggagatcgtgggccagcaggggggcggcctgtcggtgctgcggaccttccgcctgatgcgtgtgctgaagctggtgcgcttcctgccggcgctgcagcggcagctggtggtgctcatgaagaccatggacaacgtggccaccttctgcatgctgcttatgctcttcatcttcatcttcagcatcctgggcatgcatctcttcggctgcaagtttgcctctgagcgggatggggacaccctgccagaccggaagaattttgactccttgctctgggccatcgtcactgtctttcagatcctgacccaggaggactggaacaaagtcctctacaatggtatggcctccacgtcgtcctgggcggccctttatttcattgccctcatgaccttcggcaactacgtgctcttcaatttgctggtcgccattctggtggagggcttccaggcggaggaaatcagcaaacgggaagatgcgagtggacagttaagctgtattcagctgcctgtcgactcccaggggggagatgccaacaagtccgaatcagagcccgatttcttctcacccagcctggatggtgatggggacaggaagaagtgcttggccttggtgtccctgggagagcacccggagctgcggaagagcctgctgccgcctctcatcatccacacggccgccacacccatgtcgctgcccaagagcaccagcacgggcctgggcgaggcgctgggccctgcgtcgcgccgcaccagcagcagcgggtcggcagagcctggggcggcccacgagatgaagtcaccgcccagcgcccgcagctctccgcacagcccctggagcgctgcaagcagctggaccagcaggcgctccagccggaacagcctcggccgtgcacccagcctgaagcggagaagcccaagtggagagcggcggtccctgttgtcgggagaaggccaggagagccaggatgaagaggagagctcagaagaggagcgggccagccctgcgggcagtgaccatcgccacagggggtccctggagcgggaggccaagagttcctttgacctgccagacacactgcaggtgccagggctgcatcgcactgccagtggccgagggtctgcttctgagcaccaggactgcaatggcaagtcggcttcagggcgcctggcccgggccctgcggcctgatgaccccccactggatggggatgacgccgatgacgagggcaacctgagcaaaggggaacgggtccgcgcgtggatccgagcccgactccctgcctgctgcctcgagcgagactcctggtcagcctacatcttccctcctcagtccaggttccgcctcctgtgtcaccggatcatcacccacaagatgttcgaccacgtggtccttgtcatcatcttccttaactgcatcaccatcgccatggagcgccccaaaattgacccccacagcgctgaacgcatcttcctgaccctctccaattacatcttcaccgcagtctttctggctgaaatgacagtgaaggtggtggcactgggctggtgcttcggggagcaggcgtacctgcggagcagttggaacgtgctggacgggctgttggtgctcatctccgtcatcgacattctggtgtccatggtctctgacagcggcaccaagatcctgggcatgctgagggtgctgcggctgctgcggaccctgcgcccgctcagggtgatcagccgggcgcaggggctgaagctggtggtggagacgctgatgtcctcactgaaacccatcggcaacattgtagtcatctgctgtgccttcttcatcattttcggcatcttgggggtgcagctcttcaaagggaagtttttcgtgtgccagggcgaggataccaggaacatcaccaataaatcggactgtgccgaggccagttaccggtgggtccggcacaagtacaactttgacaaccttggccaggccctgatgtccctgttcgttttggcctccaaggatggttgggtggacatcatgtacgatgggctggatgctgtgggcgtggaccagcagcccatcatgaaccacaacccctggatgctgctgtacttcatctcgttcctgctcattgtggccttctttgtcctgaacatgtttgtgggtgtggtggtggagaacttccacaagtgtcggcagcaccaggaggaagaggaggcccggcggcgggaggagaagcgcctacgaagactggagaaaaagagaaggagtaaggagaagcagatggctgaagcccagtgcaaaccttactactccgactactcccgcttccggctcctcgtccaccacttgtgcaccagccactacctggacctcttcatcacaggtgtcatcgggctgaacgtggtcaccatggccatggagcactaccagcagccccagattctggatgaggctctgaagatctgcaactacatcttcactgtcatctttgtcttggagtcagttttcaaacttgtggcctttggtttccgtcggttcttccaggacaggtggaaccagctggacctggccattgtgctgctgtccatcatgggcatcacgctggaggaaatcgaggtcaacgcctcgctgcccatcaaccccaccatcatccgcatcatgagggtgctgcgcattgcccgagtgctgaagctgctgaagatggctgtgggcatgcgggcgctgctggacacggtgatgcaggccctgccccaggtggggaacctgggacttctcttcatgttgttgtttttcatctttgcagctctgggcgtggagctctttggagacctggagtgtgacgagacacacccctgtgagggcctgggccgtcatgccacctttcggaactttggcatggccttcctaaccctcttccgagtctccacaggtgacaattggaatggcattatgaaggacaccctccgggactgtgaccaggagtccacctgctacaacacggtcatctcgcctatctactttgtgtccttcgtgctgacggcccagttcgtgctagtcaacgtggtgatcgccgtgctgatgaagcacctggaggagagcaacaaggaggccaaggaggaggccgagctagaggctgagctggagctggagatgaagaccctcagcccccagccccactcgccactgggcagccccttcctctggcctggggtcgagggccccgacagccccgacagccccaagcctggggctctgcacccagcggcccacgcgagatcagcctcccacttttccctggagcaccccacgatgcagccccaccccacggagctgccaggaccagacttactgactgtgcggaagtctggggtcagccgaacgcactctctgcccaatgacagctacatgtgtcggcatgggagcactgccgaggggcccctgggacacaggggctgggggctccccaaagctcagtcaggctccgtcttgtccgttcactcccagccagcagataccagctacatcctgcagcttcccaaagatgcacctcatctgctccagccccacagcgccccaacctggggcaccatccccaaactgcccccaccaggacgctcccctttggctcagaggccactcaggcgccaggcagcaataaggactgactccttggacgttcagggtctgggcagccgggaagacctgctggcagaggtgagtgggccctccccgcccctggcccgggcctactctttctggggccagtcaagtacccaggcacagcagcactcccgcagccacagcaagatctccaagcacatgaccccgccagccccttgcccaggcccagaacccaactggggcaagggccctccagagaccagaagcagcttagagttggacacggagctgagctggatttcaggagacctcctgccccctggcggccaggaggagcccccatccccacgggacctgaagaagtgctacagcgtggaggcccagagctgccagcgccggcccacgtcctggctggatgagcagaggagacactctatcgccgtcagctgcctggacagcggctcccaaccccacctgggcacagacccctctaaccttgggggccagcctcttggggggcctgggagccggcccaagaaaaaactcagcccgcctagtatcaccatagacccccccgagagccaaggtcctcggaccccgcccagccctggtatctgcctccggaggagggctccgtccagcgactccaaggatcccttggcctctggcccccctgacagcatggctgcctcgccctccccaaagaaagatgtgctgagtctctccggtttatcctctgacccagcagacctggacccctgagtcctgccccactttcccactcacctttctccactgggtgccaagtcctagctcctcctcctgggctatattcctgacaaaagttccatatagacaccaaggaggcggaggcgctcctccctgcctcagtggctctgggtacctgcaagcagaacttccaaagagagttaaaagcagcagccccggcaactctggctccaggcagaaggagaggcccggtgcagctgaggttcccgacaccagaagctgttgggagaaagcaatacgtttgtgcagaatctctatgtatattctattttattaaattaattgaatctagta

SEQ ID NO: 424735 - DNA, 7494 bp, Homo sapiens
ccttttcgttcgccctctcggggcggcttcgccgaaggtagcgccgaatccggcaaccggagcctgggcgcgaagcgaagaagccggaacaaagtgagggggagccggccggctggcccgggaagccccaggggcgcaggggaagcgggactcgcgccgggcggggtttccctgcgccccggcgccccgcgggcagcatgcccctgcgggcagggggagctgggctgaactggccctcccgggggctcagcttgcgccctagagcccaccagatgtgcccccgccggggcccccgggttgcgtgaggacacctcctctgaggggcgccgcttgcccctctccggatcgcccggggccccggctggccagaggatggacgaggaggaggatggagcgggcgccgaggagtcgggacagccccggagcttcatgcggctcaacgacctgtcgggggccgggggccggccggggccggggtcagcagaaaaggacccgggcagcgcggactccgaggcggaggggctgccgtacccggcgctggccccggtggttttcttctacttgagccaggacagccgcccgcggagctggtgtctccgcacggtctgtaacccctggtttgagcgcatcagcatgttggtcatccttctcaactgcgtgaccctgggcatgttccggccatgcgaggacatcgcctgtgactcccagcgctgccggatcctgcaggcctttgatgacttcatctttgccttctttgccgtggagatggtggtgaagatggtggccttgggcatctttgggaaaaagtgttacctgggagacacttggaaccggcttgactttttcatcgtcatcgcagggatgctggagtactcgctggacctgcagaacgtcagcttctcagctgtcaggacagtccgtgtgctgcgaccgctcagggccattaaccgggtgcccagcatgcgcatccttgtcacgttgctgctggatacgctgcccatgctgggcaacgtcctgctgctctgcttcttcgtcttcttcatcttcggcatcgtcggcgtccagctgtgggcagggctgcttcggaaccgatgcttcctacctgagaatttcagcctccccctgagcgtggacctggagcgctattaccagacagagaacgaggatgagagccccttcatctgctcccagccacgcgagaacggcatgcggtcctgcagaagcgtgcccacgctgcgcggggacgggggcggtggcccaccttgcggtctggactatgaggcctacaacagctccagcaacaccacctgtgtcaactggaaccagtactacaccaactgctcagcgggggagcacaaccccttcaagggcgccatcaactttgacaacattggctatgcctggatcgccatcttccaggtcatcacgctggagggctgggtcgacatcatgtactttgtgatggatgctcattccttctacaatttcatctacttcatcctcctcatcatcgtgggctccttcttcatgatcaacctgtgcctggtggtgattgccacgcagttctcagagaccaagcagcgggaaagccagctgatgcgggagcagcgtgtgcggttcctgtccaacgccagcaccctggctagcttctctgagcccggcagctgctatgaggagctgctcaagtacctggtgtacatccttcgtaaggcagcccgcaggctggctcaggtctctcgggcagcaggtgtgcgggttgggctgctcagcagcccagcacccctcgggggccaggagacccagcccagcagcagctgctctcgctcccaccgccgcctatccgtccaccacctggtgcaccaccaccaccaccatcaccaccactaccacctgggcaatgggacgctcagggccccccgggccagcccggagatccaggacagggatgccaatgggtcccgccggctcatgctgccaccaccctcgacgcctgccctctccggggccccccctggtggcgcagagtctgtgcacagcttctaccatgccgactgccacttagagccagtccgctgccaggcgccccctcccaggtccccatctgaggcatccggcaggactgtgggcagcgggaaggtgtatcccaccgtgcacaccagccctccaccggagacgctgaaggagaaggcactagtagaggtggctgccagctctgggcccccaaccctcaccagcctcaacatcccacccgggccctacagctccatgcacaagctgctggagacacagagtacaggtgcctgccaaagctcttgcaagatctccagcccttgcttgaaagcagacagtggagcctgtggtccagacagctgcccctactgtgcccgggccggggcaggggaggtggagctcgccgaccgtgaaatgcctgactcagacagcgaggcagtttatgagttcacacaggatgcccagcacagcgacctccgggacccccacagccggcggcaacggagcctgggcccagatgcagagcccagctctgtgctggccttctggaggctaatctgtgacaccttccgaaagattgtggacagcaagtactttggccggggaatcatgatcgccatcctggtcaacacactcagcatgggcatcgaataccacgagcagcccgaggagcttaccaacgccctagaaatcagcaacatcgtcttcaccagcctctttgccctggagatgctgctgaagctgcttgtgtatggtccctttggctacatcaagaatccctacaacatcttcgatggtgtcattgtggtcatcagcgtgtgggagatcgtgggccagcaggggggcggcctgtcggtgctgcggaccttccgcctgatgcgtgtgctgaagctggtgcgcttcctgccggcgctgcagcggcagctggtggtgctcatgaagaccatggacaacgtggccaccttctgcatgctgcttatgctcttcatcttcatcttcagcatcctgggcatgcatctcttcggctgcaagtttgcctctgagcgggatggggacaccctgccagaccggaagaattttgactccttgctctgggccatcgtcactgtctttcagatcctgacccaggaggactggaacaaagtcctctacaatggtatggcctccacgtcgtcctgggcggccctttatttcattgccctcatgaccttcggcaactacgtgctcttcaatttgctggtcgccattctggtggagggcttccaggcggaggaaatcagcaaacgggaagatgcgagtggacagttaagctgtattcagctgcctgtcgactcccaggggggagatgccaacaagtccgaatcagagcccgatttcttctcacccagcctggatggtgatggggacaggaagaagtgcttggccttggtgtccctgggagagcacccggagctgcggaagagcctgctgccgcctctcatcatccacacggccgccacacccatgtcgctgcccaagagcaccagcacgggcctgggcgaggcgctgggccctgcgtcgcgccgcaccagcagcagcgggtcggcagagcctggggcggcccacgagatgaagtcaccgcccagcgcccgcagctctccgcacagcccctggagcgctgcaagcagctggaccagcaggcgctccagccggaacagcctcggccgtgcacccagcctgaagcggagaagcccaagtggagagcggcggtccctgttgtcgggagaaggccaggagagccaggatgaagaggagagctcagaagaggagcgggccagccctgcgggcagtgaccatcgccacagggggtccctggagcgggaggccaagagttcctttgacctgccagacacactgcaggtgccagggctgcatcgcactgccagtggccgagggtctgcttctgagcaccaggactgcaatggcaagtcggcttcagggcgcctggcccgggccctgcggcctgatgaccccccactggatggggatgacgccgatgacgagggcaacctgagcaaaggggaacgggtccgcgcgtggatccgagcccgactccctgcctgctgcctcgagcgagactcctggtcagcctacatcttccctcctcagtccaggttccgcctcctgtgtcaccggatcatcacccacaagatgttcgaccacgtggtccttgtcatcatcttccttaactgcatcaccatcgccatggagcgccccaaaattgacccccacagcgctgaacgcatcttcctgaccctctccaattacatcttcaccgcagtctttctggctgaaatgacagtgaaggtggtggcactgggctggtgcttcggggagcaggcgtacctgcggagcagttggaacgtgctggacgggctgttggtgctcatctccgtcatcgacattctggtgtccatggtctctgacagcggcaccaagatcctgggcatgctgagggtgctgcggctgctgcggaccctgcgcccgctcagggtgatcagccgggcgcaggggctgaagctggtggtggagacgctgatgtcctcactgaaacccatcggcaacattgtagtcatctgctgtgccttcttcatcattttcggcatcttgggggtgcagctcttcaaagggaagtttttcgtgtgccagggcgaggataccaggaacatcaccaataaatcggactgtgccgaggccagttaccggtgggtccggcacaagtacaactttgacaaccttggccaggccctgatgtccctgttcgttttggcctccaaggatggttgggtggacatcatgtacgatgggctggatgctgtgggcgtggaccagcagcccatcatgaaccacaacccctggatgctgctgtacttcatctcgttcctgctcattgtggccttctttgtcctgaacatgtttgtgggtgtggtggtggagaacttccacaagtgtcggcagcaccaggaggaagaggaggcccggcggcgggaggagaagcgcctacgaagactggagaaaaagagaaggaaagcccagtgcaaaccttactactccgactactcccgcttccggctcctcgtccaccacttgtgcaccagccactacctggacctcttcatcacaggtgtcatcgggctgaacgtggtcaccatggccatggagcactaccagcagccccagattctggatgaggctctgaagatctgcaactacatcttcactgtcatctttgtcttggagtcagttttcaaacttgtggcctttggtttccgtcggttcttccaggacaggtggaaccagctggacctggccattgtgctgctgtccatcatgggcatcacgctggaggaaatcgaggtcaacgcctcgctgcccatcaaccccaccatcatccgcatcatgagggtgctgcgcattgcccgagtgctgaagctgctgaagatggctgtgggcatgcgggcgctgctggacacggtgatgcaggccctgccccaggtggggaacctgggacttctcttcatgttgttgtttttcatctttgcagctctgggcgtggagctctttggagacctggagtgtgacgagacacacccctgtgagggcctgggccgtcatgccacctttcggaactttggcatggccttcctaaccctcttccgagtctccacaggtgacaattggaatggcattatgaaggacaccctccgggactgtgaccaggagtccacctgctacaacacggtcatctcgcctatctactttgtgtccttcgtgctgacggcccagttcgtgctagtcaacgtggtgatcgccgtgctgatgaagcacctggaggagagcaacaaggaggccaaggaggaggccgagctagaggctgagctggagctggagatgaagaccctcagcccccagccccactcgccactgggcagccccttcctctggcctggggtcgagggccccgacagccccgacagccccaagcctggggctctgcacccagcggcccacgcgagatcagcctcccacttttccctggagcaccccacgatgcagccccaccccacggagctgccaggaccagacttactgactgtgcggaagtctggggtcagccgaacgcactctctgcccaatgacagctacatgtgtcggcatgggagcactgccgaggggcccctgggacacaggggctgggggctccccaaagctcagtcaggctccgtcttgtccgttcactcccagccagcagataccagctacatcctgcagcttcccaaagatgcacctcatctgctccagccccacagcgccccaacctggggcaccatccccaaactgcccccaccaggacgctcccctttggctcagaggccactcaggcgccaggcagcaataaggactgactccttggacgttcagggtctgggcagccgggaagacctgctggcagaggtgagtgggccctccccgcccctggcccgggcctactctttctggggccagtcaagtacccaggcacagcagcactcccgcagccacagcaagatctccaagcacatgaccccgccagccccttgcccaggcccagaacccaactggggcaagggccctccagagaccagaagcagcttagagttggacacggagctgagctggatttcaggagacctcctgccccctggcggccaggaggagcccccatccccacgggacctgaagaagtgctacagcgtggaggcccagagctgccagcgccggcccacgtcctggctggatgagcagaggagacactctatcgccgtcagctgcctggacagcggctcccaaccccacctgggcacagacccctctaaccttgggggccagcctcttggggggcctgggagccggcccaagaaaaaactcagcccgcctagtatcaccatagacccccccgagagccaaggtcctcggaccccgcccagccctggtatctgcctccggaggagggctccgtccagcgactccaaggatcccttggcctctggcccccctgacagcatggctgcctcgccctccccaaagaaagatgtgctgagtctctccggtttatcctctgacccagcagacctggacccctgagtcctgccccactttcccactcacctttctccactgggtgccaagtcctagctcctcctcctgggctatattcctgacaaaagttccatatagacaccaaggaggcggaggcgctcctccctgcctcagtggctctgggtacctgcaagcagaacttccaaagagagttaaaagcagcagccccggcaactctggctccaggcagaaggagaggcccggtgcagctgaggttcccgacaccagaagctgttgggagaaagcaatacgtttgtgcagaatctctatgtatattctattttattaaattaattgaatctagta

SEQ ID NO: 424736 - DNA, 7659 bp, Homo sapiens
ccttttcgttcgccctctcggggcggcttcgccgaaggtagcgccgaatccggcaaccggagcctgggcgcgaagcgaagaagccggaacaaagtgagggggagccggccggctggcccgggaagccccaggggcgcaggggaagcgggactcgcgccgggcggggtttccctgcgccccggcgccccgcgggcagcatgcccctgcgggcagggggagctgggctgaactggccctcccgggggctcagcttgcgccctagagcccaccagatgtgcccccgccggggcccccgggttgcgtgaggacacctcctctgaggggcgccgcttgcccctctccggatcgcccggggccccggctggccagaggatggacgaggaggaggatggagcgggcgccgaggagtcgggacagccccggagcttcatgcggctcaacgacctgtcgggggccgggggccggccggggccggggtcagcagaaaaggacccgggcagcgcggactccgaggcggaggggctgccgtacccggcgctggccccggtggttttcttctacttgagccaggacagccgcccgcggagctggtgtctccgcacggtctgtaacccctggtttgagcgcatcagcatgttggtcatccttctcaactgcgtgaccctgggcatgttccggccatgcgaggacatcgcctgtgactcccagcgctgccggatcctgcaggcctttgatgacttcatctttgccttctttgccgtggagatggtggtgaagatggtggccttgggcatctttgggaaaaagtgttacctgggagacacttggaaccggcttgactttttcatcgtcatcgcagggatgctggagtactcgctggacctgcagaacgtcagcttctcagctgtcaggacagtccgtgtgctgcgaccgctcagggccattaaccgggtgcccagcatgcgcatccttgtcacgttgctgctggatacgctgcccatgctgggcaacgtcctgctgctctgcttcttcgtcttcttcatcttcggcatcgtcggcgtccagctgtgggcagggctgcttcggaaccgatgcttcctacctgagaatttcagcctccccctgagcgtggacctggagcgctattaccagacagagaacgaggatgagagccccttcatctgctcccagccacgcgagaacggcatgcggtcctgcagaagcgtgcccacgctgcgcggggacgggggcggtggcccaccttgcggtctggactatgaggcctacaacagctccagcaacaccacctgtgtcaactggaaccagtactacaccaactgctcagcgggggagcacaaccccttcaagggcgccatcaactttgacaacattggctatgcctggatcgccatcttccaggtcatcacgctggagggctgggtcgacatcatgtactttgtgatggatgctcattccttctacaatttcatctacttcatcctcctcatcatcgtgggctccttcttcatgatcaacctgtgcctggtggtgattgccacgcagttctcagagaccaagcagcgggaaagccagctgatgcgggagcagcgtgtgcggttcctgtccaacgccagcaccctggctagcttctctgagcccggcagctgctatgaggagctgctcaagtacctggtgtacatccttcgtaaggcagcccgcaggctggctcaggtctctcgggcagcaggtgtgcgggttgggctgctcagcagcccagcacccctcgggggccaggagacccagcccagcagcagctgctctcgctcccaccgccgcctatccgtccaccacctggtgcaccaccaccaccaccatcaccaccactaccacctgggcaatgggacgctcagggccccccgggccagcccggagatccaggacagggatgccaatgggtcccgccggctcatgctgccaccaccctcgacgcctgccctctccggggccccccctggtggcgcagagtctgtgcacagcttctaccatgccgactgccacttagagccagtccgctgccaggcgccccctcccaggtccccatctgaggcatccggcaggactgtgggcagcgggaaggtgtatcccaccgtgcacaccagccctccaccggagacgctgaaggagaaggcactagtagaggtggctgccagctctgggcccccaaccctcaccagcctcaacatcccacccgggccctacagctccatgcacaagctgctggagacacagagtacaggtgcctgccaaagctcttgcaagatctccagcccttgcttgaaagcagacagtggagcctgtggtccagacagctgcccctactgtgcccgggccggggcaggggaggtggagctcgccgaccgtgaaatgcctgactcagacagcgaggcagtttatgagttcacacaggatgcccagcacagcgacctccgggacccccacagccggcggcaacggagcctgggcccagatgcagagcccagctctgtgctggccttctggaggctaatctgtgacaccttccgaaagattgtggacagcaagtactttggccggggaatcatgatcgccatcctggtcaacacactcagcatgggcatcgaataccacgagcagcccgaggagcttaccaacgccctagaaatcagcaacatcgtcttcaccagcctctttgccctggagatgctgctgaagctgcttgtgtatggtccctttggctacatcaagaatccctacaacatcttcgatggtgtcattgtggtcatcagcgtgtgggagatcgtgggccagcaggggggcggcctgtcggtgctgcggaccttccgcctgatgcgtgtgctgaagctggtgcgcttcctgccggcgctgcagcggcagctggtggtgctcatgaagaccatggacaacgtggccaccttctgcatgctgcttatgctcttcatcttcatcttcagcatcctgggcatgcatctcttcggctgcaagtttgcctctgagcgggatggggacaccctgccagaccggaagaattttgactccttgctctgggccatcgtcactgtctttcagatcctgacccaggaggactggaacaaagtcctctacaatggtatggcctccacgtcgtcctgggcggccctttatttcattgccctcatgaccttcggcaactacgtgctcttcaatttgctggtcgccattctggtggagggcttccaggcggaggaaatcagcaaacgggaagatgcgagtggacagttaagctgtattcagctgcctgtcgactcccaggggggagatgccaacaagtccgaatcagagcccgatttcttctcacccagcctggatggtgatggggacaggaagaagtgcttggccttggtgtccctgggagagcacccggagctgcggaagagcctgctgccgcctctcatcatccacacggccgccacacccatgtcgctgcccaagagcaccagcacgggcctgggcgaggcgctgggccctgcgtcgcgccgcaccagcagcagcgggtcggcagagcctggggcggcccacgagatgaagtcaccgcccagcgcccgcagctctccgcacagcccctggagcgctgcaagcagctggaccagcaggcgctccagccggaacagcctcggccgtgcacccagcctgaagcggagaagcccaagtggagagcggcggtccctgttgtcgggagaaggccaggagagccaggatgaagaggagagctcagaagaggagcgggccagccctgcgggcagtgaccatcgccacagggggtccctggagcgggaggccaagagttcctttgacctgccagacacactgcaggtgccagggctgcatcgcactgccagtggccgagggtctgcttctgagcaccaggactgcaatggcaagtcggcttcagggcgcctggcccgggccctgcggcctgatgaccccccactggatggggatgacgccgatgacgagggcaacctgagcaaaggggaacgggtccgcgcgtggatccgagcccgactccctgcctgctgcctcgagcgagactcctggtcagcctacatcttccctcctcagtccaggttccgcctcctgtgtcaccggatcatcacccacaagatgttcgaccacgtggtccttgtcatcatcttccttaactgcatcaccatcgccatggagcgccccaaaattgacccccacagcgctgaacgcatcttcctgaccctctccaattacatcttcaccgcagtctttctggctgaaatgacagtgaaggtggtggcactgggctggtgcttcggggagcaggcgtacctgcggagcagttggaacgtgctggacgggctgttggtgctcatctccgtcatcgacattctggtgtccatggtctctgacagcggcaccaagatcctgggcatgctgagggtgctgcggctgctgcggaccctgcgcccgctcagggtgatcagccgggcgcaggggctgaagctggtggtggagacgctgatgtcctcactgaaacccatcggcaacattgtagtcatctgctgtgccttcttcatcattttcggcatcttgggggtgcagctcttcaaagggaagtttttcgtgtgccagggcgaggataccaggaacatcaccaataaatcggactgtgccgaggccagttaccggtgggtccggcacaagtacaactttgacaaccttggccaggccctgatgtccctgttcgttttggcctccaaggatggttgggtggacatcatgtacgatgggctggatgctgtgggcgtggaccagcagcccatcatgaaccacaacccctggatgctgctgtacttcatctcgttcctgctcattgtggccttctttgtcctgaacatgtttgtgggtgtggtggtggagaacttccacaagtgtcggcagcaccaggaggaagaggaggcccggcggcgggaggagaagcgcctacgaagactggagaaaaagagaaggagtaaggagaagcagatggctgaagcccagtgcaaaccttactactccgactactcccgcttccggctcctcgtccaccacttgtgcaccagccactacctggacctcttcatcacaggtgtcatcgggctgaacgtggtcaccatggccatggagcactaccagcagccccagattctggatgaggctctgaagatctgcaactacatcttcactgtcatctttgtcttggagtcagttttcaaacttgtggcctttggtttccgtcggttcttccaggacaggtggaaccagctggacctggccattgtgctgctgtccatcatgggcatcacgctggaggaaatcgaggtcaacgcctcgctgcccatcaaccccaccatcatccgcatcatgagggtgctgcgcattgcccgagtgctgaagctgctgaagatggctgtgggcatgcgggcgctgctggacacggtgatgcaggccctgccccaggtggggaacctgggacttctcttcatgttgttgtttttcatctttgcagctctgggcgtggagctctttggagacctggagtgtgacgagacacacccctgtgagggcctgggccgtcatgccacctttcggaactttggcatggccttcctaaccctcttccgagtctccacaggtgacaattggaatggcattatgaaggacaccctccgggactgtgaccaggagtccacctgctacaacacggtcatctcgcctatctactttgtgtccttcgtgctgacggcccagttcgtgctagtcaacgtggtgatcgccgtgctgatgaagcacctggaggagagcaacaaggaggccaaggaggaggccgagctagaggctgagctggagctggagatgaagaccctcagcccccagccccactcgccactgggcagccccttcctctggcctggggtcgagggccccgacagccccgacagccccaagcctggggctctgcacccagcggcccacgcgagatcagcctcccacttttccctggagcaccccacggacaggcagctgtttgacaccatatccctgctgatccagggctccctggagtgggagctgaagctgatggacgagctggcaggcccagggggccagccctctgccttcccttctgcccccagcctgggaggctccgacccacagatgcagccccaccccacggagctgccaggaccagacttactgactgtgcggaagtctggggtcagccgaacgcactctctgcccaatgacagctacatgtgtcggcatgggagcactgccgaggggcccctgggacacaggggctgggggctccccaaagctcagtcaggctccgtcttgtccgttcactcccagccagcagataccagctacatcctgcagcttcccaaagatgcacctcatctgctccagccccacagcgccccaacctggggcaccatccccaaactgcccccaccaggacgctcccctttggctcagaggccactcaggcgccaggcagcaataaggactgactccttggacgttcagggtctgggcagccgggaagacctgctggcagaggtgagtgggccctccccgcccctggcccgggcctactctttctggggccagtcaagtacccaggcacagcagcactcccgcagccacagcaagatctccaagcacatgaccccgccagccccttgcccaggcccagaacccaactggggcaagggccctccagagaccagaagcagcttagagttggacacggagctgagctggatttcaggagacctcctgccccctggcggccaggaggagcccccatccccacgggacctgaagaagtgctacagcgtggaggcccagagctgccagcgccggcccacgtcctggctggatgagcagaggagacactctatcgccgtcagctgcctggacagcggctcccaaccccacctgggcacagacccctctaaccttgggggccagcctcttggggggcctgggagccggcccaagaaaaaactcagcccgcctagtatcaccatagacccccccgagagccaaggtcctcggaccccgcccagccctggtatctgcctccggaggagggctccgtccagcgactccaaggatcccttggcctctggcccccctgacagcatggctgcctcgccctccccaaagaaagatgtgctgagtctctccggtttatcctctgacccagcagacctggacccctgagtcctgccccactttcccactcacctttctccactgggtgccaagtcctagctcctcctcctgggctatattcctgacaaaagttccatatagacaccaaggaggcggaggcgctcctccctgcctcagtggctctgggtacctgcaagcagaacttccaaagagagttaaaagcagcagccccggcaactctggctccaggcagaaggagaggcccggtgcagctgaggttcccgacaccagaagctgttgggagaaagcaatacgtttgtgcagaatctctatgtatattctattttattaaattaattgaatctagta

SEQ ID NO: 424737 - DNA, 7602 bp, Homo sapiens
ccttttcgttcgccctctcggggcggcttcgccgaaggtagcgccgaatccggcaaccggagcctgggcgcgaagcgaagaagccggaacaaagtgagggggagccggccggctggcccgggaagccccaggggcgcaggggaagcgggactcgcgccgggcggggtttccctgcgccccggcgccccgcgggcagcatgcccctgcgggcagggggagctgggctgaactggccctcccgggggctcagcttgcgccctagagcccaccagatgtgcccccgccggggcccccgggttgcgtgaggacacctcctctgaggggcgccgcttgcccctctccggatcgcccggggccccggctggccagaggatggacgaggaggaggatggagcgggcgccgaggagtcgggacagccccggagcttcatgcggctcaacgacctgtcgggggccgggggccggccggggccggggtcagcagaaaaggacccgggcagcgcggactccgaggcggaggggctgccgtacccggcgctggccccggtggttttcttctacttgagccaggacagccgcccgcggagctggtgtctccgcacggtctgtaacccctggtttgagcgcatcagcatgttggtcatccttctcaactgcgtgaccctgggcatgttccggccatgcgaggacatcgcctgtgactcccagcgctgccggatcctgcaggcctttgatgacttcatctttgccttctttgccgtggagatggtggtgaagatggtggccttgggcatctttgggaaaaagtgttacctgggagacacttggaaccggcttgactttttcatcgtcatcgcagggatgctggagtactcgctggacctgcagaacgtcagcttctcagctgtcaggacagtccgtgtgctgcgaccgctcagggccattaaccgggtgcccagcatgcgcatccttgtcacgttgctgctggatacgctgcccatgctgggcaacgtcctgctgctctgcttcttcgtcttcttcatcttcggcatcgtcggcgtccagctgtgggcagggctgcttcggaaccgatgcttcctacctgagaatttcagcctccccctgagcgtggacctggagcgctattaccagacagagaacgaggatgagagccccttcatctgctcccagccacgcgagaacggcatgcggtcctgcagaagcgtgcccacgctgcgcggggacgggggcggtggcccaccttgcggtctggactatgaggcctacaacagctccagcaacaccacctgtgtcaactggaaccagtactacaccaactgctcagcgggggagcacaaccccttcaagggcgccatcaactttgacaacattggctatgcctggatcgccatcttccaggtcatcacgctggagggctgggtcgacatcatgtactttgtgatggatgctcattccttctacaatttcatctacttcatcctcctcatcatcgtgggctccttcttcatgatcaacctgtgcctggtggtgattgccacgcagttctcagagaccaagcagcgggaaagccagctgatgcgggagcagcgtgtgcggttcctgtccaacgccagcaccctggctagcttctctgagcccggcagctgctatgaggagctgctcaagtacctggtgtacatccttcgtaaggcagcccgcaggctggctcaggtctctcgggcagcaggtgtgcgggttgggctgctcagcagcccagcacccctcgggggccaggagacccagcccagcagcagctgctctcgctcccaccgccgcctatccgtccaccacctggtgcaccaccaccaccaccatcaccaccactaccacctgggcaatgggacgctcagggccccccgggccagcccggagatccaggacagggatgccaatgggtcccgccggctcatgctgccaccaccctcgacgcctgccctctccggggccccccctggtggcgcagagtctgtgcacagcttctaccatgccgactgccacttagagccagtccgctgccaggcgccccctcccaggtccccatctgaggcatccggcaggactgtgggcagcgggaaggtgtatcccaccgtgcacaccagccctccaccggagacgctgaaggagaaggcactagtagaggtggctgccagctctgggcccccaaccctcaccagcctcaacatcccacccgggccctacagctccatgcacaagctgctggagacacagagtacaggtgcctgccaaagctcttgcaagatctccagcccttgcttgaaagcagacagtggagcctgtggtccagacagctgcccctactgtgcccgggccggggcaggggaggtggagctcgccgaccgtgaaatgcctgactcagacagcgaggcagtttatgagttcacacaggatgcccagcacagcgacctccgggacccccacagccggcggcaacggagcctgggcccagatgcagagcccagctctgtgctggccttctggaggctaatctgtgacaccttccgaaagattgtggacagcaagtactttggccggggaatcatgatcgccatcctggtcaacacactcagcatgggcatcgaataccacgagcagcccgaggagcttaccaacgccctagaaatcagcaacatcgtcttcaccagcctctttgccctggagatgctgctgaagctgcttgtgtatggtccctttggctacatcaagaatccctacaacatcttcgatggtgtcattgtggtcatcagcgtgtgggagatcgtgggccagcaggggggcggcctgtcggtgctgcggaccttccgcctgatgcgtgtgctgaagctggtgcgcttcctgccggcgctgcagcggcagctggtggtgctcatgaagaccatggacaacgtggccaccttctgcatgctgcttatgctcttcatcttcatcttcagcatcctgggcatgcatctcttcggctgcaagtttgcctctgagcgggatggggacaccctgccagaccggaagaattttgactccttgctctgggccatcgtcactgtctttcagatcctgacccaggaggactggaacaaagtcctctacaatggtatggcctccacgtcgtcctgggcggccctttatttcattgccctcatgaccttcggcaactacgtgctcttcaatttgctggtcgccattctggtggagggcttccaggcggagggagatgccaacaagtccgaatcagagcccgatttcttctcacccagcctggatggtgatggggacaggaagaagtgcttggccttggtgtccctgggagagcacccggagctgcggaagagcctgctgccgcctctcatcatccacacggccgccacacccatgtcgctgcccaagagcaccagcacgggcctgggcgaggcgctgggccctgcgtcgcgccgcaccagcagcagcgggtcggcagagcctggggcggcccacgagatgaagtcaccgcccagcgcccgcagctctccgcacagcccctggagcgctgcaagcagctggaccagcaggcgctccagccggaacagcctcggccgtgcacccagcctgaagcggagaagcccaagtggagagcggcggtccctgttgtcgggagaaggccaggagagccaggatgaagaggagagctcagaagaggagcgggccagccctgcgggcagtgaccatcgccacagggggtccctggagcgggaggccaagagttcctttgacctgccagacacactgcaggtgccagggctgcatcgcactgccagtggccgagggtctgcttctgagcaccaggactgcaatggcaagtcggcttcagggcgcctggcccgggccctgcggcctgatgaccccccactggatggggatgacgccgatgacgagggcaacctgagcaaaggggaacgggtccgcgcgtggatccgagcccgactccctgcctgctgcctcgagcgagactcctggtcagcctacatcttccctcctcagtccaggttccgcctcctgtgtcaccggatcatcacccacaagatgttcgaccacgtggtccttgtcatcatcttccttaactgcatcaccatcgccatggagcgccccaaaattgacccccacagcgctgaacgcatcttcctgaccctctccaattacatcttcaccgcagtctttctggctgaaatgacagtgaaggtggtggcactgggctggtgcttcggggagcaggcgtacctgcggagcagttggaacgtgctggacgggctgttggtgctcatctccgtcatcgacattctggtgtccatggtctctgacagcggcaccaagatcctgggcatgctgagggtgctgcggctgctgcggaccctgcgcccgctcagggtgatcagccgggcgcaggggctgaagctggtggtggagacgctgatgtcctcactgaaacccatcggcaacattgtagtcatctgctgtgccttcttcatcattttcggcatcttgggggtgcagctcttcaaagggaagtttttcgtgtgccagggcgaggataccaggaacatcaccaataaatcggactgtgccgaggccagttaccggtgggtccggcacaagtacaactttgacaaccttggccaggccctgatgtccctgttcgttttggcctccaaggatggttgggtggacatcatgtacgatgggctggatgctgtgggcgtggaccagcagcccatcatgaaccacaacccctggatgctgctgtacttcatctcgttcctgctcattgtggccttctttgtcctgaacatgtttgtgggtgtggtggtggagaacttccacaagtgtcggcagcaccaggaggaagaggaggcccggcggcgggaggagaagcgcctacgaagactggagaaaaagagaaggagtaaggagaagcagatggctgaagcccagtgcaaaccttactactccgactactcccgcttccggctcctcgtccaccacttgtgcaccagccactacctggacctcttcatcacaggtgtcatcgggctgaacgtggtcaccatggccatggagcactaccagcagccccagattctggatgaggctctgaagatctgcaactacatcttcactgtcatctttgtcttggagtcagttttcaaacttgtggcctttggtttccgtcggttcttccaggacaggtggaaccagctggacctggccattgtgctgctgtccatcatgggcatcacgctggaggaaatcgaggtcaacgcctcgctgcccatcaaccccaccatcatccgcatcatgagggtgctgcgcattgcccgagtgctgaagctgctgaagatggctgtgggcatgcgggcgctgctggacacggtgatgcaggccctgccccaggtggggaacctgggacttctcttcatgttgttgtttttcatctttgcagctctgggcgtggagctctttggagacctggagtgtgacgagacacacccctgtgagggcctgggccgtcatgccacctttcggaactttggcatggccttcctaaccctcttccgagtctccacaggtgacaattggaatggcattatgaaggacaccctccgggactgtgaccaggagtccacctgctacaacacggtcatctcgcctatctactttgtgtccttcgtgctgacggcccagttcgtgctagtcaacgtggtgatcgccgtgctgatgaagcacctggaggagagcaacaaggaggccaaggaggaggccgagctagaggctgagctggagctggagatgaagaccctcagcccccagccccactcgccactgggcagccccttcctctggcctggggtcgagggccccgacagccccgacagccccaagcctggggctctgcacccagcggcccacgcgagatcagcctcccacttttccctggagcaccccacgatgcagccccaccccacggagctgccaggaccagacttactgactgtgcggaagtctggggtcagccgaacgcactctctgcccaatgacagctacatgtgtcggcatgggagcactgccgaggggcccctgggacacaggggctgggggctccccaaagctcagtcaggctccgtcttgtccgttcactcccagccagcagataccagctacatcctgcagcttcccaaagatgcacctcatctgctccagccccacagcgccccaacctggggcaccatccccaaactgcccccaccaggacgctcccctttggctcagaggccactcaggcgccaggcagcaataaggactgactccttggacgttcagggtctgggcagccgggaagacctgctggcagaggaggagcccccatccccacgggacctgaagaagtgctacagcgtggaggcccagagctgccagcgccggcccacgtcctggctggatgagcagaggagacactctatcgccgtcagctgcctggacagcggctcccaaccccacctgggcacagacccctctaaccttgggggccagcctcttggggggcctgggagccggcccaagaaaaaactcagcccgcctagtatcaccatagacccccccgagagccaaggtcctcggaccccgcccagccctggtatctgcctccggaggagggctccgtccagcgactccaaggatcccttggcctctggcccccctgacagcatggctgcctcgccctccccaaagaaagatgtgctgagtctctccggtttatcctctgacccagcagacctggacccctgagtcctgccccactttcccactcacctttctccactgggtgccaagtcctagctcctcctcctgggctatattcctgacaaaagttccatatagacaccaaggaggcggaggcgctcctccctgcctcagtggctctgggtacctgcaagcagaacttccaaagagagttaaaagcagcagccccggcaactctggctccaggcagaaggagaggcccggtgcagctgaggttcccgacaccagaagctgttgggagaaagcaatacgtttgtgcagaatctctatgtatattctattttattaaattaattgaatctagtatatgcgggatgtacgacattttgtgactgaagagacttgtttccttctacttttatgtgtctcagaatatttttgaggcgaaggcgtctgtctcttggctattttaacctaaaataacagtctagttatattccctcttcttgcaaagcacaagctgggaccgcgagcacattgcagccccaacggtggcccatcttcagcggagagcgagaaccattttggaaactgtaatgtaacttattttttcctttaacctcgtcatcattttctgtagggaaaaaaaaaagaaaaagaaaaaatgagattttacaagtgaaatggaacctttttatatatacatacatacatatctatctatctatctatatatatataaaataaagtaattttcct

SEQ ID NO: 424738 - DNA, 7425 bp, Homo sapiens
ccttttcgttcgccctctcggggcggcttcgccgaaggtagcgccgaatccggcaaccggagcctgggcgcgaagcgaagaagccggaacaaagtgagggggagccggccggctggcccgggaagccccaggggcgcaggggaagcgggactcgcgccgggcggggtttccctgcgccccggcgccccgcgggcagcatgcccctgcgggcagggggagctgggctgaactggccctcccgggggctcagcttgcgccctagagcccaccagatgtgcccccgccggggcccccgggttgcgtgaggacacctcctctgaggggcgccgcttgcccctctccggatcgcccggggccccggctggccagaggatggacgaggaggaggatggagcgggcgccgaggagtcgggacagccccggagcttcatgcggctcaacgacctgtcgggggccgggggccggccggggccggggtcagcagaaaaggacccgggcagcgcggactccgaggcggaggggctgccgtacccggcgctggccccggtggttttcttctacttgagccaggacagccgcccgcggagctggtgtctccgcacggtctgtaacccctggtttgagcgcatcagcatgttggtcatccttctcaactgcgtgaccctgggcatgttccggccatgcgaggacatcgcctgtgactcccagcgctgccggatcctgcaggcctttgatgacttcatctttgccttctttgccgtggagatggtggtgaagatggtggccttgggcatctttgggaaaaagtgttacctgggagacacttggaaccggcttgactttttcatcgtcatcgcagggatgctggagtactcgctggacctgcagaacgtcagcttctcagctgtcaggacagtccgtgtgctgcgaccgctcagggccattaaccgggtgcccagcatgcgcatccttgtcacgttgctgctggatacgctgcccatgctgggcaacgtcctgctgctctgcttcttcgtcttcttcatcttcggcatcgtcggcgtccagctgtgggcagggctgcttcggaaccgatgcttcctacctgagaatttcagcctccccctgagcgtggacctggagcgctattaccagacagagaacgaggatgagagccccttcatctgctcccagccacgcgagaacggcatgcggtcctgcagaagcgtgcccacgctgcgcggggacgggggcggtggcccaccttgcggtctggactatgaggcctacaacagctccagcaacaccacctgtgtcaactggaaccagtactacaccaactgctcagcgggggagcacaaccccttcaagggcgccatcaactttgacaacattggctatgcctggatcgccatcttccaggtcatcacgctggagggctgggtcgacatcatgtactttgtgatggatgctcattccttctacaatttcatctacttcatcctcctcatcatcgtgggctccttcttcatgatcaacctgtgcctggtggtgattgccacgcagttctcagagaccaagcagcgggaaagccagctgatgcgggagcagcgtgtgcggttcctgtccaacgccagcaccctggctagcttctctgagcccggcagctgctatgaggagctgctcaagtacctggtgtacatccttcgtaaggcagcccgcaggctggctcaggtctctcgggcagcaggtgtgcgggttgggctgctcagcagcccagcacccctcgggggccaggagacccagcccagcagcagctgctctcgctcccaccgccgcctatccgtccaccacctggtgcaccaccaccaccaccatcaccaccactaccacctgggcaatgggacgctcagggccccccgggccagcccggagatccaggacagggatgccaatgggtcccgccggctcatgctgccaccaccctcgacgcctgccctctccggggccccccctggtggcgcagagtctgtgcacagcttctaccatgccgactgccacttagagccagtccgctgccaggcgccccctcccaggtccccatctgaggcatccggcaggactgtgggcagcgggaaggtgtatcccaccgtgcacaccagccctccaccggagacgctgaaggagaaggcactagtagaggtggctgccagctctgggcccccaaccctcaccagcctcaacatcccacccgggccctacagctccatgcacaagctgctggagacacagagtacaggtgcctgccaaagctcttgcaagatctccagcccttgcttgaaagcagacagtggagcctgtggtccagacagctgcccctactgtgcccgggccggggcaggggaggtggagctcgccgaccgtgaaatgcctgactcagacagcgaggcagtttatgagttcacacaggatgcccagcacagcgacctccgggacccccacagccggcggcaacggagcctgggcccagatgcagagcccagctctgtgctggccttctggaggctaatctgtgacaccttccgaaagattgtggacagcaagtactttggccggggaatcatgatcgccatcctggtcaacacactcagcatgggcatcgaataccacgagcagcccgaggagcttaccaacgccctagaaatcagcaacatcgtcttcaccagcctctttgccctggagatgctgctgaagctgcttgtgtatggtccctttggctacatcaagaatccctacaacatcttcgatggtgtcattgtggtcatcagcgtgtgggagatcgtgggccagcaggggggcggcctgtcggtgctgcggaccttccgcctgatgcgtgtgctgaagctggtgcgcttcctgccggcgctgcagcggcagctggtggtgctcatgaagaccatggacaacgtggccaccttctgcatgctgcttatgctcttcatcttcatcttcagcatcctgggcatgcatctcttcggctgcaagtttgcctctgagcgggatggggacaccctgccagaccggaagaattttgactccttgctctgggccatcgtcactgtctttcagatcctgacccaggaggactggaacaaagtcctctacaatggtatggcctccacgtcgtcctgggcggccctttatttcattgccctcatgaccttcggcaactacgtgctcttcaatttgctggtcgccattctggtggagggcttccaggcggagggagatgccaacaagtccgaatcagagcccgatttcttctcacccagcctggatggtgatggggacaggaagaagtgcttggccttggtgtccctgggagagcacccggagctgcggaagagcctgctgccgcctctcatcatccacacggccgccacacccatgtcgctgcccaagagcaccagcacgggcctgggcgaggcgctgggccctgcgtcgcgccgcaccagcagcagcgggtcggcagagcctggggcggcccacgagatgaagtcaccgcccagcgcccgcagctctccgcacagcccctggagcgctgcaagcagctggaccagcaggcgctccagccggaacagcctcggccgtgcacccagcctgaagcggagaagcccaagtggagagcggcggtccctgttgtcgggagaaggccaggagagccaggatgaagaggagagctcagaagaggagcgggccagccctgcgggcagtgaccatcgccacagggggtccctggagcgggaggccaagagttcctttgacctgccagacacactgcaggtgccagggctgcatcgcactgccagtggccgagggtctgcttctgagcaccaggactgcaatggcaagtcggcttcagggcgcctggcccgggccctgcggcctgatgaccccccactggatggggatgacgccgatgacgagggcaacctgagcaaaggggaacgggtccgcgcgtggatccgagcccgactccctgcctgctgcctcgagcgagactcctggtcagcctacatcttccctcctcagtccaggttccgcctcctgtgtcaccggatcatcacccacaagatgttcgaccacgtggtccttgtcatcatcttccttaactgcatcaccatcgccatggagcgccccaaaattgacccccacagcgctgaacgcatcttcctgaccctctccaattacatcttcaccgcagtctttctggctgaaatgacagtgaaggtggtggcactgggctggtgcttcggggagcaggcgtacctgcggagcagttggaacgtgctggacgggctgttggtgctcatctccgtcatcgacattctggtgtccatggtctctgacagcggcaccaagatcctgggcatgctgagggtgctgcggctgctgcggaccctgcgcccgctcagggtgatcagccgggcgcaggggctgaagctggtggtggagacgctgatgtcctcactgaaacccatcggcaacattgtagtcatctgctgtgccttcttcatcattttcggcatcttgggggtgcagctcttcaaagggaagtttttcgtgtgccagggcgaggataccaggaacatcaccaataaatcggactgtgccgaggccagttaccggtgggtccggcacaagtacaactttgacaaccttggccaggccctgatgtccctgttcgttttggcctccaaggatggttgggtggacatcatgtacgatgggctggatgctgtgggcgtggaccagcagcccatcatgaaccacaacccctggatgctgctgtacttcatctcgttcctgctcattgtggccttctttgtcctgaacatgtttgtgggtgtggtggtggagaacttccacaagtgtcggcagcaccaggaggaagaggaggcccggcggcgggaggagaagcgcctacgaagactggagaaaaagagaaggaaagcccagtgcaaaccttactactccgactactcccgcttccggctcctcgtccaccacttgtgcaccagccactacctggacctcttcatcacaggtgtcatcgggctgaacgtggtcaccatggccatggagcactaccagcagccccagattctggatgaggctctgaagatctgcaactacatcttcactgtcatctttgtcttggagtcagttttcaaacttgtggcctttggtttccgtcggttcttccaggacaggtggaaccagctggacctggccattgtgctgctgtccatcatgggcatcacgctggaggaaatcgaggtcaacgcctcgctgcccatcaaccccaccatcatccgcatcatgagggtgctgcgcattgcccgagtgctgaagctgctgaagatggctgtgggcatgcgggcgctgctggacacggtgatgcaggccctgccccaggtggggaacctgggacttctcttcatgttgttgtttttcatctttgcagctctgggcgtggagctctttggagacctggagtgtgacgagacacacccctgtgagggcctgggccgtcatgccacctttcggaactttggcatggccttcctaaccctcttccgagtctccacaggtgacaattggaatggcattatgaaggacaccctccgggactgtgaccaggagtccacctgctacaacacggtcatctcgcctatctactttgtgtccttcgtgctgacggcccagttcgtgctagtcaacgtggtgatcgccgtgctgatgaagcacctggaggagagcaacaaggaggccaaggaggaggccgagctagaggctgagctggagctggagatgaagaccctcagcccccagccccactcgccactgggcagccccttcctctggcctggggtcgagggccccgacagccccgacagccccaagcctggggctctgcacccagcggcccacgcgagatcagcctcccacttttccctggagcaccccacgatgcagccccaccccacggagctgccaggaccagacttactgactgtgcggaagtctggggtcagccgaacgcactctctgcccaatgacagctacatgtgtcggcatgggagcactgccgaggggcccctgggacacaggggctgggggctccccaaagctcagtcaggctccgtcttgtccgttcactcccagccagcagataccagctacatcctgcagcttcccaaagatgcacctcatctgctccagccccacagcgccccaacctggggcaccatccccaaactgcccccaccaggacgctcccctttggctcagaggccactcaggcgccaggcagcaataaggactgactccttggacgttcagggtctgggcagccgggaagacctgctggcagaggtgagtgggccctccccgcccctggcccgggcctactctttctggggccagtcaagtacccaggcacagcagcactcccgcagccacagcaagatctccaagcacatgaccccgccagccccttgcccaggcccagaacccaactggggcaagggccctccagagaccagaagcagcttagagttggacacggagctgagctggatttcaggagacctcctgccccctggcggccaggaggagcccccatccccacgggacctgaagaagtgctacagcgtggaggcccagagctgccagcgccggcccacgtcctggctggatgagcagaggagacactctatcgccgtcagctgcctggacagcggctcccaaccccacctgggcacagacccctctaaccttgggggccagcctcttggggggcctgggagccggcccaagaaaaaactcagcccgcctagtatcaccatagacccccccgagagccaaggtcctcggaccccgcccagccctggtatctgcctccggaggagggctccgtccagcgactccaaggatcccttggcctctggcccccctgacagcatggctgcctcgccctccccaaagaaagatgtgctgagtctctccggtttatcctctgacccagcagacctggacccctgagtcctgccccactttcccactcacctttctccactgggtgccaagtcctagctcctcctcctgggctatattcctgacaaaagttccatatagacaccaaggaggcggaggcgctcctccctgcctcagtggctctgggtacctgcaagcagaacttccaaagagagttaaaagcagcagccccggcaactctggctccaggcagaaggagaggcccggtgcagctgaggttcccgacaccagaagctgttgggagaaagcaatacgtttgtgcagaatctctatgtatattctattttattaaattaattgaatctagta

SEQ ID NO: 424739 - DNA, 5243 bp, Homo sapiens
  misc_feature (5158)..(5158): n is a, c, g, or t
ccttttcgttcgccctctcggggcggcttcgccgaaggtagcgccgaatccggcaaccggagcctgggcgcgaagcgaagaagccggaacaaagtgagggggagccggccggctggcccgggaagccccaggggcgcaggggaagcgggactcgcgccgggcggggtttccctgcgccccggcgccccgcgggcagcatgcccctgcgggcagggggagctgggctgaactggccctcccgggggctcagcttgcgccctagagcccaccagatgtgcccccgccggggcccccgggttgcgtgaggacacctcctctgaggggcgccgcttgcccctctccggatcgcccggggccccggctggccagaggatggacgaggaggaggatggagcgggcgccgaggagtcgggacagccccggagcttcatgcggctcaacgacctgtcgggggccgggggccggccggggccggggtcagcagaaaaggacccgggcagcgcggactccgaggcggaggggctgccgtacccggcgctggccccggtggttttcttctacttgagccaggacagccgcccgcggagctggtgtctccgcacggtctgtaacccctggtttgagcgcatcagcatgttggtcatccttctcaactgcgtgaccctgggcatgttccggccatgcgaggacatcgcctgtgactcccagcgctgccggatcctgcaggcctttgatgacttcatctttgccttctttgccgtggagatggtggtgaagatggtggccttgggcatctttgggaaaaagtgttacctgggagacacttggaaccggcttgactttttcatcgtcatcgcagggatgctggagtactcgctggacctgcagaacgtcagcttctcagctgtcaggacagtccgtgtgctgcgaccgctcagggccattaaccgggtgcccagcatgcgcatccttgtcacgttgctgctggatacgctgcccatgctgggcaacgtcctgctgctctgcttcttcgtcttcttcatcttcggcatcgtcggcgtccagctgtgggcagggctgcttcggaaccgatgcttcctacctgagaatttcagcctccccctgagcgtggacctggagcgctattaccagacagagaacgaggatgagagccccttcatctgctcccagccacgcgagaacggcatgcggtcctgcagaagcgtgcccacgctgcgcggggacgggggcggtggcccaccttgcggtctggactatgaggcctacaacagctccagcaacaccacctgtgtcaactggaaccagtactacaccaactgctcagcgggggagcacaaccccttcaagggcgccatcaactttgacaacattggctatgcctggatcgccatcttccaggtcatcacgctggagggctgggtcgacatcatgtactttgtgatggatgctcattccttctacaatttcatctacttcatcctcctcatcatcgtgggctccttcttcatgatcaacctgtgcctggtggtgattgccacgcagttctcagagaccaagcagcgggaaagccagctgatgcgggagcagcgtgtgcggttcctgtccaacgccagcaccctggctagcttctctgagcccggcagctgctatgaggagctgctcaagtacctggtgtacatccttcgtaaggcagcccgcaggctggctcaggtctctcgggcagcaggtgtgcgggttgggctgctcagcagcccagcacccctcgggggccaggagacccagcccagcagcagctgctctcgctcccaccgccgcctatccgtccaccacctggtgcaccaccaccaccaccatcaccaccactaccacctgggcaatgggacgctcagggccccccgggccagcccggagatccaggacagggatgccaatgggtcccgccggctcatgctgccaccaccctcgacgcctgccctctccggggccccccctggtggcgcagagtctgtgcacagcttctaccatgccgactgccacttagagccagtccgctgccaggcgccccctcccaggtccccatctgaggcatccggcaggactgtgggcagcgggaaggtgtatcccaccgtgcacaccagccctccaccggagacgctgaaggagaaggcactagtagaggtggctgccagctctgggcccccaaccctcaccagcctcaacatcccacccgggccctacagctccatgcacaagctgctggagacacagagtacaggtgcctgccaaagctcttgcaagatctccagcccttgcttgaaagcagacagtggagcctgtggtccagacagctgcccctactgtgcccgggccggggcaggggaggtggagctcgccgaccgtgaaatgcctgactcagacagcgaggcagtttatgagttcacacaggatgcccagcacagcgacctccgggacccccacagccggcggcaacggagcctgggcccagatgcagagcccagctctgtgctggccttctggaggctaatctgtgacaccttccgaaagattgtggacagcaagtactttggccggggaatcatgatcgccatcctggtcaacacactcagcatgggcatcgaataccacgagcagcccgaggagcttaccaacgccctagaaatcagcaacatcgtcttcaccagcctctttgccctggagatgctgctgaagctgcttgtgtatggtccctttggctacatcaagaatccctacaacatcttcgatggtgtcattgtggtcatcagcgtgtgggagatcgtgggccagcaggggggcggcctgtcggtgctgcggaccttccgcctgatgcgtgtgctgaagctggtgcgcttcctgccggcgctgcagcggcagctggtggtgctcatgaagaccatggacaacgtggccaccttctgcatgctgcttatgctcttcatcttcatcttcagcatcctgggcatgcatctcttcggctgcaagtttgcctctgagcgggatggggacaccctgccagaccggaagaattttgactccttgctctgggccatcgtcactgtctttcagatcctgacccaggaggactggaacaaagtcctctacaatggtatggcctccacgtcgtcctgggcggccctttatttcattgccctcatgaccttcggcaactacgtgctcttcaatttgctggtcgccattctggtggagggcttccaggcggaggaaatcagcaaacgggaagatgcgagtggacagttaagctgtattcagctgcctgtcgactcccaggggggagatgccaacaagtccgaatcagagcccgatttcttctcacccagcctggatggtgatggggacaggaagaagtgcttggccttggtgtccctgggagagcacccggagctgcggaagagcctgctgccgcctctcatcatccacacggccgccacacccatgtcgctgcccaagagcaccagcacgggcctgggcgaggcgctgggccctgcgtcgcgccgcaccagcagcagcgggtcggcagagcctggggcggcccacgagatgaagtcaccgcccagcgcccgcagctctccgcacagcccctggagcgctgcaagcagctggaccagcaggcgctccagccggaacagcctcggccgtgcacccagcctgaagcggagaagcccaagtggagagcggcggtccctgttgtcgggagaaggccaggagagccaggatgaagaggagagctcagaagaggagcgggccagccctgcgggcagtgaccatcgccacagggggtccctggagcgggaggccaagagttcctttgacctgccagacacactgcaggtgccagggctgcatcgcactgccagtggccgagggtctgcttctgagcaccaggactgcaatggcaagtcggcttcagggcgcctggcccgggccctgcggcctgatgaccccccactggatggggatgacgccgatgacgagggcaacctgagcaaaggggaacgggtccgcgcgtggatccgagcccgactccctgcctgctgcctcgagcgagactcctggtcagcctacatcttccctcctcagtccaggttccgcctcctgtgtcaccggatcatcacccacaagatgttcgaccacgtggtccttgtcatcatcttccttaactgcatcaccatcgccatggagcgccccaaaattgacccccacagcgctgaacgcatcttcctgaccctctccaattacatcttcaccgcagtctttctggctgaaatgacagtgaaggtggtggcactgggctggtgcttcggggagcaggcgtacctgcggagcagttggaacgtgctggacgggctgttggtgctcatctccgtcatcgacattctggtgtccatggtctctgacagcggcaccaagatcctgggcatgctgagggtgctgcggctgctgcggaccctgcgcccgctcagggtgatcagccgggcgcaggggctgaagctggtggtggagacgctgatgtcctcactgaaacccatcggcaacattgtagtcatctgctgtgccttcttcatcattttcggcatcttgggggtgcagctcttcaaagggaagtttttcgtgtgccagggcgaggataccaggaacatcaccaataaatcggactgtgccgaggccagttaccggtgggtccggcacaagtacaactttgacaaccttggccaggtgagccccaggctcagaggtggggctgtggtgaaggaggctggagggggcacagggccatgcttagtgatacctgctgactccggtggaggtgggctccacgaagagatcagcccttcacaccctctgctgtctaaccaccagcatgtcgcaaagcccagtccatcccacagtgccccaaaaagtgggcccatggggtctctagccgtccttaaagatgaagaaacagaggctcagagagggtaaggggcttgcccagggccacagagctacatggtggagcaggaagcacacgtggcagtgggggcaggcagccctggatgtgaatcctgtgcaaatcctgaccccaccattgtcagctcantgacctggagcagctgacttaccagggcctcagtttcattaactggtgaatggagtcataatagaatctcctcggaggtcacaat

SEQ ID NO: 424740 - DNA, 7614 bp, Homo sapiens
ccttttcgttcgccctctcggggcggcttcgccgaaggtagcgccgaatccggcaaccggagcctgggcgcgaagcgaagaagccggaacaaagtgagggggagccggccggctggcccgggaagccccaggggcgcaggggaagcgggactcgcgccgggcggggtttccctgcgccccggcgccccgcgggcagcatgcccctgcgggcagggggagctgggctgaactggccctcccgggggctcagcttgcgccctagagcccaccagatgtgcccccgccggggcccccgggttgcgtgaggacacctcctctgaggggcgccgcttgcccctctccggatcgcccggggccccggctggccagaggatggacgaggaggaggatggagcgggcgccgaggagtcgggacagccccggagcttcatgcggctcaacgacctgtcgggggccgggggccggccggggccggggtcagcagaaaaggacccgggcagcgcggactccgaggcggaggggctgccgtacccggcgctggccccggtggttttcttctacttgagccaggacagccgcccgcggagctggtgtctccgcacggtctgtaacccctggtttgagcgcatcagcatgttggtcatccttctcaactgcgtgaccctgggcatgttccggccatgcgaggacatcgcctgtgactcccagcgctgccggatcctgcaggcctttgatgacttcatctttgccttctttgccgtggagatggtggtgaagatggtggccttgggcatctttgggaaaaagtgttacctgggagacacttggaaccggcttgactttttcatcgtcatcgcagggatgctggagtactcgctggacctgcagaacgtcagcttctcagctgtcaggacagtccgtgtgctgcgaccgctcagggccattaaccgggtgcccagcatgcgcatccttgtcacgttgctgctggatacgctgcccatgctgggcaacgtcctgctgctctgcttcttcgtcttcttcatcttcggcatcgtcggcgtccagctgtgggcagggctgcttcggaaccgatgcttcctacctgagaatttcagcctccccctgagcgtggacctggagcgctattaccagacagagaacgaggatgagagccccttcatctgctcccagccacgcgagaacggcatgcggtcctgcagaagcgtgcccacgctgcgcggggacgggggcggtggcccaccttgcggtctggactatgaggcctacaacagctccagcaacaccacctgtgtcaactggaaccagtactacaccaactgctcagcgggggagcacaaccccttcaagggcgccatcaactttgacaacattggctatgcctggatcgccatcttccaggtcatcacgctggagggctgggtcgacatcatgtactttgtgatggatgctcattccttctacaatttcatctacttcatcctcctcatcatcgtgggctccttcttcatgatcaacctgtgcctggtggtgattgccacgcagttctcagagaccaagcagcgggaaagccagctgatgcgggagcagcgtgtgcggttcctgtccaacgccagcaccctggctagcttctctgagcccggcagctgctatgaggagctgctcaagtacctggtgtacatccttcgtaaggcagcccgcaggctggctcaggtctctcgggcagcaggtgtgcgggttgggctgctcagcagcccagcacccctcgggggccaggagacccagcccagcagcagctgctctcgctcccaccgccgcctatccgtccaccacctggtgcaccaccaccaccaccatcaccaccactaccacctgggcaatgggacgctcagggccccccgggccagcccggagatccaggacagggatgccaatgggtcccgccggctcatgctgccaccaccctcgacgcctgccctctccggggccccccctggtggcgcagagtctgtgcacagcttctaccatgccgactgccacttagagccagtccgctgccaggcgccccctcccaggtccccatctgaggcatccggcaggactgtgggcagcgggaaggtgtatcccaccgtgcacaccagccctccaccggagacgctgaaggagaaggcactagtagaggtggctgccagctctgggcccccaaccctcaccagcctcaacatcccacccgggccctacagctccatgcacaagctgctggagacacagagtacaggtgcctgccaaagctcttgcaagatctccagcccttgcttgaaagcagacagtggagcctgtggtccagacagctgcccctactgtgcccgggccggggcaggggaggtggagctcgccgaccgtgaaatgcctgactcagacagcgaggcagtttatgagttcacacaggatgcccagcacagcgacctccgggacccccacagccggcggcaacggagcctgggcccagatgcagagcccagctctgtgctggccttctggaggctaatctgtgacaccttccgaaagattgtggacagcaagtactttggccggggaatcatgatcgccatcctggtcaacacactcagcatgggcatcgaataccacgagcagcccgaggagcttaccaacgccctagaaatcagcaacatcgtcttcaccagcctctttgccctggagatgctgctgaagctgcttgtgtatggtccctttggctacatcaagaatccctacaacatcttcgatggtgtcattgtggtcatcagcgtgtgggagatcgtgggccagcaggggggcggcctgtcggtgctgcggaccttccgcctgatgcgtgtgctgaagctggtgcgcttcctgccggcgctgcagcggcagctggtggtgctcatgaagaccatggacaacgtggccaccttctgcatgctgcttatgctcttcatcttcatcttcagcatcctgggcatgcatctcttcggctgcaagtttgcctctgagcgggatggggacaccctgccagaccggaagaattttgactccttgctctgggccatcgtcactgtctttcagatcctgacccaggaggactggaacaaagtcctctacaatggtatggcctccacgtcgtcctgggcggccctttatttcattgccctcatgaccttcggcaactacgtgctcttcaatttgctggtcgccattctggtggagggcttccaggcggagggagatgccaacaagtccgaatcagagcccgatttcttctcacccagcctggatggtgatggggacaggaagaagtgcttggccttggtgtccctgggagagcacccggagctgcggaagagcctgctgccgcctctcatcatccacacggccgccacacccatgtcgctgcccaagagcaccagcacgggcctgggcgaggcgctgggccctgcgtcgcgccgcaccagcagcagcgggtcggcagagcctggggcggcccacgagatgaagtcaccgcccagcgcccgcagctctccgcacagcccctggagcgctgcaagcagctggaccagcaggcgctccagccggaacagcctcggccgtgcacccagcctgaagcggagaagcccaagtggagagcggcggtccctgttgtcgggagaaggccaggagagccaggatgaagaggagagctcagaagaggagcgggccagccctgcgggcagtgaccatcgccacagggggtccctggagcgggaggccaagagttcctttgacctgccagacacactgcaggtgccagggctgcatcgcactgccagtggccgagggtctgcttctgagcaccaggactgcaatggcaagtcggcttcagggcgcctggcccgggccctgcggcctgatgaccccccactggatggggatgacgccgatgacgagggcaacctgagcaaaggggaacgggtccgcgcgtggatccgagcccgactccctgcctgctgcctcgagcgagactcctggtcagcctacatcttccctcctcagtccaggttccgcctcctgtgtcaccggatcatcacccacaagatgttcgaccacgtggtccttgtcatcatcttccttaactgcatcaccatcgccatggagcgccccaaaattgacccccacagcgctgaacgcatcttcctgaccctctccaattacatcttcaccgcagtctttctggctgaaatgacagtgaaggtggtggcactgggctggtgcttcggggagcaggcgtacctgcggagcagttggaacgtgctggacgggctgttggtgctcatctccgtcatcgacattctggtgtccatggtctctgacagcggcaccaagatcctgggcatgctgagggtgctgcggctgctgcggaccctgcgcccgctcagggtgatcagccgggcgcaggggctgaagctggtggtggagacgctgatgtcctcactgaaacccatcggcaacattgtagtcatctgctgtgccttcttcatcattttcggcatcttgggggtgcagctcttcaaagggaagtttttcgtgtgccagggcgaggataccaggaacatcaccaataaatcggactgtgccgaggccagttaccggtgggtccggcacaagtacaactttgacaaccttggccaggccctgatgtccctgttcgttttggcctccaaggatggttgggtggacatcatgtacgatgggctggatgctgtgggcgtggaccagcagcccatcatgaaccacaacccctggatgctgctgtacttcatctcgttcctgctcattgtggccttctttgtcctgaacatgtttgtgggtgtggtggtggagaacttccacaagtgtcggcagcaccaggaggaagaggaggcccggcggcgggaggagaagcgcctacgaagactggagaaaaagagaaggaatctaatgctggacgatgtaattgcttccggcagctcagccagcgctgcgtcagaagcccagtgcaaaccttactactccgactactcccgcttccggctcctcgtccaccacttgtgcaccagccactacctggacctcttcatcacaggtgtcatcgggctgaacgtggtcaccatggccatggagcactaccagcagccccagattctggatgaggctctgaagatctgcaactacatcttcactgtcatctttgtcttggagtcagttttcaaacttgtggcctttggtttccgtcggttcttccaggacaggtggaaccagctggacctggccattgtgctgctgtccatcatgggcatcacgctggaggaaatcgaggtcaacgcctcgctgcccatcaaccccaccatcatccgcatcatgagggtgctgcgcattgcccgagtgctgaagctgctgaagatggctgtgggcatgcgggcgctgctggacacggtgatgcaggccctgccccaggtggggaacctgggacttctcttcatgttgttgtttttcatctttgcagctctgggcgtggagctctttggagacctggagtgtgacgagacacacccctgtgagggcctgggccgtcatgccacctttcggaactttggcatggccttcctaaccctcttccgagtctccacaggtgacaattggaatggcattatgaaggacaccctccgggactgtgaccaggagtccacctgctacaacacggtcatctcgcctatctactttgtgtccttcgtgctgacggcccagttcgtgctagtcaacgtggtgatcgccgtgctgatgaagcacctggaggagagcaacaaggaggccaaggaggaggccgagctagaggctgagctggagctggagatgaagaccctcagcccccagccccactcgccactgggcagccccttcctctggcctggggtcgagggccccgacagccccgacagccccaagcctggggctctgcacccagcggcccacgcgagatcagcctcccacttttccctggagcaccccacgatccctctagctgagatggaggctctgtctctgacgtcagagattgtgtctgaaccgtcctgctctctagctctgacggatgactctttgcctgatgacatgcacacactcttacttagtgccctggagagcaatatgcagccccaccccacggagctgccaggaccagacttactgactgtgcggaagtctggggtcagccgaacgcactctctgcccaatgacagctacatgtgtcggcatgggagcactgccgaggggcccctgggacacaggggctgggggctccccaaagctcagtcaggctccgtcttgtccgttcactcccagccagcagataccagctacatcctgcagcttcccaaagatgcacctcatctgctccagccccacagcgccccaacctggggcaccatccccaaactgcccccaccaggacgctcccctttggctcagaggccactcaggcgccaggcagcaataaggactgactccttggacgttcagggtctgggcagccgggaagacctgctggcagaggtgagtgggccctccccgcccctggcccgggcctactctttctggggccagtcaagtacccaggcacagcagcactcccgcagccacagcaagatctccaagcacatgaccccgccagccccttgcccaggcccagaacccaactggggcaagggccctccagagaccagaagcagcttagagttggacacggagctgagctggatttcaggagacctcctgccccctggcggccaggaggagcccccatccccacgggacctgaagaagtgctacagcgtggaggcccagagctgccagcgccggcccacgtcctggctggatgagcagaggagacactctatcgccgtcagctgcctggacagcggctcccaaccccacctgggcacagacccctctaaccttgggggccagcctcttggggggcctgggagccggcccaagaaaaaactcagcccgcctagtatcaccatagacccccccgagagccaaggtcctcggaccccgcccagccctggtatctgcctccggaggagggctccgtccagcgactccaaggatcccttggcctctggcccccctgacagcatggctgcctcgccctccccaaagaaagatgtgctgagtctctccggtttatcctctgacccagcagacctggacccctgagtcctgccccactttcccactcacctttctccactgggtgccaagtcctagctcctcctcctgggctatattcctgacaaaagttccatatagacaccaaggaggcggaggcgctcctccctgcctcagtggctctgggtacctgcaagcagaacttccaaagagagttaaaagcagcagccccggcaactctggctccaggcagaaggagaggcccggtgcagctgaggttcccgacaccagaagctgttgggagaaagcaatacgtttgtgcagaatctctatgtatattctattttattaaattaattgaatctagta

SEQ ID NO: 424741 - DNA, 8118 bp, Homo sapiens
ccttttcgttcgccctctcggggcggcttcgccgaaggtagcgccgaatccggcaaccggagcctgggcgcgaagcgaagaagccggaacaaagtgagggggagccggccggctggcccgggaagccccaggggcgcaggggaagcgggactcgcgccgggcggggtttccctgcgccccggcgccccgcgggcagcatgcccctgcgggcagggggagctgggctgaactggccctcccgggggctcagcttgcgccctagagcccaccagatgtgcccccgccggggcccccgggttgcgtgaggacacctcctctgaggggcgccgcttgcccctctccggatcgcccggggccccggctggccagaggatggacgaggaggaggatggagcgggcgccgaggagtcgggacagccccggagcttcatgcggctcaacgacctgtcgggggccgggggccggccggggccggggtcagcagaaaaggacccgggcagcgcggactccgaggcggaggggctgccgtacccggcgctggccccggtggttttcttctacttgagccaggacagccgcccgcggagctggtgtctccgcacggtctgtaacccctggtttgagcgcatcagcatgttggtcatccttctcaactgcgtgaccctgggcatgttccggccatgcgaggacatcgcctgtgactcccagcgctgccggatcctgcaggcctttgatgacttcatctttgccttctttgccgtggagatggtggtgaagatggtggccttgggcatctttgggaaaaagtgttacctgggagacacttggaaccggcttgactttttcatcgtcatcgcagggatgctggagtactcgctggacctgcagaacgtcagcttctcagctgtcaggacagtccgtgtgctgcgaccgctcagggccattaaccgggtgcccagcatgcgcatccttgtcacgttgctgctggatacgctgcccatgctgggcaacgtcctgctgctctgcttcttcgtcttcttcatcttcggcatcgtcggcgtccagctgtgggcagggctgcttcggaaccgatgcttcctacctgagaatttcagcctccccctgagcgtggacctggagcgctattaccagacagagaacgaggatgagagccccttcatctgctcccagccacgcgagaacggcatgcggtcctgcagaagcgtgcccacgctgcgcggggacgggggcggtggcccaccttgcggtctggactatgaggcctacaacagctccagcaacaccacctgtgtcaactggaaccagtactacaccaactgctcagcgggggagcacaaccccttcaagggcgccatcaactttgacaacattggctatgcctggatcgccatcttccaggtcatcacgctggagggctgggtcgacatcatgtactttgtgatggatgctcattccttctacaatttcatctacttcatcctcctcatcatcgtgggctccttcttcatgatcaacctgtgcctggtggtgattgccacgcagttctcagagaccaagcagcgggaaagccagctgatgcgggagcagcgtgtgcggttcctgtccaacgccagcaccctggctagcttctctgagcccggcagctgctatgaggagctgctcaagtacctggtgtacatccttcgtaaggcagcccgcaggctggctcaggtctctcgggcagcaggtgtgcgggttgggctgctcagcagcccagcacccctcgggggccaggagacccagcccagcagcagctgctctcgctcccaccgccgcctatccgtccaccacctggtgcaccaccaccaccaccatcaccaccactaccacctgggcaatgggacgctcagggccccccgggccagcccggagatccaggacagggatgccaatgggtcccgccggctcatgctgccaccaccctcgacgcctgccctctccggggccccccctggtggcgcagagtctgtgcacagcttctaccatgccgactgccacttagagccagtccgctgccaggcgccccctcccaggtccccatctgaggcatccggcaggactgtgggcagcgggaaggtgtatcccaccgtgcacaccagccctccaccggagacgctgaaggagaaggcactagtagaggtggctgccagctctgggcccccaaccctcaccagcctcaacatcccacccgggccctacagctccatgcacaagctgctggagacacagagtacaggtgcctgccaaagctcttgcaagatctccagcccttgcttgaaagcagacagtggagcctgtggtccagacagctgcccctactgtgcccgggccggggcaggggaggtggagctcgccgaccgtgaaatgcctgactcagacagcgaggcagtttatgagttcacacaggatgcccagcacagcgacctccgggacccccacagccggcggcaacggagcctgggcccagatgcagagcccagctctgtgctggccttctggaggctaatctgtgacaccttccgaaagattgtggacagcaagtactttggccggggaatcatgatcgccatcctggtcaacacactcagcatgggcatcgaataccacgagcagcccgaggagcttaccaacgccctagaaatcagcaacatcgtcttcaccagcctctttgccctggagatgctgctgaagctgcttgtgtatggtccctttggctacatcaagaatccctacaacatcttcgatggtgtcattgtggtcatcagcgtgtgggagatcgtgggccagcaggggggcggcctgtcggtgctgcggaccttccgcctgatgcgtgtgctgaagctggtgcgcttcctgccggcgctgcagcggcagctggtggtgctcatgaagaccatggacaacgtggccaccttctgcatgctgcttatgctcttcatcttcatcttcagcatcctgggcatgcatctcttcggctgcaagtttgcctctgagcgggatggggacaccctgccagaccggaagaattttgactccttgctctgggccatcgtcactgtctttcagatcctgacccaggaggactggaacaaagtcctctacaatggtatggcctccacgtcgtcctgggcggccctttatttcattgccctcatgaccttcggcaactacgtgctcttcaatttgctggtcgccattctggtggagggcttccaggcggagggagatgccaacaagtccgaatcagagcccgatttcttctcacccagcctggatggtgatggggacaggaagaagtgcttggccttggtgtccctgggagagcacccggagctgcggaagagcctgctgccgcctctcatcatccacacggccgccacacccatgtcgctgcccaagagcaccagcacgggcctgggcgaggcgctgggccctgcgtcgcgccgcaccagcagcagcgggtcggcagagcctggggcggcccacgagatgaagtcaccgcccagcgcccgcagctctccgcacagcccctggagcgctgcaagcagctggaccagcaggcgctccagccggaacagcctcggccgtgcacccagcctgaagcggagaagcccaagtggagagcggcggtccctgttgtcgggagaaggccaggagagccaggatgaagaggagagctcagaagaggagcgggccagccctgcgggcagtgaccatcgccacagggggtccctggagcgggaggccaagagttcctttgacctgccagacacactgcaggtgccagggctgcatcgcactgccagtggccgagggtctgcttctgagcaccaggactgcaatggcaagtcggcttcagggcgcctggcccgggccctgcggcctgatgaccccccactggatggggatgacgccgatgacgagggcaacctgagcaaaggggaacgggtccgcgcgtggatccgagcccgactccctgcctgctgcctcgagcgagactcctggtcagcctacatcttccctcctcagtccaggttccgcctcctgtgtcaccggatcatcacccacaagatgttcgaccacgtggtccttgtcatcatcttccttaactgcatcaccatcgccatggagcgccccaaaattgacccccacagcgctgaacgcatcttcctgaccctctccaattacatcttcaccgcagtctttctggctgaaatgacagtgaaggtggtggcactgggctggtgcttcggggagcaggcgtacctgcggagcagttggaacgtgctggacgggctgttggtgctcatctccgtcatcgacattctggtgtccatggtctctgacagcggcaccaagatcctgggcatgctgagggtgctgcggctgctgcggaccctgcgcccgctcagggtgatcagccgggcgcaggggctgaagctggtggtggagacgctgatgtcctcactgaaacccatcggcaacattgtagtcatctgctgtgccttcttcatcattttcggcatcttgggggtgcagctcttcaaagggaagtttttcgtgtgccagggcgaggataccaggaacatcaccaataaatcggactgtgccgaggccagttaccggtgggtccggcacaagtacaactttgacaaccttggccaggccctgatgtccctgttcgttttggcctccaaggatggttgggtggacatcatgtacgatgggctggatgctgtgggcgtggaccagcagcccatcatgaaccacaacccctggatgctgctgtacttcatctcgttcctgctcattgtggccttctttgtcctgaacatgtttgtgggtgtggtggtggagaacttccacaagtgtcggcagcaccaggaggaagaggaggcccggcggcgggaggagaagcgcctacgaagactggagaaaaagagaaggagtaaggagaagcagatggctgaagcccagtgcaaaccttactactccgactactcccgcttccggctcctcgtccaccacttgtgcaccagccactacctggacctcttcatcacaggtgtcatcgggctgaacgtggtcaccatggccatggagcactaccagcagccccagattctggatgaggctctgaagatctgcaactacatcttcactgtcatctttgtcttggagtcagttttcaaacttgtggcctttggtttccgtcggttcttccaggacaggtggaaccagctggacctggccattgtgctgctgtccatcatgggcatcacgctggaggaaatcgaggtcaacgcctcgctgcccatcaaccccaccatcatccgcatcatgagggtgctgcgcattgcccgagtgctgaagctgctgaagatggctgtgggcatgcgggcgctgctggacacggtgatgcaggccctgccccaggtggggaacctgggacttctcttcatgttgttgtttttcatctttgcagctctgggcgtggagctctttggagacctggagtgtgacgagacacacccctgtgagggcctgggccgtcatgccacctttcggaactttggcatggccttcctaaccctcttccgagtctccacaggtgacaattggaatggcattatgaaggacaccctccgggactgtgaccaggagtccacctgctacaacacggtcatctcgcctatctactttgtgtccttcgtgctgacggcccagttcgtgctagtcaacgtggtgatcgccgtgctgatgaagcacctggaggagagcaacaaggaggccaaggaggaggccgagctagaggctgagctggagctggagatgaagaccctcagcccccagccccactcgccactgggcagccccttcctctggcctggggtcgagggccccgacagccccgacagccccaagcctggggctctgcacccagcggcccacgcgagatcagcctcccacttttccctggagcaccccacggacaggcagctgtttgacaccatatccctgctgatccagggctccctggagtgggagctgaagctgatggacgagctggcaggcccagggggccagccctctgccttcccttctgcccccagcctgggaggctccgacccacagatccctctagctgagatggaggctctgtctctgacgtcagagattgtgtctgaaccgtcctgctctctagctctgacggatgactctttgcctgatgacatgcacacactcttacttagtgccctggagagcaatatgcagccccaccccacggagctgccaggaccagacttactgactgtgcggaagtctggggtcagccgaacgcactctctgcccaatgacagctacatgtgtcggcatgggagcactgccgaggggcccctgggacacaggggctgggggctccccaaagctcagtcaggctccgtcttgtccgttcactcccagccagcagataccagctacatcctgcagcttcccaaagatgcacctcatctgctccagccccacagcgccccaacctggggcaccatccccaaactgcccccaccaggacgctcccctttggctcagaggccactcaggcgccaggcagcaataaggactgactccttggacgttcagggtctgggcagccgggaagacctgctggcagaggtgagtgggccctccccgcccctggcccgggcctactctttctggggccagtcaagtacccaggcacagcagcactcccgcagccacagcaagatctccaagcacatgaccccgccagccccttgcccaggcccagaacccaactggggcaagggccctccagagaccagaagcagcttagagttggacacggagctgagctggatttcaggagacctcctgccccctggcggccaggaggagcccccatccccacgggacctgaagaagtgctacagcgtggaggcccagagctgccagcgccggcccacgtcctggctggatgagcagaggagacactctatcgccgtcagctgcctggacagcggctcccaaccccacctgggcacagacccctctaaccttgggggccagcctcttggggggcctgggagccggcccaagaaaaaactcagcccgcctagtatcaccatagacccccccgagagccaaggtcctcggaccccgcccagccctggtatctgcctccggaggagggctccgtccagcgactccaaggatcccttggcctctggcccccctgacagcatggctgcctcgccctccccaaagaaagatgtgctgagtctctccggtttatcctctgacccagcagacctggacccctgagtcctgccccactttcccactcacctttctccactgggtgccaagtcctagctcctcctcctgggctatattcctgacaaaagttccatatagacaccaaggaggcggaggcgctcctccctgcctcagtggctctgggtacctgcaagcagaacttccaaagagagttaaaagcagcagccccggcaactctggctccaggcagaaggagaggcccggtgcagctgaggttcccgacaccagaagctgttgggagaaagcaatacgtttgtgcagaatctctatgtatattctattttattaaattaattgaatctagtatatgcgggatgtacgacattttgtgactgaagagacttgtttccttctacttttatgtgtctcagaatatttttgaggcgaaggcgtctgtctcttggctattttaacctaaaataacagtctagttatattccctcttcttgcaaagcacaagctgggaccgcgagcacattgcagccccaacggtggcccatcttcagcggagagcgagaaccattttggaaactgtaatgtaacttattttttcctttaacctcgtcatcattttctgtagggaaaaaaaaaagaaaaagaaaaaatgagattttacaagtgaaatggaacctttttatatatacatacatacatatctatctatctatctatatatatataaaataaagtaattttcct

SEQ ID NO: 424742 - DNA, 7692 bp, Homo sapiens
ccttttcgttcgccctctcggggcggcttcgccgaaggtagcgccgaatccggcaaccggagcctgggcgcgaagcgaagaagccggaacaaagtgagggggagccggccggctggcccgggaagccccaggggcgcaggggaagcgggactcgcgccgggcggggtttccctgcgccccggcgccccgcgggcagcatgcccctgcgggcagggggagctgggctgaactggccctcccgggggctcagcttgcgccctagagcccaccagatgtgcccccgccggggcccccgggttgcgtgaggacacctcctctgaggggcgccgcttgcccctctccggatcgcccggggccccggctggccagaggatggacgaggaggaggatggagcgggcgccgaggagtcgggacagccccggagcttcatgcggctcaacgacctgtcgggggccgggggccggccggggccggggtcagcagaaaaggacccgggcagcgcggactccgaggcggaggggctgccgtacccggcgctggccccggtggttttcttctacttgagccaggacagccgcccgcggagctggtgtctccgcacggtctgtaacccctggtttgagcgcatcagcatgttggtcatccttctcaactgcgtgaccctgggcatgttccggccatgcgaggacatcgcctgtgactcccagcgctgccggatcctgcaggcctttgatgacttcatctttgccttctttgccgtggagatggtggtgaagatggtggccttgggcatctttgggaaaaagtgttacctgggagacacttggaaccggcttgactttttcatcgtcatcgcagggatgctggagtactcgctggacctgcagaacgtcagcttctcagctgtcaggacagtccgtgtgctgcgaccgctcagggccattaaccgggtgcccagcatgcgcatccttgtcacgttgctgctggatacgctgcccatgctgggcaacgtcctgctgctctgcttcttcgtcttcttcatcttcggcatcgtcggcgtccagctgtgggcagggctgcttcggaaccgatgcttcctacctgagaatttcagcctccccctgagcgtggacctggagcgctattaccagacagagaacgaggatgagagccccttcatctgctcccagccacgcgagaacggcatgcggtcctgcagaagcgtgcccacgctgcgcggggacgggggcggtggcccaccttgcggtctggactatgaggcctacaacagctccagcaacaccacctgtgtcaactggaaccagtactacaccaactgctcagcgggggagcacaaccccttcaagggcgccatcaactttgacaacattggctatgcctggatcgccatcttccaggtcatcacgctggagggctgggtcgacatcatgtactttgtgatggatgctcattccttctacaatttcatctacttcatcctcctcatcatcgtgggctccttcttcatgatcaacctgtgcctggtggtgattgccacgcagttctcagagaccaagcagcgggaaagccagctgatgcgggagcagcgtgtgcggttcctgtccaacgccagcaccctggctagcttctctgagcccggcagctgctatgaggagctgctcaagtacctggtgtacatccttcgtaaggcagcccgcaggctggctcaggtctctcgggcagcaggtgtgcgggttgggctgctcagcagcccagcacccctcgggggccaggagacccagcccagcagcagctgctctcgctcccaccgccgcctatccgtccaccacctggtgcaccaccaccaccaccatcaccaccactaccacctgggcaatgggacgctcagggccccccgggccagcccggagatccaggacagggatgccaatgggtcccgccggctcatgctgccaccaccctcgacgcctgccctctccggggccccccctggtggcgcagagtctgtgcacagcttctaccatgccgactgccacttagagccagtccgctgccaggcgccccctcccaggtccccatctgaggcatccggcaggactgtgggcagcgggaaggtgtatcccaccgtgcacaccagccctccaccggagacgctgaaggagaaggcactagtagaggtggctgccagctctgggcccccaaccctcaccagcctcaacatcccacccgggccctacagctccatgcacaagctgctggagacacagagtacaggtgcctgccaaagctcttgcaagatctccagcccttgcttgaaagcagacagtggagcctgtggtccagacagctgcccctactgtgcccgggccggggcaggggaggtggagctcgccgaccgtgaaatgcctgactcagacagcgaggcagtttatgagttcacacaggatgcccagcacagcgacctccgggacccccacagccggcggcaacggagcctgggcccagatgcagagcccagctctgtgctggccttctggaggctaatctgtgacaccttccgaaagattgtggacagcaagtactttggccggggaatcatgatcgccatcctggtcaacacactcagcatgggcatcgaataccacgagcagcccgaggagcttaccaacgccctagaaatcagcaacatcgtcttcaccagcctctttgccctggagatgctgctgaagctgcttgtgtatggtccctttggctacatcaagaatccctacaacatcttcgatggtgtcattgtggtcatcagcgtgtgggagatcgtgggccagcaggggggcggcctgtcggtgctgcggaccttccgcctgatgcgtgtgctgaagctggtgcgcttcctgccggcgctgcagcggcagctggtggtgctcatgaagaccatggacaacgtggccaccttctgcatgctgcttatgctcttcatcttcatcttcagcatcctgggcatgcatctcttcggctgcaagtttgcctctgagcgggatggggacaccctgccagaccggaagaattttgactccttgctctgggccatcgtcactgtctttcagatcctgacccaggaggactggaacaaagtcctctacaatggtatggcctccacgtcgtcctgggcggccctttatttcattgccctcatgaccttcggcaactacgtgctcttcaatttgctggtcgccattctggtggagggcttccaggcggaggaaatcagcaaacgggaagatgcgagtggacagttaagctgtattcagctgcctgtcgactcccaggggggagatgccaacaagtccgaatcagagcccgatttcttctcacccagcctggatggtgatggggacaggaagaagtgcttggccttggtgtccctgggagagcacccggagctgcggaagagcctgctgccgcctctcatcatccacacggccgccacacccatgtcgctgcccaagagcaccagcacgggcctgggcgaggcgctgggccctgcgtcgcgccgcaccagcagcagcgggtcggcagagcctggggcggcccacgagatgaagtcaccgcccagcgcccgcagctctccgcacagcccctggagcgctgcaagcagctggaccagcaggcgctccagccggaacagcctcggccgtgcacccagcctgaagcggagaagcccaagtggagagcggcggtccctgttgtcgggagaaggccaggagagccaggatgaagaggagagctcagaagaggagcgggccagccctgcgggcagtgaccatcgccacagggggtccctggagcgggaggccaagagttcctttgacctgccagacacactgcaggtgccagggctgcatcgcactgccagtggccgagggtctgcttctgagcaccaggactgcaatggcaagtcggcttcagggcgcctggcccgggccctgcggcctgatgaccccccactggatggggatgacgccgatgacgagggcaacctgagcaaaggggaacgggtccgcgcgtggatccgagcccgactccctgcctgctgcctcgagcgagactcctggtcagcctacatcttccctcctcagtccaggttccgcctcctgtgtcaccggatcatcacccacaagatgttcgaccacgtggtccttgtcatcatcttccttaactgcatcaccatcgccatggagcgccccaaaattgacccccacagcgctgaacgcatcttcctgaccctctccaattacatcttcaccgcagtctttctggctgaaatgacagtgaaggtggtggcactgggctggtgcttcggggagcaggcgtacctgcggagcagttggaacgtgctggacgggctgttggtgctcatctccgtcatcgacattctggtgtccatggtctctgacagcggcaccaagatcctgggcatgctgagggtgctgcggctgctgcggaccctgcgcccgctcagggtgatcagccgggcgcaggggctgaagctggtggtggagacgctgatgtcctcactgaaacccatcggcaacattgtagtcatctgctgtgccttcttcatcattttcggcatcttgggggtgcagctcttcaaagggaagtttttcgtgtgccagggcgaggataccaggaacatcaccaataaatcggactgtgccgaggccagttaccggtgggtccggcacaagtacaactttgacaaccttggccaggccctgatgtccctgttcgttttggcctccaaggatggttgggtggacatcatgtacgatgggctggatgctgtgggcgtggaccagcagcccatcatgaaccacaacccctggatgctgctgtacttcatctcgttcctgctcattgtggccttctttgtcctgaacatgtttgtgggtgtggtggtggagaacttccacaagtgtcggcagcaccaggaggaagaggaggcccggcggcgggaggagaagcgcctacgaagactggagaaaaagagaaggaatctaatgctggacgatgtaattgcttccggcagctcagccagcgctgcgtcagaagcccagtgcaaaccttactactccgactactcccgcttccggctcctcgtccaccacttgtgcaccagccactacctggacctcttcatcacaggtgtcatcgggctgaacgtggtcaccatggccatggagcactaccagcagccccagattctggatgaggctctgaagatctgcaactacatcttcactgtcatctttgtcttggagtcagttttcaaacttgtggcctttggtttccgtcggttcttccaggacaggtggaaccagctggacctggccattgtgctgctgtccatcatgggcatcacgctggaggaaatcgaggtcaacgcctcgctgcccatcaaccccaccatcatccgcatcatgagggtgctgcgcattgcccgagtgctgaagctgctgaagatggctgtgggcatgcgggcgctgctggacacggtgatgcaggccctgccccaggtggggaacctgggacttctcttcatgttgttgtttttcatctttgcagctctgggcgtggagctctttggagacctggagtgtgacgagacacacccctgtgagggcctgggccgtcatgccacctttcggaactttggcatggccttcctaaccctcttccgagtctccacaggtgacaattggaatggcattatgaaggacaccctccgggactgtgaccaggagtccacctgctacaacacggtcatctcgcctatctactttgtgtccttcgtgctgacggcccagttcgtgctagtcaacgtggtgatcgccgtgctgatgaagcacctggaggagagcaacaaggaggccaaggaggaggccgagctagaggctgagctggagctggagatgaagaccctcagcccccagccccactcgccactgggcagccccttcctctggcctggggtcgagggccccgacagccccgacagccccaagcctggggctctgcacccagcggcccacgcgagatcagcctcccacttttccctggagcaccccacggacaggcagctgtttgacaccatatccctgctgatccagggctccctggagtgggagctgaagctgatggacgagctggcaggcccagggggccagccctctgccttcccttctgcccccagcctgggaggctccgacccacagatgcagccccaccccacggagctgccaggaccagacttactgactgtgcggaagtctggggtcagccgaacgcactctctgcccaatgacagctacatgtgtcggcatgggagcactgccgaggggcccctgggacacaggggctgggggctccccaaagctcagtcaggctccgtcttgtccgttcactcccagccagcagataccagctacatcctgcagcttcccaaagatgcacctcatctgctccagccccacagcgccccaacctggggcaccatccccaaactgcccccaccaggacgctcccctttggctcagaggccactcaggcgccaggcagcaataaggactgactccttggacgttcagggtctgggcagccgggaagacctgctggcagaggtgagtgggccctccccgcccctggcccgggcctactctttctggggccagtcaagtacccaggcacagcagcactcccgcagccacagcaagatctccaagcacatgaccccgccagccccttgcccaggcccagaacccaactggggcaagggccctccagagaccagaagcagcttagagttggacacggagctgagctggatttcaggagacctcctgccccctggcggccaggaggagcccccatccccacgggacctgaagaagtgctacagcgtggaggcccagagctgccagcgccggcccacgtcctggctggatgagcagaggagacactctatcgccgtcagctgcctggacagcggctcccaaccccacctgggcacagacccctctaaccttgggggccagcctcttggggggcctgggagccggcccaagaaaaaactcagcccgcctagtatcaccatagacccccccgagagccaaggtcctcggaccccgcccagccctggtatctgcctccggaggagggctccgtccagcgactccaaggatcccttggcctctggcccccctgacagcatggctgcctcgccctccccaaagaaagatgtgctgagtctctccggtttatcctctgacccagcagacctggacccctgagtcctgccccactttcccactcacctttctccactgggtgccaagtcctagctcctcctcctgggctatattcctgacaaaagttccatatagacaccaaggaggcggaggcgctcctccctgcctcagtggctctgggtacctgcaagcagaacttccaaagagagttaaaagcagcagccccggcaactctggctccaggcagaaggagaggcccggtgcagctgaggttcccgacaccagaagctgttgggagaaagcaatacgtttgtgcagaatctctatgtatattctattttattaaattaattgaatctagta

SEQ ID NO: 424743 - DNA, 5317 bp, Homo sapiens
  misc_feature (4850)..(4850): n is a, c, g, or t
  misc_feature (4861)..(4861): n is a, c, g, or t
  misc_feature (4870)..(4872): n is a, c, g, or t
  misc_feature (4893)..(4894): n is a, c, g, or t
  misc_feature (4901)..(4901): n is a, c, g, or t
  misc_feature (4943)..(4943): n is a, c, g, or t
  misc_feature (4973)..(4973): n is a, c, g, or t
ccttttcgttcgccctctcggggcggcttcgccgaaggtagcgccgaatccggcaaccggagcctgggcgcgaagcgaagaagccggaacaaagtgagggggagccggccggctggcccgggaagccccaggggcgcaggggaagcgggactcgcgccgggcggggtttccctgcgccccggcgccccgcgggcagcatgcccctgcgggcagggggagctgggctgaactggccctcccgggggctcagcttgcgccctagagcccaccagatgtgcccccgccggggcccccgggttgcgtgaggacacctcctctgaggggcgccgcttgcccctctccggatcgcccggggccccggctggccagaggatggacgaggaggaggatggagcgggcgccgaggagtcgggacagccccggagcttcatgcggctcaacgacctgtcgggggccgggggccggccggggccggggtcagcagaaaaggacccgggcagcgcggactccgaggcggaggggctgccgtacccggcgctggccccggtggttttcttctacttgagccaggacagccgcccgcggagctggtgtctccgcacggtctgtaacccctggtttgagcgcatcagcatgttggtcatccttctcaactgcgtgaccctgggcatgttccggccatgcgaggacatcgcctgtgactcccagcgctgccggatcctgcaggcctttgatgacttcatctttgccttctttgccgtggagatggtggtgaagatggtggccttgggcatctttgggaaaaagtgttacctgggagacacttggaaccggcttgactttttcatcgtcatcgcagggatgctggagtactcgctggacctgcagaacgtcagcttctcagctgtcaggacagtccgtgtgctgcgaccgctcagggccattaaccgggtgcccagcatgcgcatccttgtcacgttgctgctggatacgctgcccatgctgggcaacgtcctgctgctctgcttcttcgtcttcttcatcttcggcatcgtcggcgtccagctgtgggcagggctgcttcggaaccgatgcttcctacctgagaatttcagcctccccctgagcgtggacctggagcgctattaccagacagagaacgaggatgagagccccttcatctgctcccagccacgcgagaacggcatgcggtcctgcagaagcgtgcccacgctgcgcggggacgggggcggtggcccaccttgcggtctggactatgaggcctacaacagctccagcaacaccacctgtgtcaactggaaccagtactacaccaactgctcagcgggggagcacaaccccttcaagggcgccatcaactttgacaacattggctatgcctggatcgccatcttccaggtcatcacgctggagggctgggtcgacatcatgtactttgtgatggatgctcattccttctacaatttcatctacttcatcctcctcatcatcgtgggctccttcttcatgatcaacctgtgcctggtggtgattgccacgcagttctcagagaccaagcagcgggaaagccagctgatgcgggagcagcgtgtgcggttcctgtccaacgccagcaccctggctagcttctctgagcccggcagctgctatgaggagctgctcaagtacctggtgtacatccttcgtaaggcagcccgcaggctggctcaggtctctcgggcagcaggtgtgcgggttgggctgctcagcagcccagcacccctcgggggccaggagacccagcccagcagcagctgctctcgctcccaccgccgcctatccgtccaccacctggtgcaccaccaccaccaccatcaccaccactaccacctgggcaatgggacgctcagggccccccgggccagcccggagatccaggacagggatgccaatgggtcccgccggctcatgctgccaccaccctcgacgcctgccctctccggggccccccctggtggcgcagagtctgtgcacagcttctaccatgccgactgccacttagagccagtccgctgccaggcgccccctcccaggtccccatctgaggcatccggcaggactgtgggcagcgggaaggtgtatcccaccgtgcacaccagccctccaccggagacgctgaaggagaaggcactagtagaggtggctgccagctctgggcccccaaccctcaccagcctcaacatcccacccgggccctacagctccatgcacaagctgctggagacacagagtacaggtgcctgccaaagctcttgcaagatctccagcccttgcttgaaagcagacagtggagcctgtggtccagacagctgcccctactgtgcccgggccggggcaggggaggtggagctcgccgaccgtgaaatgcctgactcagacagcgaggcagtttatgagttcacacaggatgcccagcacagcgacctccgggacccccacagccggcggcaacggagcctgggcccagatgcagagcccagctctgtgctggccttctggaggctaatctgtgacaccttccgaaagattgtggacagcaagtactttggccggggaatcatgatcgccatcctggtcaacacactcagcatgggcatcgaataccacgagcagcccgaggagcttaccaacgccctagaaatcagcaacatcgtcttcaccagcctctttgccctggagatgctgctgaagctgcttgtgtatggtccctttggctacatcaagaatccctacaacatcttcgatggtgtcattgtggtcatcagcgtgtgggagatcgtgggccagcaggggggcggcctgtcggtgctgcggaccttccgcctgatgcgtgtgctgaagctggtgcgcttcctgccggcgctgcagcggcagctggtggtgctcatgaagaccatggacaacgtggccaccttctgcatgctgcttatgctcttcatcttcatcttcagcatcctgggcatgcatctcttcggctgcaagtttgcctctgagcgggatggggacaccctgccagaccggaagaattttgactccttgctctgggccatcgtcactgtctttcagatcctgacccaggaggactggaacaaagtcctctacaatggtatggcctccacgtcgtcctgggcggccctttatttcattgccctcatgaccttcggcaactacgtgctcttcaatttgctggtcgccattctggtggagggcttccaggcggagggagatgccaacaagtccgaatcagagcccgatttcttctcacccagcctggatggtgatggggacaggaagaagtgcttggccttggtgtccctgggagagcacccggagctgcggaagagcctgctgccgcctctcatcatccacacggccgccacacccatgtcgctgcccaagagcaccagcacgggcctgggcgaggcgctgggccctgcgtcgcgccgcaccagcagcagcgggtcggcagagcctggggcggcccacgagatgaagtcaccgcccagcgcccgcagctctccgcacagcccctggagcgctgcaagcagctggaccagcaggcgctccagccggaacagcctcggccgtgcacccagcctgaagcggagaagcccaagtggagagcggcggtccctgttgtcgggagaaggccaggagagccaggatgaagaggagagctcagaagaggagcgggccagccctgcgggcagtgaccatcgccacagggggtccctggagcgggaggccaagagttcctttgacctgccagacacactgcaggtgccagggctgcatcgcactgccagtggccgagggtctgcttctgagcaccaggactgcaatggcaagtcggcttcagggcgcctggcccgggccctgcggcctgatgaccccccactggatggggatgacgccgatgacgagggcaacctgagcaaaggggaacgggtccgcgcgtggatccgagcccgactccctgcctgctgcctcgagcgagactcctggtcagcctacatcttccctcctcagtccaggttccgcctcctgtgtcaccggatcatcacccacaagatgttcgaccacgtggtccttgtcatcatcttccttaactgcatcaccatcgccatggagcgccccaaaattgacccccacagcgctgaacgcatcttcctgaccctctccaattacatcttcaccgcagtctttctggctgaaatgacagtgaaggtggtggcactgggctggtgcttcggggagcaggcgtacctgcggagcagttggaacgtgctggacgggctgttggtgctcatctccgtcatcgacattctggtgtccatggtctctgacagcggcaccaagatcctgggcatgctgagggtgctgcggctgctgcggaccctgcgcccgctcagggtgatcagccgggcgcaggggctgaagctggtggtggagacgctgatgtcctcactgaaacccatcggcaacattgtagtcatctgctgtgccttcttcatcattttcggcatcttgggggtgcagctcttcaaagggaagtttttcgtgtgccagggcgaggataccaggaacatcaccaataaatcggactgtgccgaggccagttaccggtgggtccggcacaagtacaactttgacaaccttggccaggccctgatgtccctgttcgttttggcctccaaggatggttgggtggacatcatgtacgatgggctggatgctgtgggcgtggaccagcaggtagggctgaggtgggcaggatccatctgtgggcncaggtcactcngcatgggcnnnttccaggacagaaagagcaanncagggtncaaaatgccatgaaagaagcatcatattttacagcagaggcngttgctggtacctgtgggccaaatctgggnatgttttattggtctacaacatgtttaacatgttttgaattagtgatgaatatttttaaactggtgaatttgggctgtgtgcagtggctcacacctgtaatgccagtgcattgggaggcctaggcaagaggatcacttgaggccaggagttggagaccagcctgggcatcatagcaagacccccagctctacaaaaaataaaaacaattagccgggtgtggtggtatcatctggagtcccagctgaggtgggaggatctcttgagcccaggagtttgaggctgcaataagctgtgatcgcaccactgcactccagcctaagcaatagaacaagaccctgtctct

SEQ ID NO: 424744 - DNA, 1300 bp, Homo sapiens
caaggtcttcagccacaagttatacctaaaaaaacatgagagaattcatactggggagaaaccgtacagatgtcatgaatgtggtaaggacttcactcgaaattcaaacctggcaaatcatcacagaatccatactggagagaaaccgtacagatgaaatgtgtgtggtaagatctttagtaataattcacaccttgcacagcatgagataattcattcatgagagagttcttacaaactgagtatggcaaactcttcatgctaagttctagcattaatcaacatcagagattccatactaaagagaaatcatagcaatgtatgtgaatcaggtctcttgaggcctgccaaatgactagatatcaaaacatacatcttggatgaaaccatacagatggattatgtatgctgaggctattattcaaggaccattactatggaacatgataagatttacacaagcgataattcagtctctagttctccaatatttatgatactgcatgctgcagaaaagtcacagctccaaatacgttgaatctcatgacgcgatgcatgtcgaaggtccaagggcatgtggaaatggtcagttatattcaggcaattaaaaaacctaattatatggggttttttgaaaaggctactttacattttatgactttcatcctcaactctgaaatcacttcatgtgacttctttacagacctttcactgtggtctcttgaatcagtaggatgctgggcgcggtggctcccgcctgtcctcccaaagggctgggattacaggtgtgagccaccatgcctggcctaaatcctgttagttttgaatggaaattttctttctttcttttttttttttctgggacagattcttgcttcgagacaatgacaaatacaaactaggtttactgtaaatatgagaaagggaaaaaatacttttattgtattagaagacttgaaatcacatgaagtgataccaatcttttgttgttgttggtcagatgttttagctattttaggtgtttgggttttttgtctttctacataactgctaaccttgttagtatctgcagaatgccttaattaggaaaggtattaaccctatgtgtcagatttgtataattcatattgctttacatggagtcttccaataaatgtatatggtatatgtctctatttgctgtctttgatttcttttatcagcatttggtagttgtaacataacagttctatgaatgttttgtttcacatgtatttctttgccccccccctttttttttttttttttttgagacggagtc

SEQ ID NO: 424745 - DNA, 4458 bp, Homo sapiens
ctctgaggagacactttttttttcctccctccttccctcctctcctcctcccttcccttcccctctcctcccctctctcctccttcccccctcggtccgccggagcctgctggggcgagcggttggtattgcaggcgcttgctctccggggccgcccggcgggtagctggcggggggaggaggcaggaaccgcgatggcgcctcagaagcacggcggtgggggagggggcggctcggggcccagcgcggggtccgggggaggcggcttcgggggttcggcggcggtggcggcggcgacggcttcgggcggcaaatccggcggcgggagctgtggagggggtggcagttactcggcctcctcctcctcctccgcggcggcagcggcgggggctgcggtgttaccggtgaagaagccgaaaatggagcacgtccaggctgaccacgagcttttcctccaggcctttgagaagccaacacagatctatagatttcttcgaactcggaatctcatagcaccaatatttttgcacagaactcttacttacatgtctcatcgaaactccagaacaaacatcaaaaggaaaacatttaaagttgatgatatgttatcaaaagtagagaaaatgaaaggagagcaagaatctcatagcttgtcagctcatttgcagcttacgtttactggtttcttccacaaaaatgataagccatcaccaaactcagaaaatgaacaaaattctgttaccctggaagtcctgcttgtgaaagtttgccacaaaaaaagaaaggatgtaagttgtccaataaggcaagttcccacaggtaaaaagcaggtgcctttgaatcctgacctcaatcaaacaaaacccggaaatttcccgtcccttgcagtttccagtaatgaatttgaacctagtaacagccatatggtgaagtcttactcgttgctatttagagtgactcgtccaggaagaagagagtttaatggaatgattaatggagaaaccaatgaaaatattgatgtcaatgaagagcttccagccagaagaaaacgaaatcgtgaggatggggaaaagacatttgttgcacaaatgacagtatttgataaaaacaggcgcttacagcttttagatggggaatatgaagtagccatgcaggaaatggaagaatgtccaataagcaagaaaagagcaacatgggagactattcttgatgggaagaggctgcctccattcgaaacattttctcagggacctacgttgcagttcactcttcgttggacaggagagaccaatgataaatctacggctcctattgccaaacctcttgccactagaaattcagagagtctccatcaggaaaacaagcctggttcagttaaacctactcaaactattgctgttaaagaatcattgactacagatctacaaacaagaaaagaaaaggatactccaaatgaaaaccgacaaaaattaagaatattttatcagtttctctataacaacaatacaaggcaacaaactgaagcaagagatgacctgcattgcccttggtgtactctgaactgccgcaaactttatagtttactcaagcatcttaaactctgccatagcagatttatcttcaactatgtttatcatccaaaaggtgctaggatagatgtttctatcaatgagtgttatgatggctcctatgcaggaaatcctcaggatattcatcgccaacctggatttgcttttagtcgcaacggaccagttaagagaacacctatcacacatattcttgtgtgcaggccaaaacgaacaaaagcaagcatgtctgaatttcttgaatctgaagatggggaagtagaacagcaaagaacatatagtagtggccacaatcgtctgtatttccatagtgatacctgcttacctctccgtccacaagaaatggaagtagatagtgaagatgaaaaggatcctgaatggctaagagaaaaaaccattacacaaattgaagagttttctgatgttaatgaaggagagaaagaagtgatgaaactctggaatctccatgtcatgaagcatgggtttattgctgacaatcaaatgaatcatgcctgtatgctgtttgtagaaaattatggacagaaaataattaagaagaatttatgtcgaaacttcatgcttcatctagtcagcatgcatgactttaatcttattagcataatgtcaatagataaagctgttaccaagctccgtgaaatgcagcaaaaattagaaaagggggaatctgcttcccctgcaaacgaagaaataactgaagaacaaaatgggacagcaaatggatttagtgaaattaactcaaaagagaaagctttggaaacagatagtgtctcaggggtttcaaaacagagcaaaaaacaaaaactctgaaaagctctaaccccatgttatggacaaacactgaaattacattttagggaattcatcctctaagaattatgtttttgtttttaatcatatgttccaaacaggcactgttagatgaagtaaatgatttcaacaaggatatttgtatcagggttctacttcacttcattatgcagcattacatgtatatcacttttattgatgtcattaaaacattctgtactttaagcatgaaaagcaatatttcaaagtatttttaaactcaacaaatgtcatcaaatatgttgaattgatctagaaattatttcatatataaatcagaatttttttgcatttatgaacggctgtttttctactttgtaattgtgagacattttcttggggagggaaaattggaatggttcccttttttagaaattgaagtggtcttcatatgtcaactacagaaaaggaaaaaaatagaaattgaaggatttttatgaaattatattgcattactatttgcagtcaaactttgatccttgtttttgaaatcatttgtcaattcggaatgaaaaattataatgtaattttacattacataagttccttttacaattaaaaaatagcacttcttcatcttatgcctgtttgagaagatattaaattttcacattgttgacagtgaaatgctatgttggtttataagattacagaccatttgttttcatgtggataattttagtgcattgctcacccggtatgttttttttttttaacttgaacattttgcttgttttgtttttcttttttaattagataatcacacggaaaattaagctgttcatatctttaaattaggattgcaaaccaaggaaagaacgcatttgagattttaagatgtcacttataaggggagaagtgttcttaaaaagtcaaccagaaaactgttatgccttttatttgtttgcaaggatgtctttgtaatgtgtttcatgaatagaatatccaatagagataagctgacttgaatcattttgagcaattttgccctgtgttatatgtgtttcacgcacatatttgcagttggattttctccaacagaaagtggattcactactggcacattaacaagcaccaataggtttttattccaactccgagcactgtggttgagtaacatcacctcaattttttattatccttaaagatattgcattttcatattctttatttataaaggatcaatgctgctgtaaatacaggtatttttaattttaaaatttcattccaccaccatcagatgcagttccctattttgtttaatgaagggatatataagctttctaatggtgtcttcagaaatttataaaatgtaaatactgatttgactggtctttaagatgtgtttaactgtgaggctatttaacgaatagtgtggatgtgatttgtcatccagtattaagttcttagtcattgatttttgtgtttaaaaaaaaataggaaagagggaaactgcagctttcattacagattccttgattggtaagctctccaaatgatgagttctagtaaactctgatttttgcctctggatagtagatctcgagcgtttatctcgggctttaatttgctaaagctgtgcacatatgtaaaaaaaaaaaaaaaaagattattttaggggagatgtaggtgtagaattattgcttatgtcatttcttaagcagttatgctcttaatgcttaaaagaaggctagcattgtttgcacaaaaagttggtgattcccaccccaaatagtaataaaattacttctgttgagtaaactttttatgtcatcgtaaaagctgaaaaaatccctttgtttctatttataaaaaaagtgcttttctatatgtacccttgataacagattttgaagaaatcctgtaagatgataaagcatttgaatggtacagtagatgtaaaaaaaattcagtttaaaagaacatttgtttttacattaaatgtttatttgaaatcaaatgattttgtacataaagttcaataatataaaagctgtattctgtt

SEQ ID NO: 424746 - DNA, 1944 bp, Homo sapiens
  misc_feature (308)..(308): n is a, c, g, or t
  misc_feature (686)..(686): n is a, c, g, or t
  misc_feature (1333)..(1333): n is a, c, g, or t
aaatttccttttgatgaagtcattgactaaagcgtcattaaaacaaaacaaaaaaagaattccaaaaaccctccaaaattcctttttaaagataggaaggcatacctgctgtcattttataggtagaacactaaaacacagtaaattacctggcctccaacttggtagtctgatttttttctgccttggtctggtgtttttgtggttttgttcttactttttgtgagttgtgaggggttttttgttgtttattttttgttaggtgtatagacacacttttggatgtcatatttaacagggaaagcatngagtcatgggcctgaataacagttgagtacaaatatttataaattggttgaagtaactttgatttcaatgttatattttaaagtctaggttattttactacagagcattacaatgataaaatatttcctttttttttttttttagcttgtcagctcatttgcagcttacgtttactggtttcttccacaaaaatggtatgtatttaaaagtaaataaagtggcattttaatagcaagatacctttgtgaatgtaaaaaaagtggggcttctgagtgtaaatttataaaattaagtttaatggaaaatatgttggttctgatgtttttgaactttaaggtatgaaggctaatgatgaaatttgtttttggtggatgggngtgcagagtgaaggctggagtgcaatgttatgatcttggctgactgcagcctccacctcccgggttcaagcgattctcctgcctcagcctcctgagtagctgggattacaggcacgtgccccatgcctggctaattttttgtatttttagtagagacagggtctcaccatgctggccaggctggtcttgaactcctgacctcgtgatccacccgccttggcctcccaagggggcgtgagccaccacgcctggctaatgatgaagattttaacaaattgtcttagaacttcaataggtaaagaatctcctcagtagaaccttttatgcataaacattttgaattaatgatactgtatcatgttttaaaaaaacacagtaaaacaactgaaataaccactattaccaatggcatatattaatattttagatattattcaaaggaaattatatggtatattactccagtaaaagctcaaagcatgctggaaagaattagagttgttttaaaaatggaaaaatacggccaggcgcagtggctcacgcctgtaatcccaacattttgggaggctgaggcgggtgtatcatgaggtcaggagttcaggatgttcaggagttcaggagttcagctggccaatatgatgaaaccncatctctactaaaaatataaacattagccaggcgtggtggtgggtgcctgtagtcccagttacttgggagacttaggcagaagaatcacttgaacctgagagtcggaggttgcaatgagctgagattgcgttactgcactccagcctgggcgacagagcgagactccatctcaaaaaaaaaaaaaagggaaaatcacttatcagcttatccatcataagtctgtgtatatggcatatctttttattatgcaatggaataaaaccattattagaaacatgccaggttggttgtcttggtatcgtttagtaagaaacaaagattgaaaatgagtcctggtgggccgggcacggtggctcacgcctgtaatcccagcactttgggaggctgaggcgggtggatcacaaggtcaggagatcgagactatcctggctaacatggtgaaaccccgtctctactaaaatacaaaaaaactagctgggtgtcgtggtgcacacctgtagtgtcaccagtggcactccagcctggtgacagagcgagactctgtctaaaaaaaaagaaaaagaaaatgagtcctggcctggtggctcatgtctgtaatctcagcattttg

SEQ ID NO: 424747 - DNA, 226 bp, Homo sapiens
  misc_feature (8)..(8): n is a, c, g, or t
cgatgagnatgtggacaacaaagtagagaggatttggggtgattgtacagtcaggaagaagtactctcatgtggacctgatgggagcaagatcttcgtctccatcaggaaaacaagcctggttcagttaaacctactcaaactattgctgttaaagaatcattgactacagatctacaaacaagaaaagagcaacatgggagactattctgatgggagcaagatcg

SEQ ID NO: 424748 - DNA, 4405 bp, Homo sapiens
ctctgaggagacactttttttttcctccctccttccctcctctcctcctcccttcccttcccctctcctcccctctctcctccttcccccctcggtccgccggagcctgctggggcgagcggttggtattgcaggcgcttgctctccggggccgcccggcgggtagctggcggggggaggaggcaggaaccgcgatggcgcctcagaagcacggcggtgggggagggggcggctcggggcccagcgcggggtccgggggaggcggcttcgggggttcggcggcggtggcggcggcgacggcttcgggcggcaaatccggcggcgggagctgtggagggggtggcagttactcggcctcctcctcctcctccgcggcggcagcggcgggggctgcggtgttaccggtgaagaagccgaaaatggagcacgtccaggctgaccacgagcttttcctccaggcctttgagaagccaacacagatctatagatttcttcgaactcggaatctcatagcaccaatatttttgcacagaactcttacttacatgtctcatcgaaactccagaacaaacatcaaaaggaaaacatttaaagttgatgatatgttatcaaaagtagagaaaatgaaaggagagcaagaatctcatagcttgtcagctcatttgcagcttacgtttactggtttcttccacaaaaatgataagccatcaccaaactcagaaaatgaacaaaattctgttaccctggaagtcctgcttgtgaaagtttgccacaaaaaaagaaaggatgtaagttgtccaataaggcaagttcccacaggtaaaaagcaggtgcctttgaatcctgacctcaatcaaacaaaacccggaaatttcccgtcccttgcagtttccagtaatgaatttgaacctagtaacagccatatggtgaagtcttactcgttgctatttagagtgactcgtccaggaagaagagagtttaatggaatgattaatggagaaaccaatgaaaatattgatgtcaatgaagagcttccagccagaagaaaacgaaatcgtgaggatggggaaaagacatttgttgcacaaatgacagtatttgataaaaacaggcgcttacagcttttagatggggaatatgaagtagccatgcaggaaatggaagaatgtccaataagcaagaaaagagcaacatgggagactattcttgatgggaagaggctgcctccattcgaaacattttctcagggacctacgttgcagttcactcttcgttggacaggagagaccaatgataaatctacggctcctattgccaaacctcttgccactagaaattcagagagtctccatcaggaaaacaagcctggttcagttaaacctactcaaactattgctgttaaagaatcattgactacagatctacaaacaagaaaagaaaaggatactccaaatgaaaaccgacaaaaattaagaatattttatcagtttctctataacaacaatacaaggcaacaaactgaagcaagagatgacctgcattgcccttggtgtactctgaactgccgcaaactttatagtttactcaagcatcttaaactctgccatagcagatttatcttcaactatgtttatcatccaaaaggtgctaggatagatgtttctatcaatgagtgttatgatggctcctatgcaggaaatcctcaggatattcatcgccaacctggatttgcttttagtcgcaacggaccagttaagagaacacctatcacacatattcttgtgtgcaggccaaaacgaacaaaagcaagcatgtctgaatttcttgaatctgaagatggggaagtagaacagcaaagaacatatagtagtggccacaatcgtctgtatttccatagtgatacctgcttacctctccgtccacaagaaatggaagtagatagtgaagatgaaaaggatcctgaatggctaagagaaaaaaccattacacaaattgaagagttttctgatgttaatgaaggagagaaagaagtgatgaaactctggaatctccatgtcatgaagcatgggtttattgctgacaatcaaatgaatcatgcctgtatgctgtttgtagaaaattatggacagaaaataattaagaagaatttatgtcgaaacttcatgcttcatctagtcagcatgcatgactttaatcttattagcataatgtcaatagataaagctgttaccaagctccgtgaaatgcagcaaaaattagaaaagggggaatctgcttcccctgcaaacgaagaaataactgaagaacaaaatgggacagcaaatggatttagtgaaattaactcaaaagagaaagctttggaaacagatagtgtctcaggggtttcaaaacagagcaaaaaacaaaaaggaattcatcctctaagaattatgtttttgtttttaatcatatgttccaaacaggcactgttagatgaagtaaatgatttcaacaaggatatttgtatcagggttctacttcacttcattatgcagcattacatgtatatcacttttattgatgtcattaaaacattctgtactttaagcatgaaaagcaatatttcaaagtatttttaaactcaacaaatgtcatcaaatatgttgaattgatctagaaattatttcatatataaatcagaatttttttgcatttatgaacggctgtttttctactttgtaattgtgagacattttcttggggagggaaaattggaatggttcccttttttagaaattgaagtggtcttcatatgtcaactacagaaaaggaaaaaaatagaaattgaaggatttttatgaaattatattgcattactatttgcagtcaaactttgatccttgtttttgaaatcatttgtcaattcggaatgaaaaattataatgtaattttacattacataagttccttttacaattaaaaaatagcacttcttcatcttatgcctgtttgagaagatattaaattttcacattgttgacagtgaaatgctatgttggtttataagattacagaccatttgttttcatgtggataattttagtgcattgctcacccggtatgttttttttttttaacttgaacattttgcttgttttgtttttcttttttaattagataatcacacggaaaattaagctgttcatatctttaaattaggattgcaaaccaaggaaagaacgcatttgagattttaagatgtcacttataaggggagaagtgttcttaaaaagtcaaccagaaaactgttatgccttttatttgtttgcaaggatgtctttgtaatgtgtttcatgaatagaatatccaatagagataagctgacttgaatcattttgagcaattttgccctgtgttatatgtgtttcacgcacatatttgcagttggattttctccaacagaaagtggattcactactggcacattaacaagcaccaataggtttttattccaactccgagcactgtggttgagtaacatcacctcaattttttattatccttaaagatattgcattttcatattctttatttataaaggatcaatgctgctgtaaatacaggtatttttaattttaaaatttcattccaccaccatcagatgcagttccctattttgtttaatgaagggatatataagctttctaatggtgtcttcagaaatttataaaatgtaaatactgatttgactggtctttaagatgtgtttaactgtgaggctatttaacgaatagtgtggatgtgatttgtcatccagtattaagttcttagtcattgatttttgtgtttaaaaaaaaataggaaagagggaaactgcagctttcattacagattccttgattggtaagctctccaaatgatgagttctagtaaactctgatttttgcctctggatagtagatctcgagcgtttatctcgggctttaatttgctaaagctgtgcacatatgtaaaaaaaaaaaaaaaaagattattttaggggagatgtaggtgtagaattattgcttatgtcatttcttaagcagttatgctcttaatgcttaaaagaaggctagcattgtttgcacaaaaagttggtgattcccaccccaaatagtaataaaattacttctgttgagtaaactttttatgtcatcgtaaaagctgaaaaaatccctttgtttctatttataaaaaaagtgcttttctatatgtacccttgataacagattttgaagaaatcctgtaagatgataaagcatttgaatggtacagtagatgtaaaaaaaattcagtttaaaagaacatttgtttttacattaaatgtttatttgaaatcaaatgattttgtacataaagttcaataatataaaagctgtattctgtt

SEQ ID NO: 424749 - DNA, 4290 bp, Homo sapiens
ctctgaggagacactttttttttcctccctccttccctcctctcctcctcccttcccttcccctctcctcccctctctcctccttcccccctcggtccgccggagcctgctggggcgagcggttggtattgcaggcgcttgctctccggggccgcccggcgggtagctggcggggggaggaggcaggaaccgcgatggcgcctcagaagcacggcggtgggggagggggcggctcggggcccagcgcggggtccgggggaggcggcttcgggggttcggcggcggtggcggcggcgacggcttcgggcggcaaatccggcggcgggagctgtggagggggtggcagttactcggcctcctcctcctcctccgcggcggcagcggcgggggctgcggtgttaccggtgaagaagccgaaaatggagcacgtccaggctgaccacgagcttttcctccaggcctttgagaagccaacacagatctatagatttcttcgaactcggaatctcatagcaccaatatttttgcacagaactcttacttacatgtctcatcgaaactccagaacaaacatcaaaaggaaaacatttaaagttgatgatatgttatcaaaagtagagaaaatgaaaggagagcaagaatctcatagcttgtcagctcatttgcagcttacgtttactggtttcttccacaaaaatgataagccatcaccaaactcagaaaatgaacaaaattctgttaccctggaagtcctgcttgtgaaagtttgccacaaaaaaagaaaggatgtaagttgtccaataaggcaagttcccacaggtaaaaagcaggtgcctttgaatcctgacctcaatcaaacaaaacccggaaatttcccgtcccttgcagtttccagtaatgaatttgaacctagtaacagccatatggtgaagtcttactcgttgctatttagagtgactcgtccaggaagaagagagtttaatggaatgattaatggagaaaccaatgaaaatattgatgtcaatgaagagcttccagccagaagaaaacgaaatcgtgaggatggggaaaagacatttgttgcacaaatgacagtatttgataaaaacaggcgcttacagcttttagatggggaatatgaagtagccatgcaggaaatggaagaatgtccaataagcaagaaaagagcaacatgggagactattcttgatgggaagaggctgcctccattcgaaacattttctcagggacctacgttgcagttcactcttcgttggacaggagagaccaatgataaatctacggctcctattgccaaacctcttgccactagaaattcagagagtctccatcaggaaaacaagcctggttcagttaaacctactcaaactattgctgttaaagaatcattgactacagatctacaaacaagaaaagaaaaggatactccaaatgaaaaccgacaaaaattaagaatattttatcagtttctctataacaacaatacaaggcaacaaactgaagcaagagatgacctgcattgcccttggtgtactctgaactgccgcaaactttatagtttactcaagcatcttaaactctgccatagcagatttatcttcaactatgtttatcatccaaaaggtgctaggatagatgtttctatcaatgagtgttatgatggctcctatgcaggaaatcctcaggatattcatcgccaacctggatttgcttttagtcgcaacggaccagttaagagaacacctatcacacatattcttgtgtgcaggccaaaacgaacaaaagcaagcatgtctgaatttcttgaatctgaagatggggaagtagaacagcaaagaacatatagtagtggccacaatcgtctgtatttccatagtgatacctgcttacctctccgtccacaagaaatggaagtagatagtgaagatgaaaaggatcctgaatggctaagagaaaaaaccattacacaaattgaagagttttctgatgttaatgaaggagagaaagaagtgatgaaactctggaatctccatgtcatgaagcatgggtttattgctgacaatcaaatgaatcatgcctgtatgctgtttgtagaaaattatggacagaaaataattaagaagaatttatgtcgaaacttcatgcttcatctagtcagcatgcatgactttaatcttattagcataatgtcaatagataaagctgttaccaagctccgtgaaatgcagcaaaaattagaaaagggggaatctgcttcccctgcaaacgaagaaataactgaagaacaaaatgggacagcaaatggatttagtgaaattaactcaaaagagaaagctttggaaacagatagtgtctcaggggtttcaaaacagagcaaaaaacaaaaactctgaaaagctctaaccccatgttatggacaaacactgaaattacattttagggaattcatcctctaagaattatgtttttgtttttaatcatatgttccaaacaggcactgttagatgaagtaaatgatttcaacaaggatatttgtatcagggttctacttcacttcattatgcagcattacatgtatatcacttttattgatgtcattaaaacattctgtactttaagcatgaaaagcaatatttcaaagtatttttaaactcaacaaatgtcatcaaatatgttgaattgatctagaaattatttcatatataaatcagaatttttttgcatttatgaacggctgtttttctactttgtaattgtgagacattttcttggggagggaaaattggaatggttcccttttttagaaattgaagtggtcttcatatgtcaactacagaaaaggaaaaaaatagaaattgaaggatttttatgaaattatattgcattactatttgcagtcaaactttgatccttgtttttgaaatcatttgtcaattcggaatgaaaaattataatgtaattttacattacataagttccttttacaattaaaaaatagcacttcttcatcttatgcctgtttgagaagatattaaattttcacattgttgacagtgaaatgctatgttggtttataagattacagaccatttgttttcatgtggataattttagtgcattgctcacccggtatgttttttttttttaacttgaacattttgcttgttttgtttttcttttttaattagataatcacacggaaaattaagctgttcatatctttaaattaggattgcaaaccaaggaaagaacgcatttgagattttaagatgtcacttataaggggagaagtgttcttaaaaagtcaaccagaaaactgttatgccttttatttgtttgcaaggatgtctttgtaatgtgtttcatgaatagaatatccaatagagataagctgacttgaatcattttgagcaattttgccctgtgttatatgtgtttcacgcacatatttgcagttggattttctccaacagaaagtggattcactactggcacattaacaagcaccaataggtttttattccaactccgagcactgtggttgagtaacatcacctcaattttttattatccttaaagatatttgatttgactggtctttaagatgtgtttaactgtgaggctatttaacgaatagtgtggatgtgatttgtcatccagtattaagttcttagtcattgatttttgtgtttaaaaaaaaataggaaagagggaaactgcagctttcattacagattccttgattggtaagctctccaaatgatgagttctagtaaactctgatttttgcctctggatagtagatctcgagcgtttatctcgggctttaatttgctaaagctgtgcacatatgtaaaaaaaaaaaaaaaaagattattttaggggagatgtaggtgtagaattattgcttatgtcatttcttaagcagttatgctcttaatgcttaaaagaaggctagcattgtttgcacaaaaagttggtgattcccaccccaaatagtaataaaattacttctgttgagtaaactttttatgtcatcgtaaaagctgaaaaaatccctttgtttctatttataaaaaaagtgcttttctatatgtacccttgataacagattttgaagaaatcctgtaagatgataaagcatttgaatggtacagtagatgtaaaaaaaattcagtttaaaagaacatttgtttttacattaaatgtttatttgaaatcaaatgattttgtacataaagttcaataatataaaagctgtattctgtt

SEQ ID NO: 424750 - DNA, 2097 bp, Homo sapiens
ctctgaggagacactttttttttcctccctccttccctcctctcctcctcccttcccttcccctctcctcccctctctcctccttcccccctcggtccgccggagcctgctggggcgagcggttggtattgcaggcgcttgctctccggggccgcccggcgggtagctggcggggggaggaggcaggaaccgcgatggcgcctcagaagcacggcggtgggggagggggcggctcggggcccagcgcggggtccgggggaggcggcttcgggggttcggcggcggtggcggcggcgacggcttcgggcggcaaatccggcggcgggagctgtggagggggtggcagttactcggcctcctcctcctcctccgcggcggcagcggcgggggctgcggtgttaccggtgaagaagccgaaaatggagcacgtccaggctgaccacgagcttttcctccaggcctttgagaagccaacacagatctatagatttcttcgaactcggaatctcatagcaccaatatttttgcacagaactcttacttacatgtctcatcgaaactccagaacaaacatcaaaaggaaaacatttaaagttgatgatatgttatcaaaagtagagaaaatgaaaggagagcaagaatctcatagcttgtcagctcatttgcagcttacgtttactggtttcttccacaaaaatgataagccatcaccaaactcagaaaatgaacaaaattctgttaccctggaagtcctgcttgtgaaagtttgccacaaaaaaagaaaggatgtaagttgtccaataaggcaagttcccacaggtaaaaagcaggtgcctttgaatcctgacctcaatcaaacaaaacccggaaatttcccgtcccttgcagtttccagtaatgaatttgaacctagtaacagccatatggtgaagtcttactcgttgctatttagagtgactcgtccaggaagaagagagtttaatggaatgattaatggagaaaccaatgaaaatattgatgtcaatgaagagcttccagccagaagaaaacgaaatcgtgaggatggggaaaagacatttgttgcacaaatgacagtatttgataaaaacaggcgcttacagcttttagatggggaatatgaagtagccatgcaggaaatggaagaatgtccaataagcaagaaaagagcaacatgggagactattcttgatgggaagaggctgcctccattcgaaacattttctcagggacctacgttgcagttcactcttcgttggacaggagagaccaatgataaatctacggctcctattgccaaacctcttgccactagaaattcagagagtctccatcaggaaaacaagcctggttcagttaaacctactcaaactattgctgttaaagaatcattgactacagatctacaaacaagaaaagaaaaggatactccaaatgaaaaccgacaaaaattaagaatattttatcagtttctctataacaacaatacaaggcaacaaactgaagcaagagatgacctgcattgcccttggtgtactctgaactgccgcaaactttatagtttactcaagcatcttaaactctgccatagcagatttatcttcaactatgtttatcatccaaaaggtgctaggatagatgtttctatcaatgagtgttatgatggctcctatgcaggaaatcctcaggatattcatcgccaacctggatttgcttttagtcgcaacggaccagttaagagaacacctatcacacatattcttgtgtgcaggccaaaacgaacaaaagcaagcatgtctgaatttcttgaatctgaagatggggaagtagaacagcaaagaacatatagtagtggccacaatcgtctgtatttccatagtgatacctgcttacctctccgtccacaagaaatggaagtagatagtgaagatgaaaaggatcctgaatggctaagagaaaaaaccattacagtaattattattatctttattggcaattatcttggaatattattttgttttgaaaattgcttactatgaactagacttttattgtaaaggaactttttttaaaaaaaaa

SEQ ID NO: 424751 - DNA, 401 bp, Homo sapiens
ctaaatcatttaatgtaaagtagcaaatgtcttgtagactgaattttttttacatctactgtaccattcaaatgcttaaaagaaggctagcattgtttgcacaaaaagttggtgattcccaccccaaatagtaataaaattacttctgttgagtaaactttttatgtcatcgtaaaagctgaaaaaatccctttgtttctatttataaaaaaagtgcttttctatatgtacccttgataacagattttgaagaaatcctgtaagatgataaagcatttgaatggtacagtagatgtaaaaaaaattcagtttaaaagaacatttgtttttacattaaatgtttatttgaaatcaaatgattttgtacataaagttcaataatataaaagctgtattctgtt

SEQ ID NO: 424752 - DNA, 351 bp, Homo sapiens
catttgacagtgtctgccttggcctcccaaaatgctgggattaacaggcgtgagtgacctcgcgtcactgggcatatttaattaaagagaatatctctaatttgattttccgcttaaattttttaaactatttttagaagtgatatttaaacaaaatatcttgttatgcgtaaattggagatttgcttttttttttttaattgtttttagtttctctataacaacaatacaaggcaacaaactgaagcaagagatgacctgcattgcccttggtgtactctgaactgccgcaaactttatagtttactcaagcatcttaaactctgccatagcagatttatcttcaactat

SEQ ID NO: 424753 - DNA, 3473 bp, Homo sapiens
acagcagcgaggagagagagtatgatgatatgagaacatgaaatatgatgtcatgagagctcagcagaagaaacgaatcgtgaggatgggaaagacattgtgccaatgacagtattgataaaacaggcgcttacagcttttagatggggaatatgaagtagccatgcaggaaatggaagaatgtccaataagcaagaaaagagcaacatgggagactattcttgatgggaagaggctgcctccattcgaaacattttctcagggacctacgttgcagttcactcttcgttggacaggagagaccaatgataaatctacggctcctattgccaaacctcttgccactagaaattcagagagtctccatcaggaaaacaagcctggttcagttaaacctactcaaactattgctgttaaagaatcattgactacagatctacaaacaagaaaagaaaaggatactccaaatgaaaaccgacaaaaattaagaatattttatcagtttctctataacaacaatacaaggcaacaaactgaagcaagagatgacctgcattgcccttggtgtactctgaactgccgcaaactttatagtttactcaagcatcttaaactctgccatagcagatttatcttcaactatgtttatcatccaaaaggtgctaggatagatgtttctatcaatgagtgttatgatggctcctatgcaggaaatcctcaggatattcatcgccaacctggatttgcttttagtcgcaacggaccagttaagagaacacctatcacacatattcttgtgtgcaggccaaaacgaacaaaagcaagcatgtctgaatttcttgaatctgaagatggggaagtagaacagcaaagaacatatagtagtggccacaatcgtctgtatttccatagtgatacctgcttacctctccgtccacaagaaatggaagtagatagtgaagatgaaaaggatcctgaatggctaagagaaaaaaccattacacaaattgaagagttttctgatgttaatgaaggagagaaagaagtgatgaaactctggaatctccatgtcatgaagcatgggtttattgctgacaatcaaatgaatcatgcctgtatgctgtttgtagaaaattatggacagaaaataattaagaagaatttatgtcgaaacttcatgcttcatctagtcagcatgcatgactttaatcttattagcataatgtcaatagataaagctgttaccaagctccgtgaaatgcagcaaaaattagaaaagggggaatctgcttcccctgcaaacgaagaaataactgaagaacaaaatgggacagcaaatggatttagtgaaattaactcaaaagagaaagctttggaaacagatagtgtctcaggggtttcaaaacagagcaaaaaacaaaaactctgaaaagctctaaccccatgttatggacaaacactgaaattacattttagggaattcatcctctaagaattatgtttttgtttttaatcatatgttccaaacaggcactgttagatgaagtaaatgatttcaacaaggatatttgtatcagggttctacttcacttcattatgcagcattacatgtatatcacttttattgatgtcattaaaacattctgtactttaagcatgaaaagcaatatttcaaagtatttttaaactcaacaaatgtcatcaaatatgttgaattgatctagaaattatttcatatataaatcagaatttttttgcatttatgaacggctgtttttctactttgtaattgtgagacattttcttggggagggaaaattggaatggttcccttttttagaaattgaagtggtcttcatatgtcaactacagaaaaggaaaaaaatagaaattgaaggatttttatgaaattatattgcattactatttgcagtcaaactttgatccttgtttttgaaatcatttgtcaattcggaatgaaaaattataatgtaattttacattacataagttccttttacaattaaaaaatagcacttcttcatcttatgcctgtttgagaagatattaaattttcacattgttgacagtgaaatgctatgttggtttataagattacagaccatttgttttcatgtggataattttagtgcattgctcacccggtatgttttttttttttaacttgaacattttgcttgttttgtttttcttttttaattagataatcacacggaaaattaagctgttcatatctttaaattaggattgcaaaccaaggaaagaacgcatttgagattttaagatgtcacttataaggggagaagtgttcttaaaaagtcaaccagaaaactgttatgccttttatttgtttgcaaggatgtctttgtaatgtgtttcatgaatagaatatccaatagagataagctgacttgaatcattttgagcaattttgccctgtgttatatgtgtttcacgcacatatttgcagttggattttctccaacagaaagtggattcactactggcacattaacaagcaccaataggtttttattccaactccgagcactgtggttgagtaacatcacctcaattttttattatccttaaagatattgcattttcatattctttatttataaaggatcaatgctgctgtaaatacaggtatttttaattttaaaatttcattccaccaccatcagatgcagttccctattttgtttaatgaagggatatataagctttctaatggtgtcttcagaaatttataaaatgtaaatactgatttgactggtctttaagatgtgtttaactgtgaggctatttaacgaatagtgtggatgtgatttgtcatccagtattaagttcttagtcattgatttttgtgtttaaaaaaaaataggaaagagggaaactgcagctttcattacagattccttgattggtaagctctccaaatgatgagttctagtaaactctgatttttgcctctggatagtagatctcgagcgtttatctcgggctttaatttgctaaagctgtgcacatatgtaaaaaaaaaaaaaaaaagattattttaggggagatgtaggtgtagaattattgcttatgtcatttcttaagcagttatgctcttaatgcttaaaagaaggctagcattgtttgcacaaaaagttggtgattcccaccccaaatagtaataaaattacttctgttgagtaaactttttatgtcatcgtaaaagctgaaaaaatccctttgtttctatttataaaaaaagtgcttttctatatgtacccttgataacagattttgaagaaatcctgtaagatgataaagcatttgaatggtacagtagatgtaaaaaaaattcagtttaaaagaacatttgtttttacattaaatgtttatttgaaatcaaatgattttgtacataaagttcaataatataaaagctgtattctgtt

SEQ ID NO: 424754 - DNA, 3984 bp, Homo sapiens
ctctgaggagacactttttttttcctccctccttccctcctctcctcctcccttcccttcccctctcctcccctctctcctccttcccccctcggtccgccggagcctgctggggcgagcggttggtattgcaggcgcttgctctccggggccgcccggcgggtagctggcggggggaggaggcaggaaccgcgatggcgcctcagaagcacggcggtgggggagggggcggctcggggcccagcgcggggtccgggggaggcggcttcgggggttcggcggcggtggcggcggcgacggcttcgggcggcaaatccggcggcgggagctgtggagggggtggcagttactcggcctcctcctcctcctccgcggcggcagcggcgggggctgcggtgttaccggtgaagaagccgaaaatggagcacgtccaggctgaccacgagcttttcctccaggcctttgagaagccaacacagatctatagatttcttcgaactcggaatctcatagcaccaatatttttgcacagaactcttacttacatgtctcatcgaaactccagaacaaacatcaaaaggaaaacatttaaagttgatgatatgttatcaaaagtagagaaaatgaaaggagagcaagaatctcatagcttgtcagctcatttgcagcttacgtttactggtttcttccacaaaaatgataagccatcaccaaactcagaaaatgaacaaaattctgttaccctggaagtcctgcttgtgaaagtttgccacaaaaaaagaaaggatgtaagttgtccaataaggcaagttcccacaggtaaaaagcaggtgcctttgaatcctgacctcaatcaaacaaaacccggaaatttcccgtcccttgcagtttccagtaatgaatttgaacctagtaacagccatatggtgaagtcttactcgttgctatttagagtgactcgtccaggaagaagagagtttaatggaatgattaatggagaaaccaatgaaaatattgatgtcaatgaagagcttccagccagaagaaaacgaaatcgtgaggatggggaaaagacatttgttgcacaaatgacagtatttgataaaaacaggcgcttacagcttttagatggggaatatgaagtagccatgcaggaaatggaagaatgtccaataagcaagaaaagagcaacatgggagactattcttgatgggaagaggctgcctccattcgaaacattttctcagggacctacgttgcagttcactcttcgttggacaggagagaccaatgataaatctacggctcctattgccaaacctcttgccactagaaattcagagagtctccatcaggaaaacaagcctggttcagttaaacctactcaaactattgctgttaaagaatcattgactacagatctacaaacaagaaaagaaaaggatactccaaatgaaaaccgacaaaaattaagaatattttatcagtttctctataacaacaatacaaggcaacaaactgaagcaagagatgacctgcattgcccttggtgtactctgaactgccgcaaactttatagtttactcaagcatcttaaactctgccatagcagatttatcttcaactatgtttatcatccaaaaggtgctaggatagatgtttctatcaatgagtgttatgatggctcctatgcaggaaatcctcaggatattcatcgccaacctggatttgcttttagtcgcaacggaccagttaagagaacacctatcacacatattcttgtgtgcaggccaaaacgaacaaaagcaagcatgtctgaatttcttgaatctgaagatggggaagtagaacagcaaagaacatatagtagtggccacaatcgtctgtatttccatagtgatacctgcttacctctccgtccacaagaaatggaagtagatagtgaagatgaaaaggatcctgaatggctaagagaaaaaaccattacacaaattgaagagttttctgatgttaatgaaggagagaaagaagtgatgaaactctggaatctccatgtcatgaagcatgggtttattgctgacaatcaaatgaatcatgcctgtatgctgtttgtagaaaattatggacagaaaataattaagaagaatttatgtcgaaacttcatgcttcatctagtcagcatgcatgactttaatcttattagcataatgtcaatagataaagctgttaccaagctccgtgaaatgcagcaaaaattagaaaagggggaatctgcttcccctgcaaacgaagaaataactgaagaacaaaatgggacagcaaatggatttagtgaaattaactcaaaagagaaagctttggaaacagatagtgtctcaggggtttcaaaacagagcaaaaaacaaaaactctgaaaagctctaaccccatgttatggacaaacactgaaattacattttagggaattcatcctctaagaattatgtttttgtttttaatcatatgttccaaacaggcactgttagatgaagtaaatgatttcaacaaggatatttgtatcagggttctacttcacttcattatgcagcattacatgtatatcacttttattgatgtcattaaaacattctgtactttaagcatgaaaagcaatatttcaaagtatttttaaactcaacaaatgtcatcaaatatgttgaattgatctagaaattatttcatatataaatcagaatttttttgcatttatgaacggctgtttttctactttgtaattgtgagacattttcttggggagggaaaattggaatggttcccttttttagaaattgaagtggtcttcatatgtcaactacagaaaaggaaaaaaatagaaattgaaggatttttatgaaattatattgcattactatttgcagtcaaactttgatccttgtttttgaaatcatttgtcaattcggaatgaaaaattataatgtaattttacattacataagttccttttacaattaaaaaatagcacttcttcatcttatgcctgtttgagaagatattaaattttcacattgttgacagtgaaatgctatgttggtttataagattacagaccatttgttttcatgtggataattttagtgcattgctcacccggtatgttttttttttttaacttgaacattttgcttgttttgtttttcttttttaattagataatcacacggaaaattaagctgttcatatctttaaattaggattgcaaaccaaggaaagaacgcatttgagattttaagatgtcacttataaggggagaagtgttcttaaaaagtcaaccagaaaactgttatgccttttatttgtttgcaaggatgtctttgtaatgtgtttcatgaatagaatatccaatagagataagctgacttgaatcattttgagcaattttgccctgtgttatatgtgtttcacgcacatatttgcagttggattttctccaacagaaagtggattcactactggcacattaacaagcaccaataggtttttattccaactccgagcactgtggttgagtaacatcacctcaattttttattatccttaaagatattgcattttcatattctttatttataaaggatcaatgctgctgtaaatacaggtatttttaaggggagaagttgagttgccagccaccatcagaagctacgattctcctaatagcggttaaggtagggatacataagcgttggaaagcagtgttcgagacatttattagatgaattatcacgacttgataggtatttaagacgtgtgtagagtagaggctatatgtcgtatgagtgaggatggtgatatgtcatcgagtataaagtatatagtcatggatttttatgtgtaccaaagaatagggaagagggagacatcaggtatgatgacagagtattgaatggtaagctctgatagtatgatgagttctaggttatgtta

SEQ ID NO: 424755 - DNA, 450 bp, Homo sapiens
  misc_feature (72)..(72): n is a, c, g, or t
gatgctggagagcatgatcaagaagccccgccccactcgggctgaaggcagtgatgtggccaaagcagggcntactggacttctggggggcagtgtgtgggcccgtcaggcagctgaggcctccagctcccagcacaggccccctcagagcagtggggcagccgatggcctatgctagataggccacagcccctgccttagctagggattgagaagaaacagacacataagatgcaatgtggtgtgtttaggttgtgttgagtttgagatactgatgggtcgttgaagtgggtctgcttagtgggcaattggatacacaagaccagaggtaagaggagaagtcctgggctggaagcaggagtggagtgggggctgaggcatagaagggatgaggtggtgtcgcataggaagagaacttgggatggattgagaagctccatatgagaaggc

SEQ ID NO: 424756 - DNA, 380 bp, Homo sapiens
  misc_feature (353)..(354): n is a, c, g, or t
  misc_feature (357)..(357): n is a, c, g, or t
ctcaggagattggcctccctccttgaggctccctccttgagttccaccctcatttggggtggaacttggtctttggggccctggcctgttttccccagcctccctcactctgtgtcttccacaggcggaacgggaaagtccagcactgccgtatccactcccggcaagatgctgggacccccaagttcttcttgacagacaacctcgtctttgactccctctatgacctcatcacgcactaccagcaggtgcccctgcgctgtaatgagtttgagatgcgactttcagagcctgtcccacagaccaacgcccacgagagcaaagagtggtaccacgcgagcctgaccgagcannagntgggatgagagcaagatgggtcg

SEQ ID NO: 424757 - DNA, 314 bp, Homo sapiens
tgagtcggaggctggatgacccaggggttaacttggctccaggtctctcgttctagagggacagagggcagaaagactcctcaaatgccctgtcccctctccctcagcctttcatctttgtccttcctcttggcctctcctcgtcacctgctccctgcttgagctgttgcttcccaagttacactttctgtttcctacgtgttgggcccactctcttcttcatgggtcctttagactgtagaacacatgctcttctcatcttcagaaaacatgccctggtttctttaggccagtgtcctgccaactcctttgcc

SEQ ID NO: 424758 - DNA, 5728 bp, Homo sapiens
ggggtgccgccgccgccgttgcgcttgctcccgggcggtcctggcctgtgccgccgccgcccccagcgtcggagccatggcgggcgccgcgtccccttgcgccaacggctgcgggcccggcgcgccctcggacgccgaggtgctgcacctctgccgcagcctcgaggtgggcaccgtcatgactttgttctactccaagaagtcgcagcgacccgagcggaagaccttccaggtcaagctggagacgcgccagatcacgtggagccggggcgccgacaagatcgagggggccattgacattcgtgaaattaaggagatccgcccagggaagacctcacgggactttgatcgctatcaagaggacccagctttccggccggaccagtcacattgctttgtcattctctatggaatggaatttcgcctgaaaacgctgagcctgcaagccacatctgaggatgaagtgaacatgtggatcaagggcttaacttggctgatggaggatacattgcaggcacccacacccctgcagattgagaggtggctccggaagcagttttactcagtggatcggaatcgtgaggatcgtatatcagccaaggacctgaagaacatgctgtcccaggtcaactaccgggtccccaacatgcgcttcctccgagagcggctgacggacctggagcagcgcagcggggacatcacctacgggcagtttgctcagctgtaccgcagcctcatgtacagcgcccagaagacgatggacctccccttcttggaagccagtactctgagggctggggagcggccggagctttgccgagtgtcccttcctgagttccagcagttccttcttgactaccagggggagctgtgggctgttgatcgcctccaggtgcaggagttcatgctcagcttcctccgagaccccttacgagagatcgaggagccatacttcttcctggatgagtttgtcaccttcctgttctccaaagagaacagtgtgtggaactcgcagctggatgcagtatgcccggacaccatgaacaaccctctttcccactactggatctcctcctcgcacaacacgtacctgaccggggaccagttctccagtgagtcctccttggaagcctatgctcgctgcctgcggatgggctgtcgctgcattgagttggactgctgggacggcccggatgggatgccagttatttaccatgggcacacccttaccaccaagatcaagttctcagatgtcctgcacaccatcaaggagcatgcctttgtggcctcagagtacccagtcatcctgtccattgaggaccactgcagcattgcccagcagagaaacatggcccaatacttcaagaaggtgctgggggacacactcctcaccaagcccgtggagatctctgccgacgggctcccctcacccaaccagcttaagaggaagatcctcatcaagcacaagaagctggctgagggcagtgcctacgaggaggtgcctacatccatgatgtactctgagaacgacatcagcaactctatcaagaatggcatcctctacctggaggaccctgtgaaccacgaatggtatccccactactttgttctgaccagcagcaagatctactactctgaggagaccagcagtgaccagggcaacgaggatgaggaggagcccaaggaggtcagcagcagcacagagctgcactccaatgagaagtggttccatgggaagctaggggcagggcgtgacgggcgtcacatcgctgagcgcctgcttactgagtactgcatcgagaccggagcccctgacggctccttcctcgtgcgagagagtgagaccttcgtgggcgactacacgctctctttctggcggaacgggaaagtccagcactgccgtatccactcccggcaagatgctgggacccccaagttcttcttgacagacaacctcgtctttgactccctctatgacctcatcacgcactaccagcaggtgcccctgcgctgtaatgagtttgagatgcgactttcagagcctgtcccacagaccaacgcccacgagagcaaagagtggtaccacgcgagcctgaccagagcacaggctgagcacatgctaatgcgcgtccctcgtgatggggccttcctggtgcggaagcggaatgaacccaactcatatgccatctctttccgggctgagggcaagatcaagcattgccgtgtccagcaagagggccagacagtgatgctagggaactcggagttcgacagccttgttgacctcatcagctactatgagaaacacccgctataccgcaagatgaagctgcgctatcccatcaacgaggaggcactggagaagattggcacagctgagcctgactacggggccctgtatgagggacgcaaccctggcttctatgtagaggcaaaccctatgccaactttcaagtgtgcagtcaaagccctctttgactacaaggcccagagggaggacgagctgaccttcaccaagagcgccatcatccagaatgtggagaagcaagagggaggctggtggcgaggggactacggagggaagaagcagctgtggttcccatcaaactacgtggaagagatggtcaaccccgtggccctggagccggagagggagcacttggacgagaacagccccctaggggacttgctgcggggggtcttggatgtgccggcttgtcagattgccatccgtcctgagggcaagaacaaccggctcttcgtcttctccatcagcatggcgtcggtggcccactggtccctggatgttgctgccgactcacaggaggagctgcaggactgggtgaaaaagatccgtgaagtggcccagacagcagacgccaggctcactgaagggaagataatggaacggaggaagaagattgccctggagctctctgaacttgtcgtctactgccggcctgttccctttgatgaagagaagattggcacagaacgtgcttgctaccgggacatgtcatccttcccggaaaccaaggctgagaaatacgtgaacaaggccaaaggcaagaagttccttcagtacaatcgactgcagctctcccgcatctaccccaagggccagcgactggattcctccaactacgatcctttgcccatgtggatctgtggcagtcagcttgtggccctcaacttccagacccctgacaagcctatgcagatgaaccaggccctcttcatgacgggcaggcactgtggctacgtgctgcagccaagcaccatgcgggatgaggccttcgacccctttgacaagagcagcctccgcgggctggagccatgtgccatctctattgaggtgctgggggcccgacatctgccaaagaatggccgaggcattgtgtgtccttttgtggagattgaggtggctggagctgagtatgacagcaccaagcagaagacagagtttgtggtggacaatggactcaaccctgtatggccagccaagcccttccacttccagatcagtaaccctgaatttgcctttctgcgcttcgtggtgtatgaggaagacatgtttagtgaccagaatttcctggctcaggctactttcccagtaaaaggcctgaagacaggatacagagcagtgcctttgaagaacaactacagtgaggacctggagttggcctccctgctgatcaagattgacattttccctgccaagcaggagaatggtgacctcagtcccttcagtggtacgtccctgcgggagcggggctcagatgcctcaggccagctgtttcatggccgagcccgggaaggctcctttgaatcccgctaccagcagccgtttgaggacttccgcatctcccaggagcatctcgcagaccattttgacagtcgagaacgaagggccccaagaaggactcgggtcaatggagacaaccgcctctagttgtaccccagcctcgttggagagcagcaggtgctgtgcgccttgtagaatgccgcgaactgggttctttggaagcagccccctgtggcggccttccgggtctcgcagcctgaagcctggattccagcagtgaatgctagacagaaaccaagccattaatgagatgttattactgttttgggcctccatgccccagctctggatgaaggcaaaaactgtactgtgtttcgcattaagcacacacatctggccctgacttctggagatggatccttccatcttgtggggccaggaccatggccgaagccccttggagagagaggctgcctcagccagtggcacaggagactccaaggagctactgacattcctaagagtggaggaggaggaggagccttgctgggccagggaaacaaagtttacattgtcctgtagctttaaaaccacagctgggcagggtgagaagctagatgcccctgcagtttggccctggagccagggcagaggaatgtagggcctgcatggagaagggttctgccctgcctgaggaggaggacacagcacaagggcacattgcccatggctgggaacatgacccagcctgaaagatacaggggatcatgttaaaaatagcagtattatttttcgtctcaatggtattgtaactaagttatttactcctcctgctcctcacccctgtagggaaaccttggagaggagagtggcaggtgggctgcctgctgtgttaagaggacttagtttgtgatgtaaggcactgtcaggaatggggggcgggccagggtgggaagagaagaaatagcagagcctattttggtgaggttttttgtttttaagtcaaagaagactcagtatgctttccctgaggaatgaaaaagggattgaggagttgcctgactcctgggtgggtggggtacaggcagttaggtgctgaatgaagctgccatccttgctgcagcttctaactggtaaaaagatccagggatggagatgggaaggttagaaaggcagccctcacctctgaggacagaggccggggtccaggcccgtgggcgcaaaggtgcctcatagcatagccagcattcagcacacacaaacctactgcccacatttgggctcagggttggccatttgctagttctgctgccctcttaagatctgactgccaaataaatcatcctcatgtcctttttcctttgacttgtatgctctttcgggggctcaggaaagcctgttgcatgggacatgctcactagaaacagtcgccagatgattattctgcagtagaagcaggtaggaaatttctggaaatttctcaggttaagcagcaagagctgtaacccctcctctgggctaacaggagttgtgggtccactctctcctgcccaccctctgagggtgtgtctgagcagagtacatcctgcctgggttctttgtggccagccagttttggtggtgagctggaaacaaccagagcccctttccagttccacagaaacctctcctttcaaaaatgttgcattcagttcgttaacactgccaggtgccattctgattgcctctaggacttggcagctgaaatctctgggccctttcaacacagttgaaaggcccttctcttcctgaagctctgtttccatagttggctgtgctgggatggaacaaaaatgacgccacacaaaaaatttaagatagatccggttccgtggatgacatgaactgatgatagccagtatcaaacaaacagcgatagtgaaa

SEQ ID NO: 424759 - DNA, 5187 bp, Homo sapiens
ggggtgccgccgccgccgttgcgcttgctcccgggcggtcctggcctgtgccgccgccgcccccagcgtcggagccatggcgggcgccgcgtccccttgcgccaacggctgcgggcccggcgcgccctcggacgccgaggtgctgcacctctgccgcagcctcgaggtgggcaccgtcatgactttgttctactccaagaagtcgcagcgacccgagcggaagaccttccaggtcaagctggagacgcgccagatcacgtggagccggggcgccgacaagatcgagggggccattgacattcgtgaaattaaggagatccgcccagggaagacctcacgggactttgatcgctatcaagaggacccagctttccggccggaccagtcacattgctttgtcattctctatggaatggaatttcgcctgaaaacgctgagcctgcaagccacatctgaggatgaagtgaacatgtggatcaagggcttaacttggctgatggaggatacattgcaggcacccacacccctgcagattgagaggtggctccggaagcagttttactcagtggatcggaatcgtgaggatcgtatatcagccaaggacctgaagaacatgctgtcccaggtcaactaccgggtccccaacatgcgcttcctccgagagcggctgacggacctggagcagcgcagcggggacatcacctacgggcagtttgctcagctgtaccgcagcctcatgtacagcgcccagaagacgatggacctccccttcttggaagccagtactctgagggctggggagcggccggagctttgccgagtgtcccttcctgagttccagcagttccttcttgactaccagggggagctgtgggctgttgatcgcctccaggtgcaggagttcatgctcagcttcctccgagaccccttacgagagatcgaggagccatacttcttcctggatgagtttgtcaccttcctgttctccaaagagaacagtgtgtggaactcgcagctggatgcagtatgcccggacaccatgaacaaccctctttcccactactggatctcctcctcgcacaacacgtacctgaccggggaccagttctccagtgagtcctccttggaagcctatgctcgctgcctgcggatgggctgtcgctgcattgagttggactgctgggacggcccggatgggatgccagttatttaccatgggcacacccttaccaccaagatcaagttctcagatgtcctgcacaccatcaaggagcatgcctttgtggcctcagagtacccagtcatcctgtccattgaggaccactgcagcattgcccagcagagaaacatggcccaatacttcaagaaggtgctgggggacacactcctcaccaagcccgtggagatctctgccgacgggctcccctcacccaaccagcttaagaggaagatcctcatcaagcacaagaagctggctgagggcagtgcctacgaggaggtgcctacatccatgatgtactctgagaacgacatcagcaactctatcaagaatggcatcctctacctggaggaccctgtgaaccacgaatggtatccccactactttgttctgaccagcagcaagatctactactctgaggagaccagcagtgaccagggcaacgaggatgaggaggagcccaaggaggtcagcagcagcacagagctgcactccaatgagaagtggttccatgggaagctaggggcagggcgtgacgggcgtcacatcgctgagcgcctgcttactgagtactgcatcgagaccggagcccctgacggctccttcctcgtgcgagagagtgagaccttcgtgggcgactacacgctctctttctggcggaacgggaaagtccagcactgccgtatccactcccggcaagatgctgggacccccaagttcttcttgacagacaacctcgtctttgactccctctatgacctcatcacgcactaccagcaggtgcccctgcgctgtaatgagtttgagatgcgactttcagagcctgtcccacagaccaacgcccacgagagcaaagagtggtaccacgcgagcctgaccagagcacaggctgagcacatgctaatgcgcgtccctcgtgatggggccttcctggtgcggaagcggaatgaacccaactcatatgccatctctttccgggctgagggcaagatcaagcattgccgtgtccagcaagagggccagacagtgatgctagggaactcggagttcgacagccttgttgacctcatcagctactatgagaaacacccgctataccgcaagatgaagctgcgctatcccatcaacgaggaggcactggagaagattggcacagctgagcctgactacggggccctgtatgagggacgcaaccctggcttctatgtagaggcaaaccctatgccaactttcaagtgtgcagtcaaagccctctttgactacaaggcccagagggaggacgagctgaccttcaccaagagcgccatcatccagaatgtggagaagcaagagggaggctggtggcgaggggactacggagggaagaagcagctgtggttcccatcaaactacgtggaagagatggtcaaccccgtggccctggagccggagagggagcacttggacgagaacagccccctaggggacttgctgcggggggtcttggatgtgccggcttgtcagattgccatccgtcctgagggcaagaacaaccggctcttcgtcttctccatcagcatggcgtcggtggcccactggtccctggatgttgctgccgactcacaggaggagctgcaggactgggtgaaaaagatccgtgaagtggcccagacagcagacgccaggctcactgaagggaagataatggaacggaggaagaagattgccctggagctctctgaacttgtcgtctactgccggcctgttccctttgatgaagagaagattggcacagaacgtgcttgctaccgggacatgtcatccttcccggaaaccaaggctgagaaatacgtgaacaaggccaaaggcaagaagttccttcagtacaatcgactgcagctctcccgcatctaccccaagggccagcgactggattcctccaactacgatcctttgcccatgtggatctgtggcagtcagcttgtggccctcaacttccagacccctgacaagcctatgcagatgaaccaggccctcttcatgacgggcaggcactgtggctacgtgctgcagccaagcaccatgcgggatgaggccttcgacccctttgacaagagcagcctccgcgggctggagccatgtgccatctctattgaggtgctgggggcccgacatctgccaaagaatggccgaggcattgtgtgtccttttgtggagattgaggtggctggagctgagtatgacagcaccaagcagaagacagagtttgtggtggacaatggactcaaccctgtatggccagccaagcccttccacttccagatcagtaaccctgaatttgcctttctgcgcttcgtggtgtatgaggaagacatgtttagtgaccagaatttcctggctcaggctactttcccagtaaaaggcctgaagacaggatacagagcagtgcctttgaagaacaactacagtgaggacctggagttggcctccctgctgatcaagattgacattttccctgccaagcaggagaatggtgacctcagtcccttcagtggtacgtccctgcgggagcggggctcagatgcctcaggccagctgtttcatggccgagcccgggaaggctcctttgaatcccgctaccagcagccgtttgaggacttccgcatctcccaggagcatctcgcagaccattttgacagtcgagaacgaagtaaggacactcttcccttctgtccagggccccaagaaggactcgggtcaatggagacaaccgcctctagttgtaccccagcctcgttggagagcagcaggtgctgtgcgccttgtagaatgccgcgaactgggttctttggaagcagccccctgtggcggccttccgggtctcgcagcctgaagcctggattccagcagtgaatgctagacagaaaccaagccattaatgagatgttattactgttttgggcctccatgccccagctctggatgaaggcaaaaactgtactgtgtttcgcattaagcacacacatctggccctgacttctggagatggatccttccatcttgtggggccaggaccatggccgaagccccttggagagagaggctgcctcagccagtggcacaggagactccaaggagctactgacattcctaagagtggaggaggaggaggagccttgctgggccagggaaacaaagtttacattgtcctgtagctttaaaaccacagctgggcagggtgagaagctagatgcccctgcagtttggccctggagccagggcagaggaatgtagggcctgcatggagaagggttctgccctgcctgaggaggaggacacagcacaagggcacattgcccatggctgggaacatgacccagcctgaaagatacaggggatcatgttaaaaatagcagtattatttttcgtctcaatggtattgtaactaagttatttactcctcctgctcctcacccctgtagggaaaccttggagaggagagtggcaggtgggctgcctgctgtgttaagaggacttagtttgtgatgtaaggcactgtcaggaatggggggcgggccagggtgggaagagaagaaatagcagagcctattttggtgaggttttttgtttttaagtcaaagaagactcagtatgctttccctgaggaatgaaaaagggattgaggagttgcctgactcctgggtgggtggggtacaggcagttaggtgctgaatgaagctgccatccttgctgcagcttctaactggtaaaaagatccagggatggagatgggaaggttagaaaggcagccctcacctctgaggacagaggccggggtccaggcccgtgggcgcaaaggtgcctcatagcatagccagcattcagcacacacaaacctactgcccacatttgggctcagggttggccatttgctagttctgctgccctcttaagatctgactgccaaataaatcatcctcatgtccttt

SEQ ID NO: 424760 - DNA, 4315 bp, Homo sapiens
gatccctacctctgaaagaacatccaggagtttttgctcagctctctccgagacccttagcagagatcctgttgccatacttcttcctggatgagtttgtcaccttcctgttctccaaagagaacagtgtgtggaactcgcagctggatgcagtatgcccggacaccatgaacaaccctctttcccactactggatctcctcctcgcacaacacgtacctgaccggggaccagttctccagtgagtcctccttggaagcctatgctcgctgcctgcggatgggctgtcgctgcattgagttggactgctgggacggcccggatgggatgccagttatttaccatgggcacacccttaccaccaagatcaagttctcagatgtcctgcacaccatcaaggagcatgcctttgtggcctcagagtacccagtcatcctgtccattgaggaccactgcagcattgcccagcagagaaacatggcccaatacttcaagaaggtgctgggggacacactcctcaccaagcccgtggagatctctgccgacgggctcccctcacccaaccagcttaagaggaagatcctcatcaagcacaagaagctggctgagggcagtgcctacgaggaggtgcctacatccatgatgtactctgagaacgacatcagcaactctatcaagaatggcatcctctacctggaggaccctgtgaaccacgaatggtatccccactactttgttctgaccagcagcaagatctactactctgaggagaccagcagtgaccagggcaacgaggatgaggaggagcccaaggaggtcagcagcagcacagagctgcactccaatgagaagtggttccatgggaagctaggggcagggcgtgacgggcgtcacatcgctgagcgcctgcttactgagtactgcatcgagaccggagcccctgacggctccttcctcgtgcgagagagtgagaccttcgtgggcgactacacgctctctttctggcggaacgggaaagtccagcactgccgtatccactcccggcaagatgctgggacccccaagttcttcttgacagacaacctcgtctttgactccctctatgacctcatcacgcactaccagcaggtgcccctgcgctgtaatgagtttgagatgcgactttcagagcctgtcccacagaccaacgcccacgagagcaaagagtggtaccacgcgagcctgaccagagcacaggctgagcacatgctaatgcgcgtccctcgtgatggggccttcctggtgcggaagcggaatgaacccaactcatatgccatctctttccgggctgagggcaagatcaagcattgccgtgtccagcaagagggccagacagtgatgctagggaactcggagttcgacagccttgttgacctcatcagctactatgagaaacacccgctataccgcaagatgaagctgcgctatcccatcaacgaggaggcactggagaagattggcacagctgagcctgactacggggccctgtatgagggacgcaaccctggcttctatgtagaggcaaaccctatgccaactttcaagtgtgcagtcaaagccctctttgactacaaggcccagagggaggacgagctgaccttcaccaagagcgccatcatccagaatgtggagaagcaagagggaggctggtggcgaggggactacggagggaagaagcagctgtggttcccatcaaactacgtggaagagatggtcaaccccgtggccctggagccggagagggagcacttggacgagaacagccccctaggggacttgctgcggggggtcttggatgtgccggcttgtcagattgccatccgtcctgagggcaagaacaaccggctcttcgtcttctccatcagcatggcgtcggtggcccactggtccctggatgttgctgccgactcacaggaggagctgcaggactgggtgaaaaagatccgtgaagtggcccagacagcagacgccaggctcactgaagggaagataatggaacggaggaagaagattgccctggagctctctgaacttgtcgtctactgccggcctgttccctttgatgaagagaagattggcacagaacgtgcttgctaccgggacatgtcatccttcccggaaaccaaggctgagaaatacgtgaacaaggccaaaggcaagaagttccttcagtacaatcgactgcagctctcccgcatctaccccaagggccagcgactggattcctccaactacgatcctttgcccatgtggatctgtggcagtcagcttgtggccctcaacttccagacccctgacaagcctatgcagatgaaccaggccctcttcatgacgggcaggcactgtggctacgtgctgcagccaagcaccatgcgggatgaggccttcgacccctttgacaagagcagcctccgcgggctggagccatgtgccatctctattgaggtgctgggggcccgacatctgccaaagaatggccgaggcattgtgtgtccttttgtggagattgaggtggctggagctgagtatgacagcaccaagcagaagacagagtttgtggtggacaatggactcaaccctgtatggccagccaagcccttccacttccagatcagtaaccctgaatttgcctttctgcgcttcgtggtgtatgaggaagacatgtttagtgaccagaatttcctggctcaggctactttcccagtaaaaggcctgaagacaggatacagagcagtgcctttgaagaacaactacagtgaggacctggagttggcctccctgctgatcaagattgacattttccctgccaagcaggagaatggtgacctcagtcccttcagtggtacgtccctgcgggagcggggctcagatgcctcaggccagctgtttcatggccgagcccgggaaggctcctttgaatcccgctaccagcagccgtttgaggacttccgcatctcccaggagcatctcgcagaccattttgacagtcgagaacgaagtaaggacactcttcccttctgtccagggccccaagaaggactcgggtcaatggagacaaccgcctctagttgtaccccagcctcgttggagagcagcaggtgctgtgcgccttgtagaatgccgcgaactgggttctttggaagcagccccctgtggcggccttccgggtctcgcagcctgaagcctggattccagcagtgaatgctagacagaaaccaagccattaatgagatgttattactgttttgggcctccatgccccagctctggatgaaggcaaaaactgtactgtgtttcgcattaagcacacacatctggccctgacttctggagatggatccttccatcttgtggggccaggaccatggccgaagccccttggagagagaggctgcctcagccagtggcacaggagactccaaggagctactgacattcctaagagtggaggaggaggaggagccttgctgggccagggaaacaaagtttacattgtcctgtagctttaaaaccacagctgggcagggtgagaagctagatgcccctgcagtttggccctggagccagggcagaggaatgtagggcctgcatggagaagggttctgccctgcctgaggaggaggacacagcacaagggcacattgcccatggctgggaacatgacccagcctgaaagatacaggggatcatgttaaaaatagcagtattatttttcgtctcaatggtattgtaactaagttatttactcctcctgctcctcacccctgtagggaaaccttggagaggagagtggcaggtgggctgcctgctgtgttaagaggacttagtttgtgatgtaaggcactgtcaggaatggggggcgggccagggtgggaagagaagaaatagcagagcctattttggtgaggttttttgtttttaagtcaaagaagactcagtatgctttccctgaggaatgaaaaagggattgaggagttgcctgactcctgggtgggtggggtacaggcagttaggtgctgaatgaagctgccatccttgctgcagcttctaactggtaaaaagatccagggatggagatgggaaggttagaaaggcagccctcacctctgaggacagaggccggggtccaggcccgtgggcgcaaaggtgcctcatagcatagccagcattcagcacacacaaacctactgcccacatttgggctcagggttggccatttgctagttctgctgccctcttaagatctgactgccaaataaatcatcctcatgtccttt

SEQ ID NO: 424761 - DNA, 5112 bp, Homo sapiens
ggggtgccgccgccgccgttgcgcttgctcccgggcggtcctggcctgtgccgccgccgcccccagcgtcggagccatggcgggcgccgcgtccccttgcgccaacggctgcgggcccggcgcgccctcggacgccgaggtgctgcacctctgccgcagcctcgaggtgggcaccgtcatgactttgttctactccaagaagtcgcagcgacccgagcggaagaccttccaggtcaagctggagacgcgccagatcacgtggagccggggcgccgacaagatcgagggggccattgacattcgtgaaattaaggagatccgcccagggaagacctcacgggactttgatcgctatcaagaggacccagctttccggccggaccagtcacattgctttgtcattctctatggaatggaatttcgcctgaaaacgctgagcctgcaagccacatctgaggatgaagtgaacatgtggatcaagggcttaacttggctgatggaggatacattgcaggcacccacacccctgcagattgagaggtggctccggaagcagttttactcagtggatcggaatcgtgaggatcgtatatcagccaaggacctgaagaacatgctgtcccaggtcaactaccgggtccccaacatgcgcttcctccgagagcggctgacggacctggagcagcgcagcggggacatcacctacgggcagtttgctcagctgtaccgcagcctcatgtacagcgcccagaagacgatggacctccccttcttggaagccagtactctgagggctggggagcggccggagctttgccgagtgtcccttcctgagttccagcagttccttcttgactaccagggggagctgtgggctgttgatcgcctccaggtgcaggagttcatgctcagcttcctccgagaccccttacgagagatcgaggagccatacttcttcctggatgagtttgtcaccttcctgttctccaaagagaacagtgtgtggaactcgcagctggatgcagtatgcccggacaccatgaacaaccctctttcccactactggatctcctcctcgcacaacacgtacctgaccggggaccagttctccagtgagtcctccttggaagcctatgctcgctgcctgcggatgggctgtcgctgcattgagttggactgctgggacggcccggatgggatgccagttatttaccatgggcacacccttaccaccaagatcaagttctcagatgtcctgcacaccatcaaggagcatgcctttgtggcctcagagtacccagtcatcctgtccattgaggaccactgcagcattgcccagcagagaaacatggcccaatacttcaagaaggtgctgggggacacactcctcaccaagcccgtggagatctctgccgacgggctcccctcacccaaccagcttaagaggaagatcctcatcaagcacaagaagctggctgagggcagtgcctacgaggaggtgcctacatccatgatgtactctgagaacgacatcagcaactctatcaagaatggcatcctctacctggaggaccctgtgaaccacgaatggtatccccactactttgttctgaccagcagcaagatctactactctgaggagaccagcagtgaccagggcaacgaggatgaggaggagcccaaggaggtcagcagcagcacagagctgcactccaatgagaagtggttccatgggaagctaggggcagggcgtgacgggcgtcacatcgctgagcgcctgcttactgagtactgcatcgagaccggagcccctgacggctccttcctcgtgcgagagagtgagaccttcgtgggcgactacacgctctctttctggcggaacgggaaagtccagcactgccgtatccactcccggcaagatgctgggacccccaagttcttcttgacagacaacctcgtctttgactccctctatgacctcatcacgcactaccagcaggtgcccctgcgctgtaatgagtttgagatgcgactttcagagcctgtcccacagaccaacgcccacgagagcaaagagtggtaccacgcgagcctgaccagagcacaggctgagcacatgctaatgcgcgtccctcgtgatggggccttcctggtgcggaagcggaatgaacccaactcatatgccatctctttccgggctgagggcaagatcaagcattgccgtgtccagcaagagggccagacagtgatgctagggaactcggagttcgacagccttgttgacctcatcagctactatgagaaacacccgctataccgcaagatgaagctgcgctatcccatcaacgaggaggcactggagaagattggcacagctgagcctgactacggggccctgtatgagggacgcaaccctggcttctatgtagaggcaaaccctatgccaactttcaagtgtgcagtcaaagccctctttgactacaaggcccagagggaggacgagctgaccttcaccaagagcgccatcatccagaatgtggagaagcaagagggaggctggtggcgaggggactacggagggaagaagcagctgtggttcccatcaaactacgtggaagagatggtcaaccccgtggccctggagccggagagggagcacttggacgagaacagccccctaggggacttgctgcggggggtcttggatgtgccggcttgtcagattgcatggcgtcggtggcccactggtccctggatgttgctgccgactcacaggaggagctgcaggactgggtgaaaaagatccgtgaagtggcccagacagcagacgccaggctcactgaagggaagataatggaacggaggaagaagattgccctggagctctctgaacttgtcgtctactgccggcctgttccctttgatgaagagaagattggcacagaacgtgcttgctaccgggacatgtcatccttcccggaaaccaaggctgagaaatacgtgaacaaggccaaaggcaagaagttccttcagtacaatcgactgcagctctcccgcatctaccccaagggccagcgactggattcctccaactacgatcctttgcccatgtggatctgtggcagtcagcttgtggccctcaacttccagacccctgacaagcctatgcagatgaaccaggccctcttcatgacgggcaggcactgtggctacgtgctgcagccaagcaccatgcgggatgaggccttcgacccctttgacaagagcagcctccgcgggctggagccatgtgccatctctattgaggtgctgggggcccgacatctgccaaagaatggccgaggcattgtgtgtccttttgtggagattgaggtggctggagctgagtatgacagcaccaagcagaagacagagtttgtggtggacaatggactcaaccctgtatggccagccaagcccttccacttccagatcagtaaccctgaatttgcctttctgcgcttcgtggtgtatgaggaagacatgtttagtgaccagaatttcctggctcaggctactttcccagtaaaaggcctgaagacaggatacagagcagtgcctttgaagaacaactacagtgaggacctggagttggcctccctgctgatcaagattgacattttccctgccaagcaggagaatggtgacctcagtcccttcagtggtacgtccctgcgggagcggggctcagatgcctcaggccagctgtttcatggccgagcccgggaaggctcctttgaatcccgctaccagcagccgtttgaggacttccgcatctcccaggagcatctcgcagaccattttgacagtcgagaacgaagggccccaagaaggactcgggtcaatggagacaaccgcctctagttgtaccccagcctcgttggagagcagcaggtgctgtgcgccttgtagaatgccgcgaactgggttctttggaagcagccccctgtggcggccttccgggtctcgcagcctgaagcctggattccagcagtgaatgctagacagaaaccaagccattaatgagatgttattactgttttgggcctccatgccccagctctggatgaaggcaaaaactgtactgtgtttcgcattaagcacacacatctggccctgacttctggagatggatccttccatcttgtggggccaggaccatggccgaagccccttggagagagaggctgcctcagccagtggcacaggagactccaaggagctactgacattcctaagagtggaggaggaggaggagccttgctgggccagggaaacaaagtttacattgtcctgtagctttaaaaccacagctgggcagggtgagaagctagatgcccctgcagtttggccctggagccagggcagaggaatgtagggcctgcatggagaagggttctgccctgcctgaggaggaggacacagcacaagggcacattgcccatggctgggaacatgacccagcctgaaagatacaggggatcatgttaaaaatagcagtattatttttcgtctcaatggtattgtaactaagttatttactcctcctgctcctcacccctgtagggaaaccttggagaggagagtggcaggtgggctgcctgctgtgttaagaggacttagtttgtgatgtaaggcactgtcaggaatggggggcgggccagggtgggaagagaagaaatagcagagcctattttggtgaggttttttgtttttaagtcaaagaagactcagtatgctttccctgaggaatgaaaaagggattgaggagttgcctgactcctgggtgggtggggtacaggcagttaggtgctgaatgaagctgccatccttgctgcagcttctaactggtaaaaagatccagggatggagatgggaaggttagaaaggcagccctcacctctgaggacagaggccggggtccaggcccgtgggcgcaaaggtgcctcatagcatagccagcattcagcacacacaaacctactgcccacatttgggctcagggttggccatttgctagttctgctgccctcttaagatctgactgccaaataaatcatcctcatgtccttt

SEQ ID NO: 424762 - DNA, 5007 bp, Homo sapiens
ggggtgccgccgccgccgttgcgcttgctcccgggcggtcctggcctgtgccgccgccgcccccagcgtcggagccatggcgggcgccgcgtccccttgcgccaacggctgcgggcccggcgcgccctcggacgccgaggtgctgcacctctgccgcagcctcgaggtgggcaccgtcatgactttgttctactccaagaagtcgcagcgacccgagcggaagaccttccaggtcaagctggagacgcgccagatcacgtggagccggggcgccgacaagatcgagggggccattgacattcgtgaaattaaggagatccgcccagggaagacctcacgggactttgatcgctatcaagaggacccagctttccggccggaccagtcacattgctttgtcattctctatggaatggaatttcgcctgaaaacgctgagcctgcaagccacatctgaggatgaagtgaacatgtggatcaagggcttaacttggctgatggaggatacattgcaggcacccacacccctgcagattgagaggtggctccggaagcagttttactcagtggatcggaatcgtgaggatcgtatatcagccaaggacctgaagaacatgctgtcccaggtcaactaccgggtccccaacatgcgcttcctccgagagcggctgacggacctggagcagcgcagcggggacatcacctacgggcagtttgctcagctgtaccgcagcctcatgtacagcgcccagaagacgatggacctccccttcttggaagccagtactctgagggctggggagcggccggagctttgccgagtgtcccttcctgagttccagcagttccttcttgactaccagggggagctgtgggctgttgatcgcctccaggtgcaggagttcatgctcagcttcctccgagaccccttacgagagatcgaggagccatacttcttcctggatgagtttgtcaccttcctgttctccaaagagaacagtgtgtggaactcgcagctggatgcagtatgcccggacaccatgaacaaccctctttcccactactggatctcctcctcgcacaacacgtacctgaccggggaccagttctccagtgagtcctccttggaagcctatgctcgctgcctgcggatgggctgtcgctgcattgagttggactgctgggacggcccggatgggatgccagttatttaccatgggcacacccttaccaccaagatcaagttctcagatgtcctgcacaccatcaaggagcatgcctttgtggcctcagagtacccagtcatcctgtccattgaggaccactgcagcattgcccagcagagaaacatggcccaatacttcaagaaggtgctgggggacacactcctcaccaagcccgtggagatctctgccgacgggctcccctcacccaaccagcttaagaggaagatcctcatcaagcacaagaagctggctgagggcagtgcctacgaggaggtgcctacatccatgatgtactctgagaacgacatcagcaactctatcaagaatggcatcctctacctggaggaccctgtgaaccacgaatggtatccccactactttgttctgaccagcagcaagatctactactctgaggagaccagcagtgaccagggcaacgaggatgaggaggagcccaaggaggtcagcagcagcacagagctgcactccaatgagaagtggttccatgggaagctaggggcagggcgtgacgggcgtcacatcgctgagcgcctgcttactgagtactgcatcgagaccggagcccctgacggctccttcctcgtgcgagagagtgagaccttcgtgggcgactacacgctctctttctggcggaacgggaaagtccagcactgccgtatccactcccggcaagatgctgggacccccaagttcttcttgacagacaacctcgtctttgactccctctatgacctcatcacgcactaccagcaggtgcccctgcgctgtaatgagtttgagatgcgactttcagagcctgtcccacagaccaacgcccacgagagcaaagagtggtaccacgcgagcctgaccagagcacaggctgagcacatgctaatgcgcgtccctcgtgatggggccttcctggtgcggaagcggaatgaacccaactcatatgccatctctttccgggctgagggcaagatcaagcattgccgtgtccagcaagagggccagacagtgatgctagggaactcggagttcgacagccttgttgacctcatcagctactatgagaaacacccgctataccgcaagatgaagctgcgctatcccatcaacgaggaggcactggagaagattggcacagctgagcctgactacggggccctgtatgagggacgcaaccctggcttctatgtagaggcaaaccctatgccaactttcaagtgtgcagtcaaagccctctttgactacaaggcccagagggaggacgagctgaccttcaccaagagcgccatcatccagaatgtggagaagcaagagggaggctggtggcgaggggactacggagggaagaagcagctgtggttcccatcaaactacgtggaagagatggtcaaccccgtggccctggagccggagagggagcacttggacgagaacagccccctaggggacttgctgcggggggtcttggatgtgccggcttgtcagattgccatccgtcctgagggcaagaacaaccggctcttcgtcttctccatcagcatggcgtcggtggcccactggtccctggatgttgctgccgactcacaggaggagctgcaggactgggtgaaaaagatccgtgaagtggcccagacagcagacgccaggctcactgaagggaagataatggaacggaggaagaagattgccctggagctctctgaacttgtcgtctactgccggcctgttccctttgatgaagagaagattggcacagaacgtgcttgctaccgggacatgtcatccttcccggaaaccaaggctgagaaatacgtgaacaaggccaaaggcaagaagttccttcagtacaatcgactgcagctctcccgcatctaccccaagggccagcgactggattcctccaactacgatcctttgcccatgtggatctgtggcagtcagcttgtggccctcaacttccagacccctgacaagcctatgcagatgaaccaggccctcttcatgacgggcaggcactgtggctacgtgctgcagccaagcaccatgcgggatgaggccttcgacccctttgacaagagcagcctccgcgggctggagccatgtgccatctctattgaggtgctgggggcccgacatctgccaaagaatggccgaggcattgtgtgtccttttgtggagattgaggtggctggagctgagtatgacagcaccaagcagaagacagagtttgtggtggacaatggactcaaccctgtatggccagccaagcccttccacttccagatcagtaaccctgaatttgcctttctgcgcttcgtggtgtatgaggaagacatgtttagtgaccagaatttcctggctcaggctactttcccagtaaaaggcctgaagacaggatacagagcagtgcctttgaagaacaactacagtgaggacctggagttggcctccctgctgatcaagattgacattttccctgccaagcaggagaatggtgacctcagtcccttcagtggtacgtccctgcgggagcggggctcagatgcctcaggccagctgtttcatggccgagcccgggaaggctcctttgaatcccgctaccagcagccgtttgaggacttccgcatctcccaggagcatctcgcagaccattttgacagtcgagaacgaagggccccaagaaggactcgggtcaatggagacaaccgcctctagttgtaccccagcctcgttggagagcagcaggtgctgtgcgccttgtagaatgccgcgaactgggttctttggaagcagccccctgtggcggccttccgggtctcgcagcctgaagcctggattccagcagtgaatgctagacagaaaccaagccattaatgagatgttattactgttttgggcctccatgccccagctctggatgaaggcaaaaactgtactgtgtttcgcattaagcacacacatctggccctgacttctggagatggatccttccatcttgtggggccaggaccatggccgaagccccctcacctctgaggacagaggccggggtccaggcccgtgggcgcaaaggtgcctcatagcatagccagcattcagcacacacaaacctactgcccacatttgggctcagggttggccatttgctagttctgctgccctcttaagatctgactgccaaataaatcatcctcatgtcctttttcctttgacttgtatgctctttcgggggctcaggaaagcctgttgcatgggacatgctcactagaaacagtcgccagatgattattctgcagtagaagcaggtaggaaatttctggaaatttctcaggttaagcagcaagagctgtaacccctcctctgggctaacaggagttgtgggtccactctctcctgcccaccctctgagggtgtgtctgagcagagtacatcctgcctgggttctttgtggccagccagttttggtggtgagctggaaacaaccagagcccctttccagttccacagaaacctctcctttcaaaaatgttgcattcagttcgttaacactgccaggtgccattctgattgcctctaggacttggcagctgaaatctctgggccctttcaacacagttgaaaggcccttctcttcctgaagctctgtttccatagttggctgtgctgggatggaacaaaaatgacgccacacaaaaaatttaagatagatccggttccgtggatgacatgaactgatgatagccagtatcaaacaaacagcgatagtgaaa

SEQ ID NO: 424763 - DNA, 3273 bp, Homo sapiens
ggggtgccgccgccgccgttgcgcttgctcccgggcggtcctggcctgtgccgccgccgcccccagcgtcggagccatggcgggcgccgcgtccccttgcgccaacggctgcgggcccggcgcgccctcggacgccgaggtgctgcacctctgccgcagcctcgaggtgggcaccgtcatgactttgttctactccaagaagtcgcagcgacccgagcggaagaccttccaggtcaagctggagacgcgccagatcacgtggagccggggcgccgacaagatcgagggggccattgacattcgtgaaattaaggagatccgcccagggaagacctcacgggactttgatcgctatcaagaggacccagctttccggccggaccagtcacattgctttgtcattctctatggaatggaatttcgcctgaaaacgctgagcctgcaagccacatctgaggatgaagtgaacatgtggatcaagggcttaacttggctgatggaggatacattgcaggcacccacacccctgcagattgagaggtggctccggaagcagttttactcagtggatcggaatcgtgaggatcgtatatcagccaaggacctgaagaacatgctgtcccaggtcaactaccgggtccccaacatgcgcttcctccgagagcggctgacggacctggagcagcgcagcggggacatcacctacgggcagtttgctcagctgtaccgcagcctcatgtacagcgcccagaagacgatggacctccccttcttggaagccagtactctgagggctggggagcggccggagctttgccgagtgtcccttcctgagttccagcagttccttcttgactaccagggggagctgtgggctgttgatcgcctccaggtgcaggagttcatgctcagcttcctccgagaccccttacgagagatcgaggagccatacttcttcctggatgagtttgtcaccttcctgttctccaaagagaacagtgtgtggaactcgcagctggatgcagtatgcccggacaccatgaacaaccctctttcccactactggatctcctcctcgcacaacacgtacctgaccggggaccagttctccagtgagtcctccttggaagcctatgctcgctgcctgcggatgggctgtcgctgcattgagttggactgctgggacggcccggatgggatgccagttatttaccatgggcacacccttaccaccaagatcaagttctcagatgtcctgcacaccatcaaggagcatgcctttgtggcctcagagtacccagtcatcctgtccattgaggaccactgcagcattgcccagcagagaaacatggcccaatacttcaagaaggtgctgggggacacactcctcaccaagcccgtggagatctctgccgacgggctcccctcacccaaccagcttaagaggaagatcctcatcaagcacaagaagctggctgagggcagtgcctacgaggaggtgcctacatccatgatgtactctgagaacgacatcagcaactctatcaagaatggcatcctctacctggaggaccctgtgaaccacgaatggtatccccactactttgttctgaccagcagcaagatctactactctgaggagaccagcagtgaccagggcaacgaggatgaggaggagcccaaggaggtcagcagcagcacagagctgcactccaatgagaagtggttccatgggaagctaggggcagggcgtgacgggcgtcacatcgctgagcgcctgcttactgagtactgcatcgagaccggagcccctgacggctccttcctcgtgcgagagagtgagaccttcgtgggcgactacacgctctctttctggcggaacgggaaagtccagcactgccgtatccactcccggcaagatgctgggacccccaagttcttcttgacagacaacctcgtctttgactccctctatgacctcatcacgcactaccagcaggtgcccctgcgctgtaatgagtttgagatgcgactttcagagcctgtcccacagaccaacgcccacgagagcaaagagtggtaccacgcgagcctgaccagagcacaggctgagcacatgctaatgcgcgtccctcgtgatggggccttcctggtgcggaagcggaatgaacccaactcatatgccatctctttccgggctgagggcaagatcaagcattgccgtgtccagcaagagggccagacagtgatgctagggaactcggagttcgacagccttgttgacctcatcagctactatgagaaacacccgctataccgcaagatgaagctgcgctatcccatcaacgaggaggcactggagaagattggcacagctgagcctgactacggggccctgtatgagggacgcaaccctggcttctatgtagaggcaaaccctatgccaactttcaagtgtgcagtcaaagccctctttgactacaaggcccagagggaggacgagctgaccttcaccaagagcgccatcatccagaatgtggagaagcaagagggaggctggtggcgaggggactacggagggaagaagcagctgtggttcccatcaaactacgtggaagagatggtcaaccccgtggccctggagccggagagggagcacttggacgagaacagccccctaggggacttgctgcggggggtcttggatgtgccggcttgtcagattgccatccgtcctgagggcaagaacaaccggctcttcgtcttctccatcagcatggcgtcggtggcccactggtccctggatgttgctgccgactcacaggaggagctgcaggactgggtgaaaaagatccgtgaagtggcccagacagcagacgccagggtgagattctgctggaaccttctggggggcagtgtgtgggcccgtcaggcagctgaggcctccagctcccagcacaggccccctcagagcagtggggcagccgatggcctatgctagataggccacagcccctgccttagctagggattgagaagaaacagacacataagatgcaatgtggtgtgtttaggttgtgttgagtttgagatactgatgggtcgttgaagtgggtctgcttagtgggcaattggatacacaagaccagaggtaagaggagaagtcctgggctggaagcaggagtggagtgggggctgaggcatagaagggatgaggtggtgtcgcataggaagagaacttgggatggattgagaagctccatatgagaaggc

SEQ ID NO: 424764 - DNA, 2620 bp, Homo sapiens
ggggtgccgccgccgccgttgcgcttgctcccgggcggtcctggcctgtgccgccgccgcccccagcgtcggagccatggcgggcgccgcgtccccttgcgccaacggctgcgggcccggcgcgccctcggacgccgaggtgctgcacctctgccgcagcctcgaggtgggcaccgtcatgactttgttctactccaagaagtcgcagcgacccgagcggaagaccttccaggtcaagctggagacgcgccagatcacgtggagccggggcgccgacaagatcgagggggccattgacattcgtgaaattaaggagatccgcccagggaagacctcacgggactttgatcgctatcaagaggacccagctttccggccggaccagtcacattgctttgtcattctctatggaatggaatttcgcctgaaaacgctgagcctgcaagccacatctgaggatgaagtgaacatgtggatcaagggcttaacttggctgatggaggatacattgcaggcacccacacccctgcagattgagaggtggctccggaagcagttttactcagtggatcggaatcgtgaggatcgtatatcagccaaggacctgaagaacatgctgtcccaggtcaactaccgggtccccaacatgcgcttcctccgagagcggctgacggacctggagcagcgcagcggggacatcacctacgggcagtttgctcagctgtaccgcagcctcatgtacagcgcccagaagacgatggacctccccttcttggaagccagtactctgagggctggggagcggccggagctttgccgagtgtcccttcctgagttccagcagttccttcttgactaccagggggagctgtgggctgttgatcgcctccaggtgcaggagttcatgctcagcttcctccgagaccccttacgagagatcgaggagccatacttcttcctggatgagtttgtcaccttcctgttctccaaagagaacagtgtgtggaactcgcagctggatgcagtatgcccggacaccatgaacaaccctctttcccactactggatctcctcctcgcacaacacgtacctgaccggggaccagttctccagtgagtcctccttggaagcctatgctcgctgcctgcggatgggctgtcgctgcattgagttggactgctgggacggcccggatgggatgccagttatttaccatgggcacacccttaccaccaagatcaagttctcagatgtcctgcacaccatcaaggagcatgcctttgtggcctcagagtacccagtcatcctgtccattgaggaccactgcagcattgcccagcagagaaacatggcccaatacttcaagaaggtgctgggggacacactcctcaccaagcccgtggagatctctgccgacgggctcccctcacccaaccagcttaagaggaagatcctcatcaagcacaagaagctggctgagggcagtgcctacgaggaggtgcctacatccatgatgtactctgagaacgacatcagcaactctatcaagaatggcatcctctacctggaggaccctgtgaaccacgaatggtatccccactactttgttctgaccagcagcaagatctactactctgaggagaccagcagtgaccagggcaacgaggatgaggaggagcccaaggaggtcagcagcagcacagagctgcactccaatgagaagtggttccatgggaagctaggggcagggcgtgacgggcgtcacatcgctgagcgcctgcttactgagtactgcatcgagaccggagcccctgacggctccttcctcgtgcgagagagtgagaccttcgtgggcgactacacgctctctttctggcggaacgggaaagtccagcactgccgtatccactcccggcaagatgctgggacccccaagttcttcttgacagacaacctcgtctttgactccctctatgacctcatcacgcactaccagcaggtgcccctgcgctgtaatgagtttgagatgcgactttcagagcctgtcccacagaccaacgcccacgagagcaaagagtggtaccacgcgagcctgaccagagcacaggctgagcacatgctaatgcgcgtccctcgtgatggggccttcctggtgcggaagcggaatgaacccaactcatatgccatctctttccgggctgagggcaagatcaagcattgccgtgtccagcaagagggccagacagtgatgctagggaactcggagttcgacagccttgttgacctcatcagctactatgagaaacacccgctataccgcaagatgaagctgcgctatcccatcaacgaggaggcactggagaagattggcacagctgagcctgactacggggccctgtatgagggacgcaaccctggcttctatgtagaggcaaaccctatgccaactttcaagtgtgcagtcaaagccctctttgactacaaggcccagagggaggacgagctgaccttcaccaagagcgccatcatccagaatgtggagaagcaagagggaggctgtcgtaggagtacaaggtttttattttttttaacagtgattaaaatatttattggtcattta

SEQ ID NO: 424765 - DNA, 2209 bp, Homo sapiens
ggggtgccgccgccgccgttgcgcttgctcccgggcggtcctggcctgtgccgccgccgcccccagcgtcggagccatggcgggcgccgcgtccccttgcgccaacggctgcgggcccggcgcgccctcggacgccgaggtgctgcacctctgccgcagcctcgaggtgggcaccgtcatgactttgttctactccaagaagtcgcagcgacccgagcggaagaccttccaggtcaagctggagacgcgccagatcacgtggagccggggcgccgacaagatcgagggggccattgacattcgtgaaattaaggagatccgcccagggaagacctcacgggactttgatcgctatcaagaggacccagctttccggccggaccagtcacattgctttgtcattctctatggaatggaatttcgcctgaaaacgctgagcctgcaagccacatctgaggatgaagtgaacatgtggatcaagggcttaacttggctgatggaggatacattgcaggcacccacacccctgcagattgagaggtggctccggaagcagttttactcagtggatcggaatcgtgaggatcgtatatcagccaaggacctgaagaacatgctgtcccaggtcaactaccgggtccccaacatgcgcttcctccgagagcggctgacggacctggagcagcgcagcggggacatcacctacgggcagtttgctcagctgtaccgcagcctcatgtacagcgcccagaagacgatggacctccccttcttggaagccagtactctgagggctggggagcggccggagctttgccgagtgtcccttcctgagttccagcagttccttcttgactaccagggggagctgtgggctgttgatcgcctccaggtgcaggagttcatgctcagcttcctccgagaccccttacgagagatcgaggagccatacttcttcctggatgagtttgtcaccttcctgttctccaaagagaacagtgtgtggaactcgcagctggatgcagtatgcccggacaccatgaacaaccctctttcccactactggatctcctcctcgcacaacacgtacctgaccggggaccagttctccagtgagtcctccttggaagcctatgctcgctgcctgcggatgggctgtcgctgcattgagttggactgctgggacggcccggatgggatgccagttatttaccatgggcacacccttaccaccaagatcaagttctcagatgtcctgcacaccatcaaggagcatgcctttgtggcctcagagtacccagtcatcctgtccattgaggaccactgcagcattgcccagcagagaaacatggcccaatacttcaagaaggtgctgggggacacactcctcaccaagcccgtggagatctctgccgacgggctcccctcacccaaccagcttaagaggaagatcctcatcaagcacaagaagctggctgagggcagtgcctacgaggaggtgcctacatccatgatgtactctgagaacgacatcagcaactctatcaagaatggcatcctctacctggaggaccctgtgaaccacgaatggtatccccactactttgttctgaccagcagcaagatctactactctgaggagaccagcagtgaccagggcaacgaggatgaggaggagcccaaggaggtcagcagcagcacagagctgcactccaatgagaagtggttccatgggaagctaggggcagggcgtgacgggcgtcacatcgctgagcgcctgcttactgagtactgcatcgagaccggagcccctgacggctccttcctcgtgcgagagagtgagaccttcgtgggcgactacacgctctctttctggcggaacgggaaagtccagcactgccgtatccactcccggcaagatgctgggacccccaagttcttcttgacagacaacctcgtctttgactccctctatgacctcatcacgcactaccagcaggtgcccctgcgctgtaatgagtttgagatgcgactttcagagcctgtcccacagaccaacgcccacgagagcaaagagtggtaccacgcgagcctgaccagagcacaggctgagcacatgctaatgcgcgtccctcgtgatggggccttcctggtgacgaagggggatggacacacgaagggggatggacacacgaagggggatggacac

SEQ ID NO: 424766 - DNA, 261 bp, Homo sapiens
ctgcgctatcccatcaacgaggaggcactggagaagattggcacagctgtgagggggctgtggtagacggggcatggcaggggaggcaggagagacccagaatcttaccagtctctggatgtgtgtaacagcaagacctggtgtgttgtagaagttcgtgggagggcccctgactccagctgggagccacagtgtgggtaccaggagggtgtctgcaggaggggacatctgagcagcatctttaaggatggggacaggcac

SEQ ID NO: 424767 - DNA, 433 bp, Homo sapiens
gcctgcccgcttgaccatggtgatgttgctccccagtggactgctgggacggcccggatgggatgccagttatttaccatgggcacacccttaccaccaagatcaagttctcagatgtcctgcacaccatcaaggagcatgcctttgtggcctcagagtgagtcggaggctggatgacccaggggttaacttggctccaggtctctcgttctagagggacagagggcagaaagactcctcaaatgccctgtcccctctccctcagcctttcatctttgtccttcctcttggcctctcctcgtcacctgctccctgcttgagctgttgcttcccaagttacactttctgtttcctacgtgttgggcccactctcttcttcatgggtcctttagactgtagaacacatgctcttctcatcttcagaaaacatgcc

SEQ ID NO: 424768 - DNA, 557 bp, Homo sapiens
gatatcccctcacacacatatgcagtagccatgctgaccattggtgggctttgcttcccacagcacttggacgagaacagccccctaggggacttgctgcggggggtcttggatgtgccggcttgtcagattggtgagctcccatctgtttctcttgcccactgttccctagggtgagattcttctttgtatctctttcctgctcctagggaggaagctgatggctgaaccccaaagtctgccctcactccaagctctccccatgctctggacatccccttgacaccctgggctccctttgtcactgtcagctttgacccctgcatgtttacctatgccaggcactggggaacccgtcagaatcagcagaacaaagttgatgctgctggttggctgacatccccaggcctaatgggttgtaccacagggatgtgacagaggcttggagatggggtggagagggagacacggcctgaggaagaagcatgagtcagagctgagttggaacactggctccaccacaaccagcagtgacttgtttgagttgtagcgtcgtc

SEQ ID NO: 424769 - DNA, 5161 bp, Homo sapiens
ggggtgccgccgccgccgttgcgcttgctcccgggcggtcctggcctgtgccgccgccgcccccagcgtcggagccatggcgggcgccgcgtccccttgcgccaacggctgcgggcccggcgcgccctcggacgccgaggtgctgcacctctgccgcagcctcgaggtgggcaccgtcatgactttgttctactccaagaagtcgcagcgacccgagcggaagaccttccaggtcaagctggagacgcgccagatcacgtggagccggggcgccgacaagatcgagggggccattgacattcgtgaaattaaggagatccgcccagggaagacctcacgggactttgatcgctatcaagaggacccagctttccggccggaccagtcacattgctttgtcattctctatggaatggaatttcgcctgaaaacgctgagcctgcaagccacatctgaggatgaagtgaacatgtggatcaagggcttaacttggctgatggaggatacattgcaggcacccacacccctgcagattgagaggtggctccggaagcagttttactcagtggatcggaatcgtgaggatcgtatatcagccaaggacctgaagaacatgctgtcccaggtcaactaccgggtccccaacatgcgcttcctccgagagcggctgacggacctggagcagcgcagcggggacatcacctacgggcagtttgctcagctgtaccgcagcctcatgtacagcgcccagaagacgatggacctccccttcttggaagccagtactctgagggctggggagcggccggagctttgccgagtgtcccttcctgagttccagcagttccttcttgactaccagggggagctgtgggctgttgatcgcctccaggtgcaggagttcatgctcagcttcctccgagaccccttacgagagatcgaggagccatacttcttcctggatgagtttgtcaccttcctgttctccaaagagaacagtgtgtggaactcgcagctggatgcagtatgcccggacaccatgaacaaccctctttcccactactggatctcctcctcgcacaacacgtacctgaccggggaccagttctccagtgagtcctccttggaagcctatgctcgctgcctgcggatgggctgtcgctgcattgagttggactgctgggacggcccggatgggatgccagttatttaccatgggcacacccttaccaccaagatcaagttctcagatgtcctgcacaccatcaaggagcatgcctttgtggcctcagagtacccagtcatcctgtccattgaggaccactgcagcattgcccagcagagaaacatggcccaatacttcaagaaggtgctgggggacacactcctcaccaagcccgtggagatctctgccgacgggctcccctcacccaaccagcttaagaggaagatcctcatcaagcacaagaagctggctgagggcagtgcctacgaggaggtgcctacatccatgatgtactctgagaacgacatcagcaactctatcaagaatggcatcctctacctggaggaccctgtgaaccacgaatggtatccccactactttgttctgaccagcagcaagatctactactctgaggagaccagcagtgaccagggcaacgaggatgaggaggagcccaaggaggtcagcagcagcacagagctgcactccaatgagaagtggttccatgggaagctaggggcagggcgtgacgggcgtcacatcgctgagcgcctgcttactgagtactgcatcgagaccggagcccctgacggctccttcctcgtgcgagagagtgagaccttcgtgggcgactacacgctctctttctggcggaacgggaaagtccagcactgccgtatccactcccggcaagatgctgggacccccaagttcttcttgacagacaacctcgtctttgactccctctatgacctcatcacgcactaccagcaggtgcccctgcgctgtaatgagtttgagatgcgactttcagagcctgtcccacagaccaacgcccacgagagcaaagagtggtaccacgcgagcctgaccagagcacaggctgagcacatgctaatgcgcgtccctcgtgatggggccttcctggtgcggaagcggaatgaacccaactcatatgccatctctttccgggctgagggcaagatcaagcattgccgtgtccagcaagagggccagacagtgatgctagggaactcggagttcgacagccttgttgacctcatcagctactatgagaaacacccgctataccgcaagatgaagctgcgctatcccatcaacgaggaggcactggagaagattggcacagctgagcctgactacggggccctgtatgagggacgcaaccctggcttctatgtagaggcaaaccctatgccaactttcaagtgtgcagtcaaagccctctttgactacaaggcccagagggaggacgagctgaccttcaccaagagcgccatcatccagaatgtggagaagcaagagggaggctggtggcgaggggactacggagggaagaagcagctgtggttcccatcaaactacgtggaagagatggtcaaccccgtggccctggagccggagagggagcacttggacgagaacagccccctaggggacttgctgcggggggtcttggatgtgccggcttgtcagattgccatccgtcctgagggcaagaacaaccggctcttcgtcttctccatcagcatggcgtcggtggcccactggtccctggatgttgctgccgactcacaggaggagctgcaggactgggtgaaaaagatccgtgaagtggcccagacagcagacgccaggctcactgaagggaagataatggaacggaggaagaagattgccctggagctctctgaacttgtcgtctactgccggcctgttccctttgatgaagagaagattggcacagaacgtgcttgctaccgggacatgtcatccttcccggaaaccaaggctgagaaatacgtgaacaaggccaaaggcaagaagttccttcagtacaatcgactgcagctctcccgcatctaccccaagggccagcgactggattcctccaactacgatcctttgcccatgtggatctgtggcagtcagcttgtggccctcaacttccagacccctgacaagcctatgcagatgaaccaggccctcttcatgacgggcaggcactgtggctacgtgctgcagccaagcaccatgcgggatgaggccttcgacccctttgacaagagcagcctccgcgggctggagccatgtgccatctctattgaggtgctgggggcccgacatctgccaaagaatggccgaggcattgtgtgtccttttgtggagattgaggtggctggagctgagtatgacagcaccaagcagaagacagagtttgtggtggacaatggactcaaccctgtatggccagccaagcccttccacttccagatcagtaaccctgaatttgcctttctgcgcttcgtggtgtatgaggaagacatgtttagtgaccagaatttcctggctcaggctactttcccagtaaaaggcctgaagacaggatacagagcagtgcctttgaagaacaactacagtgaggacctggagttggcctccctgctgatcaagattgacattttccctgccaagcaggagaatggtgacctcagtcccttcagtggtacgtccctgcgggagcggggctcagatgcctcaggccagctgtttcatggccgagcccgggaaggctcctttgaatcccgctaccagcagccgtttgaggacttccgcatctcccaggagcatctcgcagaccattttgacagtcgagaacgaagggccccaagaaggactcgggtcaatggagacaaccgcctctagttgtaccccagcctcgttggagagcagcaggtgctgtgcgccttgtagaatgccgcgaactgggttctttggaagcagccccctgtggcggccttccgggtctcgcagcctgaagcctggattccagcagtgaatgctagacagaaaccaagccattaatgagatgttattactgttttgggcctccatgccccagctctggatgaaggcaaaaactgtactgtgtttcgcattaagcacacacatctggccctgacttctggagatggatccttccatcttgtggggccaggaccatggccgaagccccttggagagagaggctgcctcagccagtggcacaggagactccaaggagctactgacattcctaagagtggaggaggaggaggagccttgctgggccagggaaacaaagtttacattgtcctgtagctttaaaaccacagctgggcagggtgagaagctagatgcccctgcagtttggccctggagccagggcagaggaatgtagggcctgcatggagaagggttctgccctgcctgaggaggaggacacagcacaagggcacattgcccatggctgggaacatgacccagcctgaaagatacaggggatcatgttaaaaatagcagtattatttttcgtctcaatggtattgtaactaagttatttactcctcctgctcctcacccctgtagggaaaccttggagaggagagtggcaggtgggctgcctgctgtgttaagaggacttagtttgtgatgtaaggcactgtcaggaatggggggcgggccagggtgggaagagaagaaatagcagagcctattttggtgaggttttttgtttttaagtcaaagaagactcagtatgctttccctgaggaatgaaaaagggattgaggagttgcctgactcctgggtgggtggggtacaggcagttaggtgctgaatgaagctgccatccttgctgcagcttctaactggtaaaaagatccagggatggagatgggaaggttagaaaggcagccctcacctctgaggacagaggccggggtccaggcccgtgggcgcaaaggtgcctcatagcatagccagcattcagcacacacaaacctactgcccacatttgggctcagggttggccatttgctagttctgctgccctcttaagatctgactgccaaataaatcatcctcatgtccttt

SEQ ID NO: 424770 - DNA, 5035 bp, Homo sapiens
  misc_feature (4882)..(4882): n is a, c, g, or t
  misc_feature (4886)..(4886): n is a, c, g, or t
ggggtgccgccgccgccgttgcgcttgctcccgggcggtcctggcctgtgccgccgccgcccccagcgtcggagccatggcgggcgccgcgtccccttgcgccaacggctgcgggcccggcgcgccctcggacgccgaggtgctgcacctctgccgcagcctcgaggtgggcaccgtcatgactttgttctactccaagaagtcgcagcgacccgagcggaagaccttccaggtcaagctggagacgcgccagatcacgtggagccggggcgccgacaagatcgagggggccattgacattcgtgaaattaaggagatccgcccagggaagacctcacgggactttgatcgctatcaagaggacccagctttccggccggaccagtcacattgctttgtcattctctatggaatggaatttcgcctgaaaacgctgagcctgcaagccacatctgaggatgaagtgaacatgtggatcaagggcttaacttggctgatggaggatacattgcaggcacccacacccctgcagattgagaggtggctccggaagcagttttactcagtggatcggaatcgtgaggatcgtatatcagccaaggacctgaagaacatgctgtcccaggtcaactaccgggtccccaacatgcgcttcctccgagagcggctgacggacctggagcagcgcagcggggacatcacctacgggcagtttgctcagctgtaccgcagcctcatgtacagcgcccagaagacgatggacctccccttcttggaagccagtactctgagggctggggagcggccggagctttgccgagtgtcccttcctgagttccagcagttccttcttgactaccagggggagctgtgggctgttgatcgcctccaggtgcaggagttcatgctcagcttcctccgagaccccttacgagagatcgaggagccatacttcttcctggatgagtttgtcaccttcctgttctccaaagagaacagtgtgtggaactcgcagctggatgcagtatgcccggacaccatgaacaaccctctttcccactactggatctcctcctcgcacaacacgtacctgaccggggaccagttctccagtgagtcctccttggaagcctatgctcgctgcctgcggatgggctgtcgctgcattgagttggactgctgggacggcccggatgggatgccagttatttaccatgggcacacccttaccaccaagatcaagttctcagatgtcctgcacaccatcaaggagcatgcctttgtggcctcagagtacccagtcatcctgtccattgaggaccactgcagcattgcccagcagagaaacatggcccaatacttcaagaaggtgctgggggacacactcctcaccaagcccgtggagatctctgccgacgggctcccctcacccaaccagcttaagaggaagatcctcatcaagcacaagaagctggctgagggcagtgcctacgaggaggtgcctacatccatgatgtactctgagaacgacatcagcaactctatcaagaatggcatcctctacctggaggaccctgtgaaccacgaatggtatccccactactttgttctgaccagcagcaagatctactactctgaggagaccagcagtgaccagggcaacgaggatgaggaggagcccaaggaggtcagcagcagcacagagctgcactccaatgagaagtggttccatgggaagctaggggcagggcgtgacgggcgtcacatcgctgagcgcctgcttactgagtactgcatcgagaccggagcccctgacggctccttcctcgtgcgagagagtgagaccttcgtgggcgactacacgctctctttctggcggaacgggaaagtccagcactgccgtatccactcccggcaagatgctgggacccccaagttcttcttgacagacaacctcgtctttgactccctctatgacctcatcacgcactaccagcaggtgcccctgcgctgtaatgagtttgagatgcgactttcagagcctgtcccacagaccaacgcccacgagagcaaagagtggtaccacgcgagcctgaccagagcacaggctgagcacatgctaatgcgcgtccctcgtgatggggccttcctggtgcggaagcggaatgaacccaactcatatgccatctctttccgggctgagggcaagatcaagcattgccgtgtccagcaagagggccagacagtgatgctagggaactcggagttcgacagccttgttgacctcatcagctactatgagaaacacccgctataccgcaagatgaagctgcgctatcccatcaacgaggaggcactggagaagattggcacagctgagcctgactacggggccctgtatgagggacgcaaccctggcttctatgtagaggcaaaccctatgccaactttcaagtgtgcagtcaaagccctctttgactacaaggcccagagggaggacgagctgaccttcaccaagagcgccatcatccagaatgtggagaagcaagagggaggctggtggcgaggggactacggagggaagaagcagctgtggttcccatcaaactacgtggaagagatggtcaaccccgtggccctggagccggagagggagcacttggacgagaacagccccctaggggacttgctgcggggggtcttggatgtgccggcttgtcagattgccatccgtcctgagggcaagaacaaccggctcttcgtcttctccatcagcatggcgtcggtggcccactggtccctggatgttgctgccgactcacaggaggagctgcaggactgggtgaaaaagatccgtgaagtggcccagacagcagacgccaggctcactgaagggaagataatggaacggaggaagaagattgccctggagctctctgaacttgtcgtctactgccggcctgttccctttgatgaagagaagattggcacagaacgtgcttgctaccgggacatgtcatccttcccggaaaccaaggctgagaaatacgtgaacaaggccaaaggcaagaagttccttcagtacaatcgactgcagctctcccgcatctaccccaagggccagcgactggattcctccaactacgatcctttgcccatgtggatctgtggcagtcagcttgtggccctcaacttccagacccctgacaagcctatgcagatgaaccaggccctcttcatgacgggcaggcactgtggctacgtgctgcagccaagcaccatgcgggatgaggccttcgacccctttgacaagagcagcctccgcgggctggagccatgtgccatctctattgaggtgctgggggcccgacatctgccaaagaatggccgaggcattgtgtgtccttttgtggagattgaggtggctggagctgagtatgacagcaccaagcagaagacagagtttgtggtggacaatggactcaaccctgtatggccagccaagcccttccacttccagatcagtaaccctgaatttgcctttctgcgcttcgtggtgtatgaggaagacatgtttagtgaccagaatttcctggctcaggctactttcccagtaaaaggcctgaagacaggatacagagcagtgcctttgaagaacaactacagtgaggacctggagttggcctccctgctgatcaagattgacattttccctgccaagcaggagaatggtgacctcagtcccttcagtggtacgtccctgcgggagcggggctcagatgcctcaggccagctgtttcatggccgagcccgggaaggctcctttgaatcccgctaccagcagccgtttgaggacttccgcatctcccaggagcatctcgcagaccattttgacagtcgagaacgaagggccccaagaaggactcgggtcaatggagacaaccgcctctagttgtaccccagcctcgttggagagcagcaggtgctgtgcgccttgtagaatgccgcgaactgggttctttggaagcagccccctgtggcggccttccgggtctcgcagcctgaagcctggattccagcagtgaatgctagacagaaaccaagccattaatgagatgttattactgttttgggcctccatgccccagctctggatgaaggcaaaaactgtactgtgtttcgcattaagcacacacatctggccctgacttctggagatggatccttccatcttgtggggccaggaccatggccgaagccccttggagagagaggctgcctcagccagtggcacaggagactccaaggagctactgacattcctaagagtggaggaggaggaggagccttgctgggccagggaaacaaagtttacattgtcctgtagctttaaaaccacagctgggcagggtgagaagctagatgcccctgcagtttggccctggagccagggcagaggaatgtagggcctgcatggagaagggttctgccctgcctgaggaggaggacacagcacaagggcacattgcccatggctgggaacatgacccagcctgaaagatacaggggatcatgttaaaaatagcagtattatttttcgtctcaatggtattgtaactaagttatttactcctcctgctcctcacccctgtagggaaaccttggagaggagagtggcaggtgggctgcctgctgtgttaagaggacttagtttgtgatgtaaggcactgtcaggaatggggggcgggccagggtgggaagagaagaaatagcagagcctattttggtgaggttttttgtttttaagtcaaagaagactcagtattggcaagcttgccagtgtacctgctggtgggctgtagccgtctctgctgccccagcntctnagcccctgctgctggttctgcccctgctgcagcagaggagaagaaagatgagaagaaggaggagtctgaagagtcagatgatgacatgggatttggcctttttgattaaattcctgctcccctgcaaataaagcctttttacacatcaa

SEQ ID NO: 424771 - DNA, 5397 bp, Homo sapiens
ggggtgccgccgccgccgttgcgcttgctcccgggcggtcctggcctgtgccgccgccgcccccagcgtcggagccatggcgggcgccgcgtccccttgcgccaacggctgcgggcccggcgcgccctcggacgccgaggtgctgcacctctgccgcagcctcgaggtgggcaccgtcatgactttgttctactccaagaagtcgcagcgacccgagcggaagaccttccaggtcaagctggagacgcgccagatcacgtggagccggggcgccgacaagatcgagggggccattgacattcgtgaaattaaggagatccgcccagggaagacctcacgggactttgatcgctatcaagaggacccagctttccggccggaccagtcacattgctttgtcattctctatggaatggaatttcgcctgaaaacgctgagcctgcaagccacatctgaggatgaagtgaacatgtggatcaagggcttaacttggctgatggaggatacattgcaggcacccacacccctgcagattgagaggtggctccggaagcagttttactcagtggatcggaatcgtgaggatcgtatatcagccaaggacctgaagaacatgctgtcccaggtcaactaccgggtccccaacatgcgcttcctccgagagcggctgacggacctggagcagcgcagcggggacatcacctacgggcagtttgctcagctgtaccgcagcctcatgtacagcgcccagaagacgatggacctccccttcttggaagccagtactctgaggtttggtttggagtggggaggtggggttttccctgggcccccttcatctctccactgggcgattcttgatccaggtgggaggcagtgggagtagggaaccatgctggaccattctgggaagctgtgctggctgggagttgggttctgccttccgtggggcaccttgttgtctgttgaccatactagctagcttaccttctctccctgcagggctggggagcggccggagctttgccgagtgtcccttcctgagttccagcagttccttcttgactaccagggggagctgtgggctgttgatcgcctccaggtgcaggagttcatgctcagcttcctccgagaccccttacgagagatcgaggagccatacttcttcctggatgagtttgtcaccttcctgttctccaaagagaacagtgtgtggaactcgcagctggatgcagtatgcccggacaccatgaacaaccctctttcccactactggatctcctcctcgcacaacacgtacctgaccggggaccagttctccagtgagtcctccttggaagcctatgctcgctgcctgcggatgggctgtcgctgcattgagttggactgctgggacggcccggatgggatgccagttatttaccatgggcacacccttaccaccaagatcaagttctcagatgtcctgcacaccatcaaggagcatgcctttgtggcctcagagtacccagtcatcctgtccattgaggaccactgcagcattgcccagcagagaaacatggcccaatacttcaagaaggtgctgggggacacactcctcaccaagcccgtggagatctctgccgacgggctcccctcacccaaccagcttaagaggaagatcctcatcaagcacaagaagctggctgagggcagtgcctacgaggaggtgcctacatccatgatgtactctgagaacgacatcagcaactctatcaagaatggcatcctctacctggaggaccctgtgaaccacgaatggtatccccactactttgttctgaccagcagcaagatctactactctgaggagaccagcagtgaccagggcaacgaggatgaggaggagcccaaggaggtcagcagcagcacagagctgcactccaatgagaagtggttccatgggaagctaggggcagggcgtgacgggcgtcacatcgctgagcgcctgcttactgagtactgcatcgagaccggagcccctgacggctccttcctcgtgcgagagagtgagaccttcgtgggcgactacacgctctctttctggcggaacgggaaagtccagcactgccgtatccactcccggcaagatgctgggacccccaagttcttcttgacagacaacctcgtctttgactccctctatgacctcatcacgcactaccagcaggtgcccctgcgctgtaatgagtttgagatgcgactttcagagcctgtcccacagaccaacgcccacgagagcaaagagtggtaccacgcgagcctgaccagagcacaggctgagcacatgctaatgcgcgtccctcgtgatggggccttcctggtgcggaagcggaatgaacccaactcatatgccatctctttccgggctgagggcaagatcaagcattgccgtgtccagcaagagggccagacagtgatgctagggaactcggagttcgacagccttgttgacctcatcagctactatgagaaacacccgctataccgcaagatgaagctgcgctatcccatcaacgaggaggcactggagaagattggcacagctgagcctgactacggggccctgtatgagggacgcaaccctggcttctatgtagaggcaaaccctatgccaactttcaagtgtgcagtcaaagccctctttgactacaaggcccagagggaggacgagctgaccttcaccaagagcgccatcatccagaatgtggagaagcaagagggaggctggtggcgaggggactacggagggaagaagcagctgtggttcccatcaaactacgtggaagagatggtcaaccccgtggccctggagccggagagggagcacttggacgagaacagccccctaggggacttgctgcggggggtcttggatgtgccggcttgtcagattgccatccgtcctgagggcaagaacaaccggctcttcgtcttctccatcagcatggcgtcggtggcccactggtccctggatgttgctgccgactcacaggaggagctgcaggactgggtgaaaaagatccgtgaagtggcccagacagcagacgccaggctcactgaagggaagataatggaacggaggaagaagattgccctggagctctctgaacttgtcgtctactgccggcctgttccctttgatgaagagaagattggcacagaacgtgcttgctaccgggacatgtcatccttcccggaaaccaaggctgagaaatacgtgaacaaggccaaaggcaagaagttccttcagtacaatcgactgcagctctcccgcatctaccccaagggccagcgactggattcctccaactacgatcctttgcccatgtggatctgtggcagtcagcttgtggccctcaacttccagacccctgacaagcctatgcagatgaaccaggccctcttcatgacgggcaggcactgtggctacgtgctgcagccaagcaccatgcgggatgaggccttcgacccctttgacaagagcagcctccgcgggctggagccatgtgccatctctattgaggtgctgggggcccgacatctgccaaagaatggccgaggcattgtgtgtccttttgtggagattgaggtggctggagctgagtatgacagcaccaagcagaagacagagtttgtggtggacaatggactcaaccctgtatggccagccaagcccttccacttccagatcagtaaccctgaatttgcctttctgcgcttcgtggtgtatgaggaagacatgtttagtgaccagaatttcctggctcaggctactttcccagtaaaaggcctgaagacaggatacagagcagtgcctttgaagaacaactacagtgaggacctggagttggcctccctgctgatcaagattgacattttccctgccaagcaggagaatggtgacctcagtcccttcagtggtacgtccctgcgggagcggggctcagatgcctcaggccagctgtttcatggccgagcccgggaaggctcctttgaatcccgctaccagcagccgtttgaggacttccgcatctcccaggagcatctcgcagaccattttgacagtcgagaacgaagtaaggacactcttcccttctgtccagggccccaagaaggactcgggtcaatggagacaaccgcctctagttgtaccccagcctcgttggagagcagcaggtgctgtgcgccttgtagaatgccgcgaactgggttctttggaagcagccccctgtggcggccttccgggtctcgcagcctgaagcctggattccagcagtgaatgctagacagaaaccaagccattaatgagatgttattactgttttgggcctccatgccccagctctggatgaaggcaaaaactgtactgtgtttcgcattaagcacacacatctggccctgacttctggagatggatccttccatcttgtggggccaggaccatggccgaagccccttggagagagaggctgcctcagccagtggcacaggagactccaaggagctactgacattcctaagagtggaggaggaggaggagccttgctgggccagggaaacaaagtttacattgtcctgtagctttaaaaccacagctgggcagggtgagaagctagatgcccctgcagtttggccctggagccagggcagaggaatgtagggcctgcatggagaagggttctgccctgcctgaggaggaggacacagcacaagggcacattgcccatggctgggaacatgacccagcctgaaagatacaggggatcatgttaaaaatagcagtattatttttcgtctcaatggtattgtaactaagttatttactcctcctgctcctcacccctgtagggaaaccttggagaggagagtggcaggtgggctgcctgctgtgttaagaggacttagtttgtgatgtaaggcactgtcaggaatggggggcgggccagggtgggaagagaagaaatagcagagcctattttggtgaggttttttgtttttaagtcaaagaagactcagtatgctttccctgaggaatgaaaaagggattgaggagttgcctgactcctgggtgggtggggtacaggcagttaggtgctgaatgaagctgccatccttgctgcagcttctaactggtaaaaagatccagggatggagatgggaaggttagaaaggcagccctcacctctgaggacagaggccggggtccaggcccgtgggcgcaaaggtgcctcatagcatagccagcattcagcacacacaaacctactgcccacatttgggctcagggttggccatttgctagttctgctgccctcttaagatctgactgccaaataaatcatcctcatgtccttt

SEQ ID NO: 424772 - DNA, 2916 bp, Homo sapiens
cccacgcgtccgctcatcagctactatgagaaacacccgctataccgcaaggaattgggaaaaaaaggggcccctttttaggggctgcgctatcccatcaacgaggaggcactggagaagattggcacagctgagcctgactacggggccctgtatgagggacgcaaccctggcttctatgtagaggcaaaccctatgccaactttcaagtgtgcagtcaaagccctctttgactacaaggcccagagggaggacgagctgaccttcaccaagagcgccatcatccagaatgtggagaagcaagagggaggctggtggcgaggggactacggagggaagaagcagctgtggttcccatcaaactacgtggaagagatggtcaaccccgtggccctggagccggagagggagcacttggacgagaacagccccctaggggacttgctgcggggggtcttggatgtgccggcttgtcagattgccatccgtcctgagggcaagaacaaccggctcttcgtcttctccatcagcatggcgtcggtggcccactggtccctggatgttgctgccgactcacaggaggagctgcaggactgggtgaaaaagatccgtgaagtggcccagacagcagacgccaggctcactgaagggaagataatggaacggaggaagaagattgccctggagctctctgaacttgtcgtctactgccggcctgttccctttgatgaagagaagattggcacagaacgtgcttgctaccgggacatgtcatccttcccggaaaccaaggctgagaaatacgtgaacaaggccaaaggcaagaagttccttcagtacaatcgactgcagctctcccgcatctaccccaagggccagcgactggattcctccaactacgatcctttgcccatgtggatctgtggcagtcagcttgtggccctcaacttccagacccctgacaagcctatgcagatgaaccaggccctcttcatgacgggcaggcactgtggctacgtgctgcagccaagcaccatgcgggatgaggccttcgacccctttgacaagagcagcctccgcgggctggagccatgtgccatctctattgaggtgctgggggcccgacatctgccaaagaatggccgaggcattgtgtgtccttttgtggagattgaggtggctggagctgagtatgacagcaccaagcagaagacagagtttgtggtggacaatggactcaaccctgtatggccagccaagcccttccacttccagatcagtaaccctgaatttgcctttctgcgcttcgtggtgtatgaggaagacatgtttagtgaccagaatttcctggctcaggctactttcccagtaaaaggcctgaagacaggatacagagcagtgcctttgaagaacaactacagtgaggacctggagttggcctccctgctgatcaagattgacattttccctgccaagcaggagaatggtgacctcagtcccttcagtggtacgtccctgcgggagcggggctcagatgcctcaggccagctgtttcatggccgagcccgggaaggctcctttgaatcccgctaccagcagccgtttgaggacttccgcatctcccaggagcatctcgcagaccattttgacagtcgagaacgaagggccccaagaaggactcgggtcaatggagacaaccgcctctagttgtaccccagcctcgttggagagcagcaggtgctgtgcgccttgtagaatgccgcgaactgggttctttggaagcagccccctgtggcggccttccgggtctcgcagcctgaagcctggattccagcagtgaatgctagacagaaaccaagccattaatgagatgttattactgttttgggcctccatgccccagctctggatgaaggcaaaaactgtactgtgtttcgcattaagcacacacatctggccctgacttctggagatggatccttccatcttgtggggccaggaccatggccgaagccccttggagagagaggctgcctcagccagtggcacaggagactccaaggagctactgacattcctaagagtggaggaggaggaggagccttgctgggccagggaaacaaagtttacattgtcctgtagctttaaaaccacagctgggcagggtgagaagctagatgcccctgcagtttggccctggagccagggcagaggaatgtagggcctgcatggagaagggttctgccctgcctgaggaggaggacacagcacaagggcacattgcccatggctgggaacatgacccagcctgaaagatacaggggatcatgttaaaaatagcagtattatttttcgtctcaatggtattgtaactaagttatttactcctcctgctcctcacccctgtagggaaaccttggagaggagagtggcaggtgggctgcctgctgtgttaagaggacttagtttgtgatgtaaggcactgtcaggaatggggggcgggccagggtgggaagagaagaaatagcagagcctattttggtgaggttttttgtttttaagtcaaagaagactcagtatgctttccctgaggaatgaaaaagggattgaggagttgcctgactcctgggtgggtggggtacaggcagttaggtgctgaatgaagctgccatccttgctgcagcttctaactggtaaaaagatccagggatggagatgggaaggttagaaaggcagccctcacctctgaggacagaggccggggtccaggcccgtgggcgcaaaggtgcctcatagcatagccagcattcagcacacacaaacctactgcccacatttgggctcagggttggccatttgctagttctgctgccctcttaagatctgactgccaaataaatcatcctcatgtccttt

SEQ ID NO: 424773 - DNA, 1176 bp, Homo sapiens
gtgtcatccccgtatcttcaggtgggcatgtcccagccatgggcaatgtgccttgtgctgtgtctcctcctcaggcaggcagaacccttctccatgcaggcctacattcctctgccctggtccaggccaaactgcaggggatctagcttctcaccctgcccagctctggatgaaggcaaaaactgtactgtgtttcgcattaagcacacacatctggccctgacttctggagatggatccttccatcttgtggggccaggaccatggccgaagccccttggagagagaggctgcctcagccagtggcacaggagactccaaggagctactgacattcctaagagtggaggaggaggaggagccttgctgggccagggaaacaaagtttacattgtcctgtagctttaaaaccacagctgggcagggtgagaagctagatgcccctgcagtttggccctggagccagggcagaggaatgtagggcctgcatggagaagggttctgccctgcctgaggaggaggacacagcacaagggcacattgcccatggctgggaacatgacccagcctgaaagatacaggggatcatgttaaaaatagcagtattatttttcgtctcaatggtattgtaactaagttatttactcctcctgctcctcacccctgtagggaaaccttggagaggagagtggcaggtgggctgcctgctgtgttaagaggacttagtttgtgatgtaaggcactgtcaggaatggggggcgggccagggtgggaagagaagaaatagcagagcctattttggtgaggttttttgtttttaagtcaaagaagactcagtatgctttccctgaggaatgaaaaagggattgaggagttgcctgactcctgggtgggtggggtacaggcagttaggtgctgaatgaagctgccatccttgctgcagcttctaactggtaaaaagatccagggatggagatgggaaggttagaaaggcagccctcacctctgaggacagaggccggggtccaggcccgtgggcgcaaaggtgcctcatagcatagccagcattcagcacacacaaacctactgcccacatttgggctcagggttggccatttgctagttctgctgccctcttaagatctgactgccaaataaatcatcctcatgtccttt

SEQ ID NO: 424774 - DNA, 3077 bp, Homo sapiens
ggggtgccgccgccgccgttgcgcttgctcccgggcggtcctggcctgtgccgccgccgcccccagcgtcggagccatggcgggcgccgcgtccccttgcgccaacggctgcgggcccggcgcgccctcggacgccgaggtgctgcacctctgccgcagcctcgaggtgggcaccgtcatgactttgttctactccaagaagtcgcagcgacccgagcggaagaccttccaggtcaagctggagacgcgccagatcacgtggagccggggcgccgacaagatcgagggggccattgacattcgtgaaattaaggagatccgcccagggaagacctcacgggactttgatcgctatcaagaggacccagctttccggccggaccagtcacattgctttgtcattctctatggaatggaatttcgcctgaaaacgctgagcctgcaagccacatctgaggatgaagtgaacatgtggatcaagggcttaacttggctgatggaggatacattgcaggcacccacacccctgcagattgagaggtggctccggaagcagttttactcagtggatcggaatcgtgaggatcgtatatcagccaaggacctgaagaacatgctgtcccaggtcaactaccgggtccccaacatgcgcttcctccgagagcggctgacggacctggagcagcgcagcggggacatcacctacgggcagtttgctcagctgtaccgcagcctcatgtacagcgcccagaagacgatggacctccccttcttggaagccagtactctgagggctggggagcggccggagctttgccgagtgtcccttcctgagttccagcagttccttcttgactaccagggggagctgtgggctgttgatcgcctccaggtgcaggagttcatgctcagcttcctccgagaccccttacgagagatcgaggagccatacttcttcctggatgagtttgtcaccttcctgttctccaaagagaacagtgtgtggaactcgcagctggatgcagtatgcccggacaccatgaacaaccctctttcccactactggatctcctcctcgcacaacacgtacctgaccggggaccagttctccagtgagtcctccttggaagcctatgctcgctgcctgcggatgggctgtcgctgcattgagttggactgctgggacggcccggatgggatgccagttatttaccatgggcacacccttaccaccaagatcaagttctcagatgtcctgcacaccatcaaggagcatgcctttgtggcctcagagtacccagtcatcctgtccattgaggaccactgcagcattgcccagcagagaaacatggcccaatacttcaagaaggtgctgggggacacactcctcaccaagcccgtggagatctctgccgacgggctcccctcacccaaccagcttaagaggaagatcctcatcaagcacaagaagctggctgagggcagtgcctacgaggaggtgcctacatccatgatgtactctgagaacgacatcagcaactctatcaagaatggcatcctctacctggaggaccctgtgaaccacgaatggtatccccactactttgttctgaccagcagcaagatctactactctgaggagaccagcagtgaccagggcaacgaggatgaggaggagcccaaggaggtcagcagcagcacagagctgcactccaatgagaagtggttccatgggaagctaggggcagggcgtgacgggcgtcacatcgctgagcgcctgcttactgagtactgcatcgagaccggagcccctgacggctccttcctcgtgcgagagagtgagaccttcgtgggcgactacacgctctctttctggcggaacgggaaagtccagcactgccgtatccactcccggcaagatgctgggacccccaagttcttcttgacagacaacctcgtctttgactccctctatgacctcatcacgcactaccagcaggtgcccctgcgctgtaatgagtttgagatgcgactttcagagcctgtcccacagaccaacgcccacgagagcaaagagtggtaccacgcgagcctgaccagagcacaggctgagcacatgctaatgcgcgtccctcgtgatggggccttcctggtgcggaagcggaatgaacccaactcatatgccatctctttccgggctgagggcaagatcaagcattgccgtgtccagcaagagggccagacagtgatgctagggaactcggagttcgacagccttgttgacctcatcagctactatgagaaacacccgctataccgcaagatgaagctgcgctatcccatcaacgaggaggcactggagaagattggcacagctgagcctgactacggggccctgtatgagggacgcaaccctggcttctatgtagaggcaaaccctatgccaactttcaagtgtgcagtcaaagccctctttgactacaaggcccagagggaggacgagctgaccttcaccaagagcgccatcatccagaatgtggagaagcaagagggaggctggtggcgaggggactacggagggaagaagcagctgtggttcccatcaaactacgtggaagagatggtcaaccccgtggccctggagccggagagggagcacttggacgagaacagccccctaggggacttgctgcggggggtcttggatgtgccggcttgtcagattgccatccgtcctgagggcaagaacaaccggctcttcgtcttctccatcagcatggcgtcggtggcccactggtccctggatgttgctgccgactcacaggaggagctgcaggactgggtgaaaaagatccgtgaagtggcccagacagcagacgccagggacttggcagctgaaatctctgggccctttcaacacagttgaaaggcccttctcttcctgaagctctgtttccatagttggctgtgctgggatggaacaaaaatgacgccacacaaaaaatttaagatagatccggttccgtggatgacatgaactgatgatagccagtatcaaacaaacagcgatagtgaaa

SEQ ID NO: 424775 - DNA, 1909 bp, Homo sapiens
ggggtgccgccgccgccgttgcgcttgctcccgggcggtcctggcctgtgccgccgccgcccccagcgtcggagccatggcgggcgccgcgtccccttgcgccaacggctgcgggcccggcgcgccctcggacgccgaggtgctgcacctctgccgcagcctcgaggtgggcaccgtcatgactttgttctactccaagaagtcgcagcgacccgagcggaagaccttccaggtcaagctggagacgcgccagatcacgtggagccggggcgccgacaagatcgagggggccattgacattcgtgaaattaaggagatccgcccagggaagacctcacgggactttgatcgctatcaagaggacccagctttccggccggaccagtcacattgctttgtcattctctatggaatggaatttcgcctgaaaacgctgagcctgcaagccacatctgaggatgaagtgaacatgtggatcaagggcttaacttggctgatggaggatacattgcaggcacccacacccctgcagattgagaggtggctccggaagcagttttactcagtggatcggaatcgtgaggatcgtatatcagccaaggacctgaagaacatgctgtcccaggtcaactaccgggtccccaacatgcgcttcctccgagagcggctgacggacctggagcagcgcagcggggacatcacctacgggcagtttgctcagctgtaccgcagcctcatgtacagcgcccagaagacgatggacctccccttcttggaagccagtactctgagggctggggagcggccggagctttgccgagtgtcccttcctgagttccagcagttccttcttgactaccagggggagctgtgggctgttgatcgcctccaggtgcaggagttcatgctcagcttcctccgagaccccttacgagagatcgaggagccatacttcttcctggatgagtttgtcaccttcctgttctccaaagagaacagtgtgtggaactcgcagctggatgcagtatgcccggacaccatgaacaaccctctttcccactactggatctcctcctcgcacaacacgtacctgaccggggaccagttctccagtgagtcctccttggaagcctatgctcgctgcctgcggatgggctgtcgctgcattgagttggactgctgggacggcccggatgggatgccagttatttaccatgggcacacccttaccaccaagatcaagttctcagatgtcctgcacaccatcaaggagcatgcctttgtggcctcagagtacccagtcatcctgtccattgaggaccactgcagcattgcccagcagagaaacatggcccaatacttcaagaaggtgctgggggacacactcctcaccaagcccgtggagatctctgccgacgggctcccctcacccaaccagcttaagaggaagatcctcatcaagcacaagaagctggctgagggcagtgcctacgaggaggtgcctacatccatgatgtactctgagaacgacatcagcaactctatcaagaatggcatcctctacctggaggaccctgtgaaccacgaatggtatccccactactttgttctgaccagcagcaagatctactactctgaggagaccagcagtgaccagggcaacgaggatgaggaggagcccaaggaggtcagcagcagcacagagctgcactccaatgagaagtggttccatgggaagctaggggcagggcgtgacgggcgtcacatcgctgagcgcctgcttactgagtactgcatcgagaccggagcccctgacggctccttcctcgtgcgagagagtgagaccttcgtgggcgactacacgctctctttctggtaacacttcccatgcagatgcgtatgttcagtc

SEQ ID NO: 424776 - DNA, 1096 bp, Homo sapiens
  misc_feature (27)..(27): n is a, c, g, or t
aaacaattcgggccactgaggatgccntccttcttggctcttggtcccaagcgaataccgcccggggcgtttattataaccgtaccggagtactatacgtctaagtacagctggtgcaatcgacaggcgcggtgtacgcgaccgtgcgagttctctaccctgcttcgcgagcgggcgagagaacgcgagtcccaggatccccggcacccacttctcttccactgcattcccccggcgcgtgtgggaccgaggtggacatggatccgcagaggtcccccctattggaagtaaaggggaacatagaactgaagagacctctgattaaggccccttcccagctgcctctctcaggaagcagactcaagaggaggcctgaccagatggaagatggcctggagcctgagaagaaacggacaagaggcctgggtgcaacgaccaaaattaccacatcccacccaagagttccatccctcactacagtgccacagacacaaggccagaccacagctcaaaaagtttccaagaagacaggaccccggtgttccacagctattgccacagtgtcccagggctatcaaataaagaatagtttggttttttttttaaataaaggttttattagcatttgcccaagaaggcagatactttcatatctgtaaaagtgggagctgtgatctgtaccctctgccaaacgtttacgtgggaggcgggagcgggggctgagggcttcgtcttttctcccctctgctatcaccggttctggaccttggcctggatcatcttcccctctgctaataccccctaccccgtccgtcacatcagggaggtgtgccctctagctatccacgccccctccttggtcactagttataggtaactttcacccttccgccggccaccccagccccagggaagaacgttcctttggtgggtgtcggcaaatggggaccggaccccagagtccagaggcggggctagcgcgcgctcccaaactgttggctctttcctcccgtcccgccctttccctgcctttccgttcgaacggctggggctctgcccgctcgctgcccattggctggctctcggtggcgtcacc

SEQ ID NO: 424777 - DNA, 1430 bp, Homo sapiens
tgggaggctgaggtgggtggatcacgaggtcaggagatcgagaccatcctaacacggtgaaaccccgtctctactaaaaatacaaaaaattcaccgggcgtggtggcgggcgcctgtagtctcagctactttgggagtctgaggcagaatggcttgaacccgggaggtggagcttgcagtgagccgagatcgcgccactgcactccagcctgggcgacagagcaagactccgtctcaacaacaacaacaaaaaaaagagcctccttcagattggtgccagtgtcctttagacagaactctagtagtcttttcagattcaacttgtacatttccttccccagacttcaactgatccattttctaaggagtcctagttcctaaatgggtgttattactattttatctcggtttaagtgttttacagtgggagaggttggaggtctctagtacagggtattgctggaaatgaaagcctcctttctctgctcctgtattttcttctggggcttccatctcttctcaagccttttcacctcctccaaacctagtgtgcagaggagaacaaaccataactggcaccagcctgaaccagcctttggaggccttatttcggtatttctgagggcagccctagcattggaggatgggagatcttgggaaaaatgttgtattggttacgctgcaaacttttatcctgtctaaccccctgcccccaggtgaaccagtgtgttattggtactgctcaggccaacaggaagtgaagacggatccagatctgtgtgtgtgtgtgtgtgtgtgtgtgtgtgtgtgtgtgtgtgtgtgtgtccctatgtctatgtatcgggtgaggggtgggagggttgctggagggtgctttattgggtggagggcaccatgtcccagggctatcaaataaagaatagtttggttttttttttaaataaaggttttattagcatttgcccaagaaggcagatactttcatatctgtaaaagtgggagctgtgatctgtaccctctgccaaacgtttacgtgggaggcgggagcgggggctgagggcttcgtcttttctcccctctgctatcaccggttctggaccttggcctggatcatcttcccctctgctaataccccctaccccgtccgtcacatcagggaggtgtgccctctagctatccacgccccctccttggtcactagttataggtaactttcacccttccgccggccaccccagccccagggaagaacgttcctttggtgggtgtcggcaaatggggaccggaccccagagtccagaggcggggctagcgcgcgctcccaaactgttggctctttcctcccgtcccgccctttccctgcctttccgttcgaacggctggggctctgcccgctcgctgcccattggctggctctcggtggcgtcacc

SEQ ID NO: 424778 - DNA, 1109 bp, Homo sapiens
tgggaggctgaggtgggtggatcacgaggtcaggagatcgagaccatcctaacacggtgaaaccccgtctctactaaaaatacaaaaaattcaccgggcgtggtggcgggcgcctgtagtctcagctactttgggagtctgaggcagaatggcttgaacccgggaggtggagcttgcagtgagccgagatcgcgccactgcactccagcctgggcgacagagcaagactccgtctcaacaacaacaacaaaaaaaagagcctccttcagattggtgccagtgtcctttagacagaactctagtagtcttttcagattcaacttgtacatttccttccccagacttcaactgatccattttctaaggagtcctagttcctaaatgggtgttattactattttatctcggtttaagtgttttacagtgggagaggttggaggtctctagtacagggtattgctggaaatgaaagcctcctttctctgctcctgtattttcttctggggcttccatctcttctcaagccttttcacctcctccaaacctagtgtgcagaggagaacaaaccataacttgtcccagggctatcaaataaagaatagtttggttttttttttaaataaaggttttattagcatttgcccaagaaggcagatactttcatatctgtaaaagtgggagctgtgatctgtaccctctgccaaacgtttacgtgggaggcgggagcgggggctgagggcttcgtcttttctcccctctgctatcaccggttctggaccttggcctggatcatcttcccctctgctaataccccctaccccgtccgtcacatcagggaggtgtgccctctagctatccacgccccctccttggtcactagttataggtaactttcacccttccgccggccaccccagccccagggaagaacgttcctttggtgggtgtcggcaaatggggaccggaccccagagtccagaggcggggctagcgcgcgctcccaaactgttggctctttcctcccgtcccgccctttccctgcctttccgttcgaacggctggggctctgcccgctcgctgcccattggctggctctcggtggcgtcacc

SEQ ID NO: 424779 - DNA, 3141 bp, Homo sapiens
gcggcgacgtccacgcattttctgacgtagcgagcgacggcggggagccgagcggaagtccagcactattgccgctagaggaggggaggggtgagaagcataagtggcaccggaagtggaattaatccgcctacctctcctgcgcctgcgaaacagaaaagacaaggcgcctgtcgggcggggtgtggcttcgggtggcggagaacgctgcgattggccctcggctgtggcgacagcgacgattggtccctgcgtgcagagcgcggtgagagtgggtggtggccgttggaattcaaaagtggcgggtgtggcgcggggctggtagcggccggagccgtgcgagttctctaccctgcttcgcgagcgggcgagagaacgcgagtcccaggatccccggcacccacttctcttccactgcattcccccggcgcgtgtgggaccgaggtggacatggatccgcagaggtcccccctattggaagtaaaggggaacatagaactgaagagacctctgattaaggccccttcccagctgcctctctcaggaagcagactcaagaggaggcctgaccagatggaagatggcctggagcctgagaagaaacggacaagaggcctgggtgcaacgaccaaaattaccacatcccacccaagagttccatccctcactacagtgccacagacacaaggccagaccacagctcaaaaagtttccaagaagacaggaccccggtgttccacagctattgccacagggttgaagaaccagaagccagttcctgctgttcctgtccagaagtctggcacatcaggtgttcctcccatggcaggagggaagaaacccagcaaacgtccagcctgggacttaaagggtcagttatgtgacctaaatgcagaactaaaacggtgccgtgagaggactcaaacgttggaccaagagaaccagcagcttcaggaccagctcagagatgcccagcagcaggtcaaggccctggggacagagcgcacaacactggaggggcatttagccaaggtacaggcccaggctgagcagggccaacaggagctgaagaacttgcgtgcttgtgtcctggagctggaagagcggctgagcacgcaggagggcttggtgcaagagcttcagaaaaaacaggtggaattgcaggaagaacggaggggactgatgtcccaactagaggagaaggagaggaggctgcagacatcagaagcagccctgtcaagcagccaagcagaggtggcatctctgcggcaggagactgtggcccaggcagccttactgactgagcgggaagaacgtcttcatgggctagaaatggagcgccggcgactgcacaaccagctgcaggaactcaagggcaacatccgtgtattctgccgggtccgccctgtcctgccgggggagcccactccaccccctggcctcctcctgtttccctctggccctggtgggccctctgatcctccaacccgccttagcctctcccggtctgacgagcggcgtgggaccctgagtggggcaccagctcccccaactcgccatgatttttcctttgaccgggtattcccaccaggaagtggacaggatgaagtgtttgaagagattgccatgcttgtccagtcagccctggatggctatccagtatgcatctttgcctatggccagacaggcagtggcaagaccttcacaatggagggtgggcctgggggagacccccagttggaggggctgatccctcgggccctgcggcacctcttctctgtggctcaggagctgagtggtcagggctggacctacagctttgtagcaagctacgtagagatctacaatgagactgtccgggacctgctggccactggaacccggaagggtcaagggggcgagtgtgagattcgccgtgcagggccagggagtgaggagctcactgtcaccaatgctcgatatgtccctgtctcctgtgagaaagaagtggacgccctgcttcatctggcccgccagaatcgggctgtggcccgcacagcccagaatgaacggtcatcacgcagccacagtgtattccagctacagatttctggggagcactccagccgaggcctgcagtgtggggcccccctcagtcttgtggacctggccgggagtgagcgacttgaccccggcttagccctcggccccggggagcgggaacgccttcgggaaacacaggccattaacagcagcctgtccacgctggggctggttatcatggccctgagcaacaaggagtcccacgtgccttaccggaacagcaaactgacctacctgctgcagaactctctgggtggtagtgctaagatgctcatgtttgtgaacatttctccactggaagagaacgtctccgagtccctcaactctctacgctttgcctccaaggtgaaccagtgtgttattggtactgctcaggccaacaggaagtgaagacggatccagatctgtgtgtgtgtgtgtgtgtgtgtgtgtgtgtgtgtgtgtgtgtgtgtgtccctatgtctatgtatcgggtgaggggtgggagggttgctggagggtgctttattgggtggagggcaccatgtcccagggctatcaaataaagaatagtttggttttttttttaaataaaggttttattagcatttgcccaagaaggcagatactttcatatctgtaaaagtgggagctgtgatctgtaccctctgccaaacgtttacgtgggaggcgggagcgggggctgagggcttcgtcttttctcccctctgctatcaccggttctggaccttggcctggatcatcttcccctctgctaataccccctaccccgtccgtcacatcagggaggtgtgccctctagctatccacgccccctccttggtcactagttataggtaactttcacccttccgccggccaccccagccccagggaagaacgttcctttggtgggtgtcggcaaatggggaccggaccccagagtccagaggcggggctagcgcgcgctcccaaactgttggctctttcctcccgtcccgccctttccctgcctttccgttcgaacggctggggctctgcccgctcgctgcccattggctggctctcggtggcgtcacc

SEQ ID NO: 424780 - DNA, 2738 bp, Homo sapiens
gcggcgacgtccacgcattttctgacgtagcgagcgacggcggggagccgagcggaagtccagcactattgccgctagaggaggggaggggtgagaagcataagtggcaccggaagtggaattaatccgcctacctctcctgcgcctgcgaaacagaaaagacaaggcgcctgtcgggcggggtgtggcttcgggtggcggagaacgctgcgattggccctcggctgtggcgacagcgacgattggtccctgcgtgcagagcgcggtgagagtgggtggtggccgttggaattcaaaagtggcgggtgtggcgcggggctggtagcggccggagccgtgcgagttctctaccctgcttcgcgagcgggcgagagaacgcgagtcccaggatccccggcacccacttctcttccactgcattcccccggcgcgtgtgggaccgaggtggacatggatccgcagaggtcccccctattggaagtaaaggggaacatagaactgaagagacctctgattaaggccccttcccagctgcctctctcaggaagcagactcaagaggaggcctgaccagatggaagatggcctggagcctgagaagaaacggacaagaggcctgggtgcaacgaccaaaattaccacatcccacccaagagttccatccctcactacagtgccacagacacaaggccagaccacagctcaaaaagtttccaagaagacaggaccccggtgttccacagctattgccacagggttgaagaaccagaagccagttcctgctgttcctgtccagaagtctggcacatcaggtgttcctcccatggcaggagggaagaaacccagcaaacgtccagcctgggacttaaagggtcagttatgtgacctaaatgcagaactaaaacggtgccgtgagaggactcaaacgttggaccaagagaaccagcagcttcaggaccagctcagagatgcccagcagcaggtcaaggccctggggacagagcgcacaacactggaggggcatttagccaaggtacaggcccaggctgagcagggccaacaggagctgaagaacttgcgtgcttgtgtcctggagctggaagagcggctgagcacgcaggagggcttggtgcaagagcttcagaaaaaacaggtggaattgcaggaagaacggaggggactgatgtcccaactagaggagaaggagaggaggctgcagacatcagaagcagccctgtcaagcagccaagcagaggtggcatctctgcggcaggagactgtggcccaggcagccttactgactgagcgggaagaacgtcttcatgggctagaaatggagcgccggcgactgcacaaccagctgcaggaactcaagggcaacatccgtgtattctgccgggtccgccctgtcctgccgggggagcccactccaccccctggcctcctcctgtttccctctggccctggtgggccctctgatcctccaacccgccttagcctctcccggtctgacgagcggcgtgggaccctgagtggggcaccagctcccccaactcgccatgatttttcctttgaccgggtattcccaccaggaagtggacaggatgaagtgtttgaagagattgccatgcttgtccagtcagccctggatggctatccagtatgcatctttgcctatggccagacaggcagtggcaagaccttcacaatggagggtgggcctgggggagacccccagttggaggggctgatccctcgggccctgcggcacctcttctctgtggctcaggagctgagtggtcagggctggacctacagctttgtagcaagctacgtagagatctacaatgagactgtccgggacctgctggccactggaacccggaagggtcaagggggcgagtgtgagattcgccgtgcagggccagggagtgaggagctcactgtcaccaatgctcgatatgtccctgtctcctgtgagaaagaagtggacgccctgcttcatctggcccgccagaatcgggctgtggcccgcacagcccagaatgaacggtcatcacgcagccacagtgtattccagctacagatttctggggagcactccagccgaggcctgcagtgtggggcccccctcagtcttgtggacctggccgggagtgagcgacttgaccccggcttagccctcggccccggggagcgggaacgccttcgggaaacacaggccattaacagcagcctgtccacgctggggctggttatcatggccctgagcaacaaggagtcccacgtgccttaccggaacagcaaactgacctacctgctgcagaactctctgggtggtagtgctaagatgctcatgtttgtgaacatttctccactggaagagaacgtctccgagtccctcaactctctacgctttgcctccaaggtgaaccagtgtgttattggtactgctcaggccaacaggaagtgaagacggatccagatctgtgtgtgtgtgtgtgtgtgtgtgtgtgtgtgtgtgtgtgtgtgtgtgtgtgtgtgtgtgtgtgtgtgtgtgtctctctctctctctctcgcggggggtgtgtgggtcgcgcgcgcgcgtgcggtgggggggctctttgctgagaggagtcgtcacatatacgagacgtgtggcttgcagaatagactgtagtagtgttttagtgcagtggtgacggcagaagaagcagcataccatattattagtgtagt

SEQ ID NO: 424781 - DNA, 2847 bp, Homo sapiens
acaactacggctaggtacgaggctggcgggtgtggcgcggggctggtagcggccggagccgtgcgagttctctaccctgcttcgcgagcgggcgagagaacgcgagtcccaggatccccggcacccacttctcttccactgcattcccccggcgcgtgtgggaccgaggtggacatggatccgcagaggtcccccctattggaagtaaaggggaacatagaactgaagagacctctgattaaggccccttcccagctgcctctctcaggaagcagactcaagaggaggcctgaccagatggaagatggcctggagcctgagaagaaacggacaagaggcctgggtgcaacgaccaaaattaccacatcccacccaagagttccatccctcactacagtgccacagacacaaggccagaccacagctcaaaaagtttccaagaagacaggaccccggtgttccacagctattgccacagggttgaagaaccagaagccagttcctgctgttcctgtccagaagtctggcacatcaggtgttcctcccatggcaggagggaagaaacccagcaaacgtccagcctgggacttaaagggtcagttatgtgacctaaatgcagaactaaaacggtgccgtgagaggactcaaacgttggaccaagagaaccagcagcttcaggaccagctcagagatgcccagcagcaggtcaaggccctggggacagagcgcacaacactggaggggcatttagccaaggtacaggcccaggctgagcagggccaacaggagctgaagaacttgcgtgcttgtgtcctggagctggaagagcggctgagcacgcaggagggcttggtgcaagagcttcagaaaaaacaggtggaattgcaggaagaacggaggggactgatgtcccaactagaggagaaggagaggaggctgcagacatcagaagcagccctgtcaagcagccaagcagaggtggcatctctgcggcaggagactgtggcccaggcagccttactgactgagcgggaagaacgtcttcatgggctagaaatggagcgccggcgactgcacaaccagctgcaggaactcaagggcaacatccgtgtattctgccgggtccgccctgtcctgccgggggagcccactccaccccctggcctcctcctgtttccctctggccctggtgggccctctgatcctccaacccgccttagcctctcccggtctgacgagcggcgtgggaccctgagtggggcaccagctcccccaactcgccatgatttttcctttgaccgggtattcccaccaggaagtggacaggatgaagtgtttgaagagattgccatgcttgtccagtcagccctggatggctatccagtatgcatctttgcctatggccagacaggcagtggcaagaccttcacaatggagggtgggcctgggggagacccccagttggaggggctgatccctcgggccctgcggcacctcttctctgtggctcaggagctgagtggtcagggctggacctacagctttgtagcaagctacgtagagatctacaatgagactgtccgggacctgctggccactggaacccggaagggtcaagggggcgagtgtgagattcgccgtgcagggccagggagtgaggagctcactgtcaccaatgctcgatatgtccctgtctcctgtgagaaagaagtggacgccctgcttcatctggcccgccagaatcgggctgtggcccgcacagcccagaatgaacggtcatcacgcagccacagtgtattccagctacagatttctggggagcactccagccgaggcctgcagtgtggggcccccctcagtcttgtggacctggccgggagtgagcgacttgaccccggcttagccctcggccccggggagcgggaacgccttcgggaaacacaggccattaacagcagcctgtccacgctggggctggttatcatggccctgagcaacaaggagtcccacgtgccttaccggaacagcaaactgacctacctgctgcagaactctctgggtggtagtgctaagatgctcatgtttgtgaacatttctccactggaagagaacgtctccgagtccctcaactctctacgctttgcctccaaggtgaaccagtgtgttattggtactgctcaggccaacaggaagtgaagacggatccagatctgtgtgtgtgtgtgtgtgtgtgtgtgtgtgtccctatgtctatgtatcgggtgaggggtgggagggttgctggagggtgctttattgggtggagggcaccatgtcccagggctatcaaataaagaatagtttggttttttttttaaataaaggttttattagcatttgcccaagaaggcagatactttcatatctgtaaaagtgggagctgtgatctgtaccctctgccaaacgtttacgtgggaggcgggagcgggggctgagggcttcgtcttttctcccctctgctatcaccggttctggaccttggcctggatcatcttcccctctgctaataccccctaccccgtccgtcacatcagggaggtgtgccctctagctatccacgccccctccttggtcactagttataggtaactttcacccttccgccggccaccccagccccagggaagaacgttcctttggtgggtgtcggcaaatggggaccggaccccagagtccagaggcggggctagcgcgcgctcccaaactgttggctctttcctcccgtcccgccctttccctgcctttccgttcgaacggctggggctctgcccgctcgctgcccattggctggctctcggtggcgtcacc

SEQ ID NO: 424782 - DNA, 2852 bp, Homo sapiens
actgttgatgtcatctatgatgtcatgagggtggtggccatcaacattacagcccatagactgggcagtccccggaatctctttaatggttccagagagttctctggctaaggatcggtgccgcatctgtcgagcaatgttgacgatctcatcaaaagtgatattcccattgtgtttaatgtttttctgtttctttctgtctcttggtggtttcttgagggctttgatgatcggggcagaggcagaaggcaccacctcaatctgggcctgtctgttctcaatggtcagtttcactgtaatcctcaggcccttccagtcacccgttgccttggcaatgtcatcaccaaccttttttggagacagacccagggggccgatcttgggggccagggcagaagtggcaccgacttcacctctggtgcacctcagctcaaaaagtttccaagaagacaggaccccggtgttccacagctattgccacagggttgaagaaccagaagccagttcctgctgttcctgtccagaagtctggcacatcaggtgttcctcccatggcaggagggaagaaacccagcaaacgtccagcctgggacttaaagggtcagttatgtgacctaaatgcagaactaaaacggtgccgtgagaggactcaaacgttggaccaagagaaccagcagcttcaggaccagctcagagatgcccagcagcaggtcaaggccctggggacagagcgcacaacactggaggggcatttagccaaggtacaggcccaggctgagcagggccaacaggagctgaagaacttgcgtgcttgtgtcctggagctggaagagcggctgagcacgcaggagggcttggtgcaagagcttcagaaaaaacaggtggaattgcaggaagaacggaggggactgatgtcccaactagaggagaaggagaggaggctgcagacatcagaagcagccctgtcaagcagccaagcagaggtggcatctctgcggcaggagactgtggcccaggcagccttactgactgagcgggaagaacgtcttcatgggctagaaatggagcgccggcgactgcacaaccagctgcaggaactcaagggcaacatccgtgtattctgccgggtccgccctgtcctgccgggggagcccactccaccccctggcctcctcctgtttccctctggccctggtgggccctctgatcctccaacccgccttagcctctcccggtctgacgagcggcgtgggaccctgagtggggcaccagctcccccaactcgccatgatttttcctttgaccgggtattcccaccaggaagtggacaggatgaagtgtttgaagagattgccatgcttgtccagtcagccctggatggctatccagtatgcatctttgcctatggccagacaggcagtggcaagaccttcacaatggagggtgggcctgggggagacccccagttggaggggctgatccctcgggccctgcggcacctcttctctgtggctcaggagctgagtggtcagggctggacctacagctttgtagcaagctacgtagagatctacaatgagactgtccgggacctgctggccactggaacccggaagggtcaagggggcgagtgtgagattcgccgtgcagggccagggagtgaggagctcactgtcaccaatgctcgatatgtccctgtctcctgtgagaaagaagtggacgccctgcttcatctggcccgccagaatcgggctgtggcccgcacagcccagaatgaacggtcatcacgcagccacagtgtattccagctacagatttctggggagcactccagccgaggcctgcagtgtggggcccccctcagtcttgtggacctggccgggagtgagcgacttgaccccggcttagccctcggccccggggagcgggaacgccttcgggaaacacaggccattaacagcagcctgtccacgctggggctggttatcatggccctgagcaacaaggagtcccacgtgccttaccggaacagcaaactgacctacctgctgcagaactctctgggtggtagtgctaagatgctcatgtttgtgaacatttctccactggaagagaacgtctccgagtccctcaactctctacgctttgcctccaaggtgaaccagtgtgttattggtactgctcaggccaacaggaagtgaagacggatccagatctgtgtgtgtgtgtgtgtgtgtgtgtgtgtgtccctatgtctatgtatcgggtgaggggtgggagggttgctggagggtgctttattgggtggagggcaccatgtcccagggctatcaaataaagaatagtttggttttttttttaaataaaggttttattagcatttgcccaagaaggcagatactttcatatctgtaaaagtgggagctgtgatctgtaccctctgccaaacgtttacgtgggaggcgggagcgggggctgagggcttcgtcttttctcccctctgctatcaccggttctggaccttggcctggatcatcttcccctctgctaataccccctaccccgtccgtcacatcagggaggtgtgccctctagctatccacgccccctccttggtcactagttataggtaactttcacccttccgccggccaccccagccccagggaagaacgttcctttggtgggtgtcggcaaatggggaccggaccccagagtccagaggcggggctagcgcgcgctcccaaactgttggctctttcctcccgtcccgccctttccctgcctttccgttcgaacggctggggctctgcccgctcgctgcccattggctggctctcggtggcgtcacc

SEQ ID NO: 424783 - DNA, 1289 bp, Homo sapiens
gcggcgacgtccacgcattttctgacgtagcgagcgacggcggggagccgagcggaagtccagcactattgccgctagaggaggggaggggtgagaagcataagtggcaccggaagtggaattaatccgcctacctctcctgcgcctgcgaaacagaaaagacaaggcgcctgtcgggcggggtgtggcttcgggtggcggagaacgctgcgattggccctcggctgtggcgacagcgacgattggtccctgcgtgcagagcgcggtgagagtgggtggtggccgttggaattcaaaagtggcgggtgtggcgcggggctggtagcggccggagccgtgcgagttctctaccctgcttcgcgagcgggcgagagaacgcgagtcccaggatccccggcacccacttctcttccactgcattcccccggcgcgtgtgggaccgaggtggacatggatccgcagaggtcccccctattggaagtaaaggggaacatagaactgaagagacctctgattaaggccccttcccagctgcctctctcaggaagcagactcaagaggaggcctgaccagatggaagatggcctggagcctgagaagaaacggacaagaggcctgggtgcaacgaccaaaattaccacatcccacccaagagttccatccctcactacagtgccacagacacaaggccagaccacagctcaaaaagtttccaagaagacaggaccccggtgttccacagctattgccacagtgtcccagggctatcaaataaagaatagtttggttttttttttaaataaaggttttattagcatttgcccaagaaggcagatactttcatatctgtaaaagtgggagctgtgatctgtaccctctgccaaacgtttacgtgggaggcgggagcgggggctgagggcttcgtcttttctcccctctgctatcaccggttctggaccttggcctggatcatcttcccctctgctaataccccctaccccgtccgtcacatcagggaggtgtgccctctagctatccacgccccctccttggtcactagttataggtaactttcacccttccgccggccaccccagccccagggaagaacgttcctttggtgggtgtcggcaaatggggaccggaccccagagtccagaggcggggctagcgcgcgctcccaaactgttggctctttcctcccgtcccgccctttccctgcctttccgttcgaacggctggggctctgcccgctcgctgcccattggctggctctcggtggcgtcacc

SEQ ID NO: 424784 - DNA, 246 bp, Homo sapiens
ggtcaagggggcgagtgtgagattcgccgtgcagggccagggagtgaggagctcactgtcaccaatgctcgatatgtccctgtctcctgtgagaaagaagtgaggacccatgggcactggaactgggaaatggggaggagtgggcagggtgccacgagatggaggtagagggagaaaggagcaagagagaattgaaggatgaagtgcaagttatcaggctgggttaccacatccggttttggcctg

SEQ ID NO: 424785 - DNA, 3123 bp, Homo sapiens
gcggcgacgtccacgcattttctgacgtagcgagcgacggcggggagccgagcggaagtccagcactattgccgctagaggaggggaggggtgagaagcataagtggcaccggaagtggaattaatccgcctacctctcctgcgcctgcgaaacagaaaagacaaggcgcctgtcgggcggggtgtggcttcgggtggcggagaacgctgcgattggccctcggctgtggcgacagcgacgattggtccctgcgtgcagagcgcggtgagagtgggtggtggccgttggaattcaaaagtggcgggtgtggcgcggggctggtagcggccggagccgtgcgagttctctaccctgcttcgcgagcgggcgagagaacgcgagtcccaggatccccggcacccacttctcttccactgcattcccccggcgcgtgtgggaccgaggtggacatggatccgcagaggtcccccctattggaagtaaaggggaacatagaactgaagagacctctgattaaggccccttcccagctgcctctctcaggaagcagactcaagaggaggcctgaccagatggaagatggcctggagcctgagaagaaacggacaagaggcctgggtgcaacgaccaaaattaccacatcccacccaagagttccatccctcactacagtgccacagacacaaggccagaccacagctcaaaaagtttccaagaagacaggaccccggtgttccacagctattgccacagggttgaagaaccagaagccagttcctgctgttcctgtccagaagtctggcacatcaggtgttcctcccatggcaggagggaagaaacccagcaaacgtccagcctgggacttaaagggtcagttatgtgacctaaatgcagaactaaaacggtgccgtgagaggactcaaacgttggaccaagagaaccagcagcttcaggaccagctcagagatgcccagcagcaggtcaaggccctggggacagagcgcacaacactggaggggcatttagccaaggtacaggcccaggctgagcagggccaacaggagctgaagaacttgcgtgcttgtgtcctggagctggaagagcggctgagcacgcaggagggcttggtgcaagagcttcagaaaaaacaggtggaattgcaggaagaacggaggggactgatgtcccaactagaggagaaggagaggaggctgcagacatcagaagcagccctgtcaagcagccaagcagaggtggcatctctgcggcaggagactgtggcccaggcagccttactgactgagcgggaagaacgtcttcatgggctagaaatggagcgccggcgactgcacaaccagctgcaggaactcaagggcaacatccgtgtattctgccgggtccgccctgtcctgccgggggagcccactccaccccctggcctcctcctgtttccctctggccctggtgggccctctgatcctccaacccgccttagcctctcccggtctgacgagcggcgtgggaccctgagtggggcaccagctcccccaactcgccatgatttttcctttgaccgggtattcccaccaggaagtggacaggatgaagtgtttgaagagattgccatgcttgtccagtcagccctggatggctatccagtatgcatctttgcctatggccagacaggcagtggcaagaccttcacaatggagggtgggcctgggggagacccccagttggaggggctgatccctcgggccctgcggcacctcttctctgtggctcaggagctgagtggtcagggctggacctacagctttgtagcaagctacgtagagatctacaatgagactgtccgggacctgctggccactggaacccggaagggtcaagggggcgagtgtgagattcgccgtgcagggccagggagtgaggagctcactgtcaccaatgctcgatatgtccctgtctcctgtgagaaagaagtggacgccctgcttcatctggcccgccagaatcgggctgtggcccgcacagcccagaatgaacggtcatcacgcagccacagtgtattccagctacagatttctggggagcactccagccgaggcctgcagtgtggggcccccctcagtcttgtggacctggccgggagtgagcgacttgaccccggcttagccctcggccccggggagcgggaacgccttcgggaaacacaggccattaacagcagcctgtccacgctggggctggttatcatggccctgagcaacaaggagtcccacgtgccttaccggaacagcaaactgacctacctgctgcagaactctctgggtggtagtgctaagatgctcatgtttgtgaacatttctccactggaagagaacgtctccgagtccctcaactctctacgctttgcctccaaggtgaaccagtgtgttattggtactgctcaggccaacaggaagtgaagacggatccagatctgtgtgtgtgtgtgtgtgtgtgtgtgtgtgtccctatgtctatgtatcgggtgaggggtgggagggttgctggagggtgctttattgggtggagggcaccatgtcccagggctatcaaataaagaatagtttggttttttttttaaataaaggttttattagcatttgcccaagaaggcagatactttcatatctgtaaaagtgggagctgtgatctgtaccctctgccaaacgtttacgtgggaggcgggagcgggggctgagggcttcgtcttttctcccctctgctatcaccggttctggaccttggcctggatcatcttcccctctgctaataccccctaccccgtccgtcacatcagggaggtgtgccctctagctatccacgccccctccttggtcactagttataggtaactttcacccttccgccggccaccccagccccagggaagaacgttcctttggtgggtgtcggcaaatggggaccggaccccagagtccagaggcggggctagcgcgcgctcccaaactgttggctctttcctcccgtcccgccctttccctgcctttccgttcgaacggctggggctctgcccgctcgctgcccattggctggctctcggtggcgtcacc

SEQ ID NO: 424786 - DNA, 2642 bp, Homo sapiens
gcggcgacgtccacgcattttctgacgtagcgagcgacggcggggagccgagcggaagtccagcactattgccgctagaggaggggaggggtgagaagcataagtggcaccggaagtggaattaatccgcctacctctcctgcgcctgcgaaacagaaaagacaaggcgcctgtcgggcggggtgtggcttcgggtggcggagaacgctgcgattggccctcggctgtggcgacagcgacgattggtccctgcgtgcagagcgcggtgagagtgggtggtggccgttggaattcaaaagtggcgggtgtggcgcggggctggtagcggccggagccgtgcgagttctctaccctgcttcgcgagcgggcgagagaacgcgagtcccaggatccccggcacccacttctcttccactgcattcccccggcgcgtgtgggaccgaggtggacatggatccgcagaggtcccccctattggaagtaaaggggaacatagaactgaagagacctctgattaaggccccttcccagctgcctctctcaggaagcagactcaagaggaggcctgaccagatggaagatggcctggagcctgagaagaaacggacaagaggcctgggtgcaacgaccaaaattaccacatcccacccaagagttccatccctcactacagtgccacagacacaaggccagaccacagctcaaaaagtttccaagaagacaggaccccggtgttccacagctattgccacagggttgaagaaccagaagccagttcctgctgttcctgtccagaagtctggcacatcaggtgttcctcccatggcaggagggaagaaacccagcaaacgtccagcctgggacttaaagggtcagttatgtgacctaaatgcagaactaaaacggtgccgtgagaggactcaaacgttggaccaagagaaccagcagcttcaggaccagctcagagatgcccagcagcaggtcaaggccctggggacagagcgcacaacactggaggggcatttagccaaggtacaggcccaggctgagcagggccaacaggagctgaagaacttgcgtgcttgtgtcctggagctggaagagcggctgagcacgcaggagggcttggtgcaagagcttcagaaaaaacaggtggaattgcaggaagaacggaggggactgatgtcccaactagaggagaaggagaggaggctgcagacatcagaagcagccctgtcaagcagccaagcagaggtggcatctctgcggcaggagactgtggcccaggcagccttactgactgagcgggaagaacgtcttcatgggctagaaatggagcgccggcgactgcacaaccagctgcaggaactcaagggcaacatccgtgtattctgccgggtccgccctgtcctgccgggggagcccactccaccccctggcctcctcctgtttccctctggccctggtgggccctctgatcctccaacccgccttagcctctcccggtctgacgagcggcgtgggaccctgagtggggcaccagctcccccaactcgccatgatttttcctttgaccgggtattcccaccaggaagtggacaggatgaagtgtttgaagagattgccatgcttgtccagtcagccctggatggctatccagtatgcatctttgcctatggccagacaggcagtggcaagaccttcacaatggagggtgggcctgggggagacccccagttggaggggctgatccctcgggccctgcggcacctcttctctgtggctcaggagctgagtggtcagggctggacctacagctttgtagcaagctacgtagagatctacaatgagactgtccgggacctgctggccactggaacccggaagggtcaagggggcgagtgtgagattcgccgtgcagggccagggagtgaggagctcactgtcaccaatgctcgatatgtccctgtctcctgtgagaaagaagtggacgccctgcttcatctggcccgccagaatcgggctgtggcccgcacagcccagaatgaacggtcatcacgcagccacagtgtattccagctacagatttctggggagcactccagccgaggcctgcagtgtggggcccccctcagtcttgtggacctggccgggagtgagcgacttgaccccggcttagccctcggccccggggagcgggaacgccttcgggaaacacaggccattaacagcagcctgtccacgctggggctggttatcatggccctgagcaacaaggagtcccacgtgccttaccggaacagcaaactgacctacctgctgcagaactctctgggtggtagtgctaagatgctcatgtttgtgaacatttctccactggaagagaacgtctccgagtccctcaactctctacgctttgcctccaaggtgcgattaccacccgtcagccttgtcaggacccgtgggtggttgtaggcttctccattccaatcccttttgtcttctagggcagggagcacatttgtgcagaaaggttttgcaggtatctgaggcactgctcacctggttccatttttaattattagcttttgagttaagttttttaaaaaacgggtgattaatttaacctgagaaagctgatt

SEQ ID NO: 424787 - DNA, 955 bp, Homo sapiens
acaactacggctaggtacgaggctggcgggtgtggcgcggggctggtagcggccggagccgtgcgagttctctaccctgcttcgcgagcgggcgagagaacgcgagtcccaggatccccggcacccacttctcttccactgcattcccccggcgcgtgtgggaccgaggtggacatggatccgcagaggtcccccctattggaagtaaaggggaacatagaactgaagagacctctgattaaggccccttcccagctgcctctctcaggaagcagactcaagaggaggcctgaccagatggaagatggcctggagcctgagaagaaacggacaagaggcctgggtgcaacgaccaaaattaccacatcccacccaagagttccatccctcactacagtgccacagacacaaggccagaccacagctcaaaaagtttccaagaagacaggaccccggtgttccacagctattgccacagggttgaagaaccagaagccagttcctgctgttcctgtccagaagtctggcacatcaggtgttcctcccatggcaggagggaagaaacccagcaaacgtccagcctgggacttaaagggtcagttatgtgacctaaatgcagaactaaaacggtgccgtgagaggactcaaacgttggaccaagagaaccagcagcttcaggaccagctcagagatgcccagcagcaggtcaaggccctggggacagagcgcacaacactggaggggcatttagccaaggtacaggcccaggctgagcagggccaacaggagctgaagaacttgcgtgcttgtgtcctggagctggaagagcggctgagcacgcaggagggcttggtgcaagagcttcagaaaaaacaggtggaattgcaggaagcaggcagaagcaggaagcaagggtcttggtgaggggcagaagcaggaagcagaaaagttacca

SEQ ID NO: 424788 - DNA, 2581 bp, Homo sapiens
agggtctcttttcccaacagaggtcccccctattggaagtaaaggggaacatagaactgaagagacctctgattaaggccccttcccagctgcctctctcaggaagcagactcaagaggaggcctgaccagatggaagatggcctggagcctgagaagctcaaaaagtttccaagaagacaggaccccggtgttccacagctattgccacagggttgaagaaccagaagccagttcctgctgttcctgtccagaagtctggcacatcaggtgttcctcccatggcaggagggaagaaacccagcaaacgtccagcctgggacttaaagggtcagttatgtgacctaaatgcagaactaaaacggtgccgtgagaggactcaaacgttggaccaagagaaccagcagcttcaggaccagctcagagatgcccagcagcaggtcaaggccctggggacagagcgcacaacactggaggggcatttagccaaggtacaggcccaggctgagcagggccaacaggagctgaagaacttgcgtgcttgtgtcctggagctggaagagcggctgagcacgcaggagggcttggtgcaagagcttcagaaaaaacaggtggaattgcaggaagaacggaggggactgatgtcccaactagaggagaaggagaggaggctgcagacatcagaagcagccctgtcaagcagccaagcagaggtggcatctctgcggcaggagactgtggcccaggcagccttactgactgagcgggaagaacgtcttcatgggctagaaatggagcgccggcgactgcacaaccagctgcaggaactcaagggcaacatccgtgtattctgccgggtccgccctgtcctgccgggggagcccactccaccccctggcctcctcctgtttccctctggccctggtgggccctctgatcctccaacccgccttagcctctcccggtctgacgagcggcgtgggaccctgagtggggcaccagctcccccaactcgccatgatttttcctttgaccgggtattcccaccaggaagtggacaggatgaagtgtttgaagagattgccatgcttgtccagtcagccctggatggctatccagtatgcatctttgcctatggccagacaggcagtggcaagaccttcacaatggagggtgggcctgggggagacccccagttggaggggctgatccctcgggccctgcggcacctcttctctgtggctcaggagctgagtggtcagggctggacctacagctttgtagcaagctacgtagagatctacaatgagactgtccgggacctgctggccactggaacccggaagggtcaagggggcgagtgtgagattcgccgtgcagggccagggagtgaggagctcactgtcaccaatgctcgatatgtccctgtctcctgtgagaaagaagtggacgccctgcttcatctggcccgccagaatcgggctgtggcccgcacagcccagaatgaacggtcatcacgcagccacagtgtattccagctacagatttctggggagcactccagccgaggcctgcagtgtggggcccccctcagtcttgtggacctggccgggagtgagcgacttgaccccggcttagccctcggccccggggagcgggaacgccttcgggaaacacaggccattaacagcagcctgtccacgctggggctggttatcatggccctgagcaacaaggagtcccacgtgccttaccggaacagcaaactgacctacctgctgcagaactctctgggtggtagtgctaagatgctcatgtttgtgaacatttctccactggaagagaacgtctccgagtccctcaactctctacgctttgcctccaaggtgaaccagtgtgttattggtactgctcaggccaacaggaagtgaagacggatccagatctgtgtgtgtgtgtgtgtgtgtgtgtgtgtgtccctatgtctatgtatcgggtgaggggtgggagggttgctggagggtgctttattgggtggagggcaccatgtcccagggctatcaaataaagaatagtttggttttttttttaaataaaggttttattagcatttgcccaagaaggcagatactttcatatctgtaaaagtgggagctgtgatctgtaccctctgccaaacgtttacgtgggaggcgggagcgggggctgagggcttcgtcttttctcccctctgctatcaccggttctggaccttggcctggatcatcttcccctctgctaataccccctaccccgtccgtcacatcagggaggtgtgccctctagctatccacgccccctccttggtcactagttataggtaactttcacccttccgccggccaccccagccccagggaagaacgttcctttggtgggtgtcggcaaatggggaccggaccccagagtccagaggcggggctagcgcgcgctcccaaactgttggctctttcctcccgtcccgccctttccctgcctttccgttcgaacggctggggctctgcccgctcgctgcccattggctggctctcggtggcgtcacc

SEQ ID NO: 424789 - DNA, 546 bp, Homo sapiens
aagagaaccagcagcttcaggaccagctcagagatgcccagcagcaggtcaaggccctggggacagagcgcacaacactggaggggcatttagccaaggtacaggcccaggctgagcagggccaacaggagctgaagaacttgcgtgcttgtgtcctggagctggaagagcggctgagcacgcaggagggcttggtgcaagagcttcagaaaaaacaggtggaattgcaggaagaacggaggggactgatgtcccaactagaggagaaggaggtaagggccagattttcaccagatgtcagccccgctttcctggcagaggtcatgcctcccctcccttccaggtacccctcaagtctgggctgagaactcctgagcacctatctttagcagtataggtgctgctgaagatacctctctcttgacctgtctgcaccccagcccactcctgactgtcttgctttctgccacgcttcttcctacccttgactgtttgcaaagctctcatttagatctgtgtctttcttagtcctccatccctctttct

SEQ ID NO: 424790 - DNA, 1586 bp, Homo sapiens
ttttttttttttggtaaggattttttccccctttataagtttttgtttccatatgggaggaggggagggagcctctgggtcacccagaatgaggggccttcccaaaacacaacaccccacctctctgctttcagttctagatctgagggaagccatgggagtagaggtagcagaggcgtctgagctgaaatggggcatttggagcaaggaccccagagttcccagatcttctcagctactctcctcccactggagctgtccctcctaggtgggaatgttcactcttttgttgtcaggttgtatgggggggcagggacagtgctgctgggaaggatgccagctctgggattgggccagtcctgtgggcaagacttgcaagaggctggatcaacttggtgtggtatctctgatggcttagagtaatggcaatgagggtctctgttgtgatgtcactgagtactttctggggtgcttctgggcaccccttatgatgtcacaggaagcagttcctcagaggttacttcctgtgaacataagggagcaggtacttcctgtgatgtctcaatgagttcttccttgaaggtcactttggtgatatcatgggaaggtgtacttccggtgatgcctagaggtcacgtcctgtgatgtcattaggctgaagcatgtacttcctgtattggacagtgaccagtctctgacctgccttctccctccacacccttctttggtgggtgttggcctgggggtcttcctaggaagagaataaggcacgggacttggatccaatctggaggactctaacggaaaaaaaccaatattgtcagggtcatctccattcaaacacgtcaagtctgcgaactcgccctggagggaggggtgggagatggacctagtgcaaactactgttaaagacctcccttcccacccctgccttttgtgtgcatgcctgtgtctgcgtggctttgtttcattgaatcgggtgagccaagtgtgtggtggctctgtcaggccagtatggccaggtgtagagttcagtgagccatagtagggtcccttgggccagaatgcttcgtgtggtctgataggttagattggtttggtggcttccagcaagctggcatacttcggtgatgtctgatggatcagaatgttttggtgtgctcaccaggggctctggagaactagaatgttctgatggagtctgacaagccaggcggccttgagagttggtttaggagtggctccctgagtgctgtggctgtggtcagctctaaggacctgttggcagactgagatttcagggcctgacaaccatgtagactaggatagctgagacctccctctacccccacccatctccctctcttccttggagaccacctccactttctccaacccaaagcagggcgcccagtgccctggttccatcatcagcatctctgggggaggggcgccccatgcccaccctctcccccatttgtccgcctcctaggtcttccaaacccttttcttctctatgactttgggggaaatccagcctccttgtctctctcctaaaaaaggagggaagaaaagccacagagaca

SEQ ID NO: 424791 - DNA, 725 bp, Homo sapiens
cctggtggcgaattcggcacgaggcacttccggcggtctacgcgaggaagatggctgcatcccagcagcaagcttcagcggcttcctcagctgctggtgtatcgggtcctagttcggctggcggcccgggtccccagcagcagccgcaaccgccagcacaactggtgggccctgcccagagcggcctcctgcagcaacagcaacaggacttcgatcctgtgcagcgttataagatgctcatcccgcagctgaaggagagtctacagaccttgatgaaggttgcggcccaaaacttgattcagaacactaacatcgacaatggacaaaagagcagtgatggacccatacagcgctttgacaagtgcctggaagagttctatgcactctgtgaccagctggagctgtgcctgcgcctggcgcatgagtgcctgtcacagagttgtgacagtgccaagcactctccaacgttggtgcccacagccaccaagcccgacgcagtgcagcctgacagcctcccctacccacagtacctggcggtcatcaaagcccagatttcctgtgccaaggacattcacaccgccctgctggactgtgccaacaaggtcacgggcaagacacccgcaccacctgctggccctgggggcactctgtgaagtgggggacagggagtggggcaggcagtggttggtgggtggtgtgcaaagggaatgaagagcgtcctgggc

SEQ ID NO: 424792 - DNA, 3514 bp, Homo sapiens
cggccgctcgcgatctagaactagtcacttccggcggtctacgcgaggaagatggctgcatcccagcagcaagcttcagcggcttcctcagctgctggtgtatcgggtcctagttcggctggcggcccgggtccccagcagcagccgcaaccgccagcacaactggtgggccctgcccagagcggcctcctgcagcaacagcaacaggacttcgatcctgtgcagcgttataagatgctcatcccgcagctgaaggagagtctacagaccttgatgaaggttgcggcccaaaacttgattcagaacactaacatcgacaatggacaaaagagcagtgatggacccatacagcgctttgacaagtgcctggaagagttctatgcactctgtgaccagctggagctgtgcctgcgcctggcgcatgagtgcctgtcacagagttgtgacagtgccaagcactctccaacgttggtgcccacagccaccaagcccgacgcagtgcagcctgacagcctcccctacccacagtacctggcggtcatcaaagcccagatttcctgtgccaaggacattcacaccgccctgctggactgtgccaacaaggtcacgggcaagacacccgcaccacctgctggccctgggggcactctgtgaagtgggggacagggagtggggcaggcagtggttggtgggtggtgtgcaaagggaatgaagagcgtcctgggcctaaacacagcagcctcctctcttcctgcctgagcaccgcagcgggagccagcagggggcagcagaggccaacagggagctcgcaggccgggcccctgcgtccctgccccttcttcctgctccccctcctagcctagggtagactttgaactgtgtgtgttgatgacttctctgttccacaggccctcccccattcttgcctgggtgtggagccctggctgtcccctctccctcagtccttcctgactgtctccagctgggaggtggtctctgtgtgccactcctctgtgtctctattacagttgtgtctctctcatcctgtctctttttcccttgtttctctgttcctgttaatgtgtttctccccatggtcctatttctctcactctgacctctctctcttagtcccctttagctgtcttctatccccagctcctaactgggactctgtgtctatgcagggggccagcacccctgggttatctggggctaagggaagggacttcatttccaggggccacagccaagcccagagtcccccagcggctcgcatgtcagcccagaccccagggtccttggcctaggagaggagcagtggaggggcccaggctctgagctccacaggtctgagctgggagcaactcaggcccccacccaagcctgcgtcagcggaacttgagtgaggggcgttgtgcaatttgtggcaaggctggcccagctggatgcctgggtcccagtatttttagccccaaaggagaagtgaaaaggccccagccggggtgaatcatcagtcctggggaagaacccaggcgcctgagccccagctccgggaagcaggcactggggagggggcttcaaggagggagtgccccctcagactccctgcttccctggaagcttcaggaagctcagcctcagccttcaggcctgagcaagtgcagggcggagctaccagcccaggctcagatgttggggtgtgaaagcctcaagtgactcagcctggttggagaactgccccacccagtatcttctgtgccatggttcccacattcgcactccatggcctcctgtcctggaccccacgtctgcaaggaaaccctaggaccatggatacctctgtgattcacgctgagcccaagtccccacactggaaaactgggaaatggccagctgtgtgtcccaggaaattcctccccttattcttccttgaagtgcccgagcatgtagggcaagaaggaaggctgaagcgctgtccctaggaggaatttctccttcaggggagcctcagttttgcccatttatctaattgaatcagttttttacccaatcccccgattttgtaggataatctcccttatctaaagtcaactgattatggactttaatcacatctacaaaacacttccatggcgacagctagatgagtgtttgaataactgggactgtagcccgtccaagttgacacataaaactgaccatcgggccgggggcggtggctcacgcctgtaatcccaacactttgggagcccgaggcgggcggatcacaaggtcaggagttcgagaccagcctggccaacacggtgaaaccccgactctactaaaaatacaaaaaattagccgggtgtggtggcacacacctgtagtcccagctactcgggaggctgaggcaggagaatcgtttgaacctgggaggcagaggttgcagtgagccaagatcacactattgcactccagcctgggcgacagggcaagactctgtctcaaaaaaataaaaaatgaccatctagtccttgtcatctgggcaccctcacacatctccttaaccacacttaatctccaaataagtacgataacatagtcatagtcccacccaacatgatgcagttatcttgcatacaactgaagacaactaaccctttccccaacagagcccaccagcagtggtggagatgtcggtccatgagcgcacacacaagactgagggactgtcggccctcccaggtggtgtcaacacaacatcacacacaggtgggggggcctgatagcccagcacccatgatacagggcctaccaatgcttaaaaccacacccagggagcccacagaggcactcagtgggtggtggggtgatggatacacatctatcaggcacagggcggaggtgggcaccactgagttgcactcagcaaacacattgggtatcttgtgcccaaggcctgtatttgtggagctgatgttttagtgagagacagtaaatgtgacaaaagtaaaatatatcagatggtgagaaaacagaaaaatgagatcagaagtggagatgttggggccaggcacagtggcccaggcctgtaatcccatcactttgggaggtgcaggcaggcagatggcttgagcccaggaattcaagaccagtccgagcaacatagcaaaagcccttatctgcaaaaaattcaaaaattagccaggtgtggtggtgcgtgcccaggttcccaggtactcggaggctgagaggtgggaggatgccttgagcttgagaggttgaagctgcagtgagctgtgatcgcaccactgcactccagcttggttcatggagaccctgtttttttaaaaaaagaagtggaggtgtttacaccagcaaaatactcattttttaagtgtaattaagttgaagatcaaaaaatggaaatgtataattaaatcatacttagcaaatctaacacatgaaatgtaacatctgcatatggagaaccgtgttactttattgaaaaacattaaaagtttgagaactt

SEQ ID NO: 424793 - DNA, 775 bp, Homo sapiens
ggcgggactaactagcaaacggggactagaaatagggatgctgaaaagcaacggggagagacgcagtcgtaacgcacttccggcggtctacgcgaggaagatggctgcatcccagcagcaagcttcagcggcttcctcagctgctggtgtatcgggtcctagttcggctggcggcccgggtccccagcagcagccgcaaccgccagcacaactggtgggccctgcccagagcggcctcctgcagcaacagcaacaggacttcgatcctgtgcagcgttataagatgctcatcccgcagctgaaggagagtctacagaccttgatgaaggttgcggcccaaaacttgattcagaacactaacatcgacaatggacaaaagagcagtgatggacccatacagcgctttgacaagtgcctggaagagttctatgcactctgtgaccagctggagctgtgcctgcgcctggcgcatgagtgcctgtcacagagttgtgacagtgccaagcactctccaacgttggtgcccacagccaccaagcccgacgcagtgcagcctgacagcctcccctacccacagtacctggcggtcatcaaagcccagatttcctgtgccaaggacattcacaccgccctgctggactgtgccaacaaggtcacgggcaagacacccgcaccacctgctggccctgggggcactctgtgaagtgggggacagggagtggggcaggcagtggttggtgggtggtgtgcaaagggaatgaagagcgtcctgggc

SEQ ID NO: 424794 - DNA, 3563 bp, Homo sapiens
ggcgggactaactagcaaacggggactagaaatagggatgctgaaaagcaacggggagagacgcagtcgtaacgcacttccggcggtctacgcgaggaagatggctgcatcccagcagcaagcttcagcggcttcctcagctgctggtgtatcgggtcctagttcggctggcggcccgggtccccagcagcagccgcaaccgccagcacaactggtgggccctgcccagagcggcctcctgcagcaacagcaacaggacttcgatcctgtgcagcgttataagatgctcatcccgcagctgaaggagagtctacagaccttgatgaaggttgcggcccaaaacttgattcagaacactaacatcgacaatggacaaaagagcagtgatggacccatacagcgctttgacaagtgcctggaagagttctatgcactctgtgaccagctggagctgtgcctgcgcctggcgcatgagtgcctgtcacagagttgtgacagtgccaagcactctccaacgttggtgcccacagccaccaagcccgacgcagtgcagcctgacagcctcccctacccacagtacctggcggtcatcaaagcccagatttcctgtgccaaggacattcacaccgccctgctggactgtgccaacaaggtcacgggcaagacacccgcaccacctgctggccctgggggcactctgtgaagtgggggacagggagtggggcaggcagtggttggtgggtggtgtgcaaagggaatgaagagcgtcctgggcctaaacacagcagcctcctctcttcctgcctgagcaccgcagcgggagccagcagggggcagcagaggccaacagggagctcgcaggccgggcccctgcgtccctgccccttcttcctgctccccctcctagcctagggtagactttgaactgtgtgtgttgatgacttctctgttccacaggccctcccccattcttgcctgggtgtggagccctggctgtcccctctccctcagtccttcctgactgtctccagctgggaggtggtctctgtgtgccactcctctgtgtctctattacagttgtgtctctctcatcctgtctctttttcccttgtttctctgttcctgttaatgtgtttctccccatggtcctatttctctcactctgacctctctctcttagtcccctttagctgtcttctatccccagctcctaactgggactctgtgtctatgcagggggccagcacccctgggttatctggggctaagggaagggacttcatttccaggggccacagccaagcccagagtcccccagcggctcgcatgtcagcccagaccccagggtccttggcctaggagaggagcagtggaggggcccaggctctgagctccacaggtctgagctgggagcaactcaggcccccacccaagcctgcgtcagcggaacttgagtgaggggcgttgtgcaatttgtggcaaggctggcccagctggatgcctgggtcccagtatttttagccccaaaggagaagtgaaaaggccccagccggggtgaatcatcagtcctggggaagaacccaggcgcctgagccccagctccgggaagcaggcactggggagggggcttcaaggagggagtgccccctcagactccctgcttccctggaagcttcaggaagctcagcctcagccttcaggcctgagcaagtgcagggcggagctaccagcccaggctcagatgttggggtgtgaaagcctcaagtgactcagcctggttggagaactgccccacccagtatcttctgtgccatggttcccacattcgcactccatggcctcctgtcctggaccccacgtctgcaaggaaaccctaggaccatggatacctctgtgattcacgctgagcccaagtccccacactggaaaactgggaaatggccagctgtgtgtcccaggaaattcctccccttattcttccttgaagtgcccgagcatgtagggcaagaaggaaggctgaagcgctgtccctaggaggaatttctccttcaggggagcctcagttttgcccatttatctaattgaatcagttttttacccaatcccccgattttgtaggataatctcccttatctaaagtcaactgattatggactttaatcacatctacaaaacacttccatggcgacagctagatgagtgtttgaataactgggactgtagcccgtccaagttgacacataaaactgaccatcgggccgggggcggtggctcacgcctgtaatcccaacactttgggagcccgaggcgggcggatcacaaggtcaggagttcgagaccagcctggccaacacggtgaaaccccgactctactaaaaatacaaaaaattagccgggtgtggtggcacacacctgtagtcccagctactcgggaggctgaggcaggagaatcgtttgaacctgggaggcagaggttgcagtgagccaagatcacactattgcactccagcctgggcgacagggcaagactctgtctcaaaaaaataaaaaatgaccatctagtccttgtcatctgggcaccctcacacatctccttaaccacacttaatctccaaataagtacgataacatagtcatagtcccacccaacatgatgcagttatcttgcatacaactgaagacaactaaccctttccccaacagagcccaccagcagtggtggagatgtcggtccatgagcgcacacacaagactgagggactgtcggccctcccaggtggtgtcaacacaacatcacacacaggtgggggggcctgatagcccagcacccatgatacagggcctaccaatgcttaaaaccacacccagggagcccacagaggcactcagtgggtggtggggtgatggatacacatctatcaggcacagggcggaggtgggcaccactgagttgcactcagcaaacacattgggtatcttgtgcccaaggcctgtatttgtggagctgatgttttagtgagagacagtaaatgtgacaaaagtaaaatatatcagatggtgagaaaacagaaaaatgagatcagaagtggagatgttggggccaggcacagtggcccaggcctgtaatcccatcactttgggaggtgcaggcaggcagatggcttgagcccaggaattcaagaccagtccgagcaacatagcaaaagcccttatctgcaaaaaattcaaaaattagccaggtgtggtggtgcgtgcccaggttcccaggtactcggaggctgagaggtgggaggatgccttgagcttgagaggttgaagctgcagtgagctgtgatcgcaccactgcactccagcttggttcatggagaccctgtttttttaaaaaaagaagtggaggtgtttacaccagcaaaatactcattttttaagtgtaattaagttgaagatcaaaaaatggaaatgtataattaaatcatacttagcaaatctaacacatgaaatgtaacatctgcatatggagaaccgtgttactttattgaaaaacattaaaagtttgagaactt

SEQ ID NO: 424795 - DNA, 3513 bp, Homo sapiens
cctggtggcgaattcggcacgaggcacttccggcggtctacgcgaggaagatggctgcatcccagcagcaagcttcagcggcttcctcagctgctggtgtatcgggtcctagttcggctggcggcccgggtccccagcagcagccgcaaccgccagcacaactggtgggccctgcccagagcggcctcctgcagcaacagcaacaggacttcgatcctgtgcagcgttataagatgctcatcccgcagctgaaggagagtctacagaccttgatgaaggttgcggcccaaaacttgattcagaacactaacatcgacaatggacaaaagagcagtgatggacccatacagcgctttgacaagtgcctggaagagttctatgcactctgtgaccagctggagctgtgcctgcgcctggcgcatgagtgcctgtcacagagttgtgacagtgccaagcactctccaacgttggtgcccacagccaccaagcccgacgcagtgcagcctgacagcctcccctacccacagtacctggcggtcatcaaagcccagatttcctgtgccaaggacattcacaccgccctgctggactgtgccaacaaggtcacgggcaagacacccgcaccacctgctggccctgggggcactctgtgaagtgggggacagggagtggggcaggcagtggttggtgggtggtgtgcaaagggaatgaagagcgtcctgggcctaaacacagcagcctcctctcttcctgcctgagcaccgcagcgggagccagcagggggcagcagaggccaacagggagctcgcaggccgggcccctgcgtccctgccccttcttcctgctccccctcctagcctagggtagactttgaactgtgtgtgttgatgacttctctgttccacaggccctcccccattcttgcctgggtgtggagccctggctgtcccctctccctcagtccttcctgactgtctccagctgggaggtggtctctgtgtgccactcctctgtgtctctattacagttgtgtctctctcatcctgtctctttttcccttgtttctctgttcctgttaatgtgtttctccccatggtcctatttctctcactctgacctctctctcttagtcccctttagctgtcttctatccccagctcctaactgggactctgtgtctatgcagggggccagcacccctgggttatctggggctaagggaagggacttcatttccaggggccacagccaagcccagagtcccccagcggctcgcatgtcagcccagaccccagggtccttggcctaggagaggagcagtggaggggcccaggctctgagctccacaggtctgagctgggagcaactcaggcccccacccaagcctgcgtcagcggaacttgagtgaggggcgttgtgcaatttgtggcaaggctggcccagctggatgcctgggtcccagtatttttagccccaaaggagaagtgaaaaggccccagccggggtgaatcatcagtcctggggaagaacccaggcgcctgagccccagctccgggaagcaggcactggggagggggcttcaaggagggagtgccccctcagactccctgcttccctggaagcttcaggaagctcagcctcagccttcaggcctgagcaagtgcagggcggagctaccagcccaggctcagatgttggggtgtgaaagcctcaagtgactcagcctggttggagaactgccccacccagtatcttctgtgccatggttcccacattcgcactccatggcctcctgtcctggaccccacgtctgcaaggaaaccctaggaccatggatacctctgtgattcacgctgagcccaagtccccacactggaaaactgggaaatggccagctgtgtgtcccaggaaattcctccccttattcttccttgaagtgcccgagcatgtagggcaagaaggaaggctgaagcgctgtccctaggaggaatttctccttcaggggagcctcagttttgcccatttatctaattgaatcagttttttacccaatcccccgattttgtaggataatctcccttatctaaagtcaactgattatggactttaatcacatctacaaaacacttccatggcgacagctagatgagtgtttgaataactgggactgtagcccgtccaagttgacacataaaactgaccatcgggccgggggcggtggctcacgcctgtaatcccaacactttgggagcccgaggcgggcggatcacaaggtcaggagttcgagaccagcctggccaacacggtgaaaccccgactctactaaaaatacaaaaaattagccgggtgtggtggcacacacctgtagtcccagctactcgggaggctgaggcaggagaatcgtttgaacctgggaggcagaggttgcagtgagccaagatcacactattgcactccagcctgggcgacagggcaagactctgtctcaaaaaaataaaaaatgaccatctagtccttgtcatctgggcaccctcacacatctccttaaccacacttaatctccaaataagtacgataacatagtcatagtcccacccaacatgatgcagttatcttgcatacaactgaagacaactaaccctttccccaacagagcccaccagcagtggtggagatgtcggtccatgagcgcacacacaagactgagggactgtcggccctcccaggtggtgtcaacacaacatcacacacaggtgggggggcctgatagcccagcacccatgatacagggcctaccaatgcttaaaaccacacccagggagcccacagaggcactcagtgggtggtggggtgatggatacacatctatcaggcacagggcggaggtgggcaccactgagttgcactcagcaaacacattgggtatcttgtgcccaaggcctgtatttgtggagctgatgttttagtgagagacagtaaatgtgacaaaagtaaaatatatcagatggtgagaaaacagaaaaatgagatcagaagtggagatgttggggccaggcacagtggcccaggcctgtaatcccatcactttgggaggtgcaggcaggcagatggcttgagcccaggaattcaagaccagtccgagcaacatagcaaaagcccttatctgcaaaaaattcaaaaattagccaggtgtggtggtgcgtgcccaggttcccaggtactcggaggctgagaggtgggaggatgccttgagcttgagaggttgaagctgcagtgagctgtgatcgcaccactgcactccagcttggttcatggagaccctgtttttttaaaaaaagaagtggaggtgtttacaccagcaaaatactcattttttaagtgtaattaagttgaagatcaaaaaatggaaatgtataattaaatcatacttagcaaatctaacacatgaaatgtaacatctgcatatggagaaccgtgttactttattgaaaaacattaaaagtttgagaactt

SEQ ID NO: 424796 - DNA, 389 bp, Homo sapiens
ttaccacttactgttgattttgctgtcagcacagatcttgtatctcatccctgctgctactctagtccagaccatcctcatctcatacctggattattcagttctctactcactggtccctctgcttttcgttgcaccttctattccatgcactagcagcagctagagtaatgaacgtgtcagagcctgacctgcttataagcgttcccactccgtgtcaaagaggacagacttggtgccatggtttacacatccacctctgtgatttgccccctgccagcttcatctacctgaaagaaagaagctgagacaaaattgatttaagtagagagttcaggtgggccaggcttgaggctggcagcctaggggcatagactcaagttgccttg

SEQ ID NO: 424797 - DNA, 3376 bp, Homo sapiens
ctgagtcacagttaacagattatttctgtgtgaggcacatttcccttctgttgtttaagaaatgggagctgggaggcagctgagagggcgtgataaaagaattaagtgtgatcaactgaaacaactatgttgtagttctccatgctggatgcaaaggaaaaagtgtcgaattccaaaaaggatggaagaagaaggcaagaagggcaaactccagaagttctagtgcaggaagagagtttgagaagtaaaatccaggcaagcaaagcgttgtaccacttgggactccccaaagtgaaacagcaaggaaggattgtgtccatcttacttacttgaattggagagcttgtttctctctcatttttatttttcaatgatgttttctttatattttagagatattcattttctcttatcttgtgcttgtaaaaagcatttacatttcaagtctatgtgcttattacaggggaaaaataatctacctggttgcagtctttgagtataaacatttctaacctttttaaaacttctatagcagcccattaacactaacatttttagagcaaatatattctattttaacttcaggtagaggaatagtcctaaacttaatatgatagctctagataagatcttagagataagtgagcatttagtattctaaaagtggcagaacaaatcatgaggtttctggatgctataccaatttaaaatcaattcttatgttaatattgattgcttatttacatgtcagtcatctactttttttctttgaaatctgcatatgggttacaaaaactctgttaggttttgaaaattccattaagttggaaaccttggttaaaaatgtaggtgcctggcccatggttaccctggattcaggtctctcatgattatatttggggatttacgttcctaactgctaagcaacatctttgacaactagtaattcatactctactagtagtcacatgtcatatagtaaaataaatagggctttagttcttaagtaattctataggattttaccctgaaatccagggtgttcagatttcaaaaaggataatttatcagtattttctcatccagtcaaacttcagctgacattgatacaggtcaaaatgcgtagatgctttttggtgttggaaataagtgtctgtcttatggtcatcattgtcttcttagatttttgggtaggggggccaggtagggggagactcagaaataaaagcgttccccagataacttcaatctggaaagaattttttgtatagagtccatctctccctcaagactgaccacaggtttcatgagaaggtccctgaaaacatcacatttctctgaagaaccatcaacttgtcttttcttgaaccacaggaatggttctacagaccctactataattcttcacatttcagaacccatgtttaatggagggaagagagaaatgcatgggaaaagaacacctccttttctcctttctcttaaattcaaagacgtttgctttggaatgccctcacttctccctattcacaggcttctaaaatcattaatttactcaaggcacatgtgccttctttgccccaaatgcatcactttccttttagttatggctgattttgggtgtgtgtgtgtaagacatgcagtcaacaacgagatgaaggccattgcatagatctcatgcagatagtgatggattcagaaagtaggttccagtggcgtcactaccttcttgtaagccagtatacactggctatttgtggaaatctctttgggagatcaaatagagtattatgccactgtgagtgtttataaactggaaggaacaagtacctgtgtttcttgggacacaaagcactcagatcctgagtggatgcagacatgagagtaaatgtcagcccaaattaggcccctcgacctacagacatttcatgggttttatttaatcacaccccatggtttggggctacatgaggaagttggtaatgagctgaatttcttattcagtggaaaaaactgaaactgtctaaaaacacgggatatattttagaggcaattgtggaagcggagagaatgagatgatggtgttcagagggaccagcttctttttcagttgtctttagaactcaagaataatcaataatttagtgccccttcaacagccatactcagcaagaagaatcagaagcttgatcctctaacagaaatagaagagggtagctttgcccattgccactgtctttactgccccttctgcccctccacccacatccacattcagcatcactccaaggatgtgtcagcatcttgcccatgcaggtagaaatttgtgagtaggcctccatacttcctcgggggaagaaagagaaactagtgctggttttaagaatgtagctggcttttcatcagaacccttacgctaacctgaccacacttgctctcggggaagttcaagcctgtgatgtgcataaactccaacaagcctggctttggtgttcagcatgcacattccataaatatctcttgcaggcataccccacagctagactgcaggattaaaataacttccaaaaggtgctggattggagtttgttcaaatttctcattaaccactaatgttaattcataccaaatgcaaagtattctaaaccagctgatgctgtcagtgttcaagttttaagtgacttcaaacacaatggaagtgtttcaatgggagccagatctcatgagtaaaaatccattttataatagctctgtgatatatcagtgggagatgattcataggggagagatttgaacaagcagaattaagtgttagcaaaaatgctgcattgctttgattcatgtttaaagacctaaatttctatgcacaaggaataaagggcctacttaccaagtgtaaatcacaacataggctaccaaaatatttcttatttgctaggagaacaaagctgtcacggtgcatgatagttggacagagatggctaaaaaagaggcaaattcagatttggaaacagggtggcctcttcattatttattgccaagatctgaaaatcttcaacatcttataagacaacaatgaagtagcccctgaacagcatggagttgctgtgagtttgttcgttgcagacctttgtgttgggtcctgggaatctgagctttgttccctgtgcatggtggataattgaaaccaagaggacatgggatagaccttgtgacagaccaattctgtgacccctgtcttctgggtcacattattcattgttgatttaaatacaggactacctgggttaggtctacctggccaggtagacctaacattactgctggccgcctactcatgcacctaatagcaagcgccaccctagcactatcaaac

SEQ ID NO: 424798 - DNA, 297 bp, Homo sapiens
ggcgatgaaggtggtagttcacacaagtaacagtggaggcaaaggtaagcgcaagctgcctgtcccagatgctggcccatgtgtgagtgcttccctggagaagtctgcttctgttgctcccacctgagtcacagttaacagattatttctgtgtgaggcacatttcccttctgttgtttaagaaatgggagctgggaggcagctgagagggcgtgataaaagaattaagtgtgatcaactgaaacaactatgttgtagttctccatgctggatgcaaaggaaaaagtgtcgaattcc

SEQ ID NO: 424799 - DNA, 3633 bp, Homo sapiens
ctgagtcacagttaacagattatttctgtgtgaggcacatttcccttctgttgtttaagaaatgggagctgggaggcagctgagagggcgtgataaaagaattaagtgtgatcaactgaaacaactatgttgtagttctccatgctggatgcaaaggaaaaagtgtcgaattccaaaaaggatggaagaagaaggcaagaagggcaaactccagaagttctagtgcaggaagagagtttgagaagtaaaatccaggcaagcaaagcgttgtaccacttgggactccccaaagtgaaacagcaaggaaggattgtgtccatcttacttacttgaattggagagcttgtttctctctcatttttatttttcaatgatgttttctttatattttagagatattcattttctcttatcttgtgcttgtaaaaagcatttacatttcaagtctatgtgcttattacaggggaaaaataatctacctggttgcagtctttgagtataaacatttctaacctttttaaaacttctatagcagcccattaacactaacatttttagagcaaatatattctattttaacttcaggtagaggaatagtcctaaacttaatatgatagctctagataagatcttagagataagtgagcatttagtattctaaaagtggcagaacaaatcatgaggtttctggatgctataccaatttaaaatcaattcttatgttaatattgattgcttatttacatgtcagtcatctactttttttctttgaaatctgcatatgggttacaaaaactctgttaggttttgaaaattccattaagttggaaaccttggttaaaaatgtaggtgcctggcccatggttaccctggattcaggtctctcatgattatatttggggatttacgttcctaactgctaagcaacatctttgacaactagtaattcatactctactagtagtcacatgtcatatagtaaaataaatagggctttagttcttaagtaattctataggattttaccctgaaatccagggtgttcagatttcaaaaaggataatttatcagtattttctcatccagtcaaacttcagctgacattgatacaggtcaaaatgcgtagatgctttttggtgttggaaataagtgtctgtcttatggtcatcattgtcttcttagatttttgggtaggggggccaggtagggggagactcagaaataaaagcgttccccagataacttcaatctggaaagaattttttgtatagagtccatctctccctcaagactgaccacaggtttcatgagaaggtccctgaaaacatcacatttctctgaagaaccatcaacttgtcttttcttgaaccacaggaatggttctacagaccctactataattcttcacatttcagaacccatgtttaatggagggaagagagaaatgcatgggaaaagaacacctccttttctcctttctcttaaattcaaagacgtttgctttggaatgccctcacttctccctattcacaggcttctaaaatcattaatttactcaaggcacatgtgccttctttgccccaaatgcatcactttccttttagttatggctgattttgggtgtgtgtgtgtaagacatgcagtcaacaacgagatgaaggccattgcatagatctcatgcagatagtgatggattcagaaagtaggttccagtggcgtcactaccttcttgtaagccagtatacactggctatttgtggaaatctctttgggagatcaaatagagtattatgccactgtgagtgtttataaactggaaggaacaagtacctgtgtttcttgggacacaaagcactcagatcctgagtggatgcagacatgagagtaaatgtcagcccaaattaggcccctcgacctacagacatttcatgggttttatttaatcacaccccatggtttggggctacatgaggaagttggtaatgagctgaatttcttattcagtggaaaaaactgaaactgtctaaaaacacgggatatattttagaggcaattgtggaagcggagagaatgagatgatggtgttcagagggaccagcttctttttcagttgtctttagaactcaagaataatcaataatttagtgccccttcaacagccatactcagcaagaagaatcagaagcttgatcctctaacagaaatagaagagggtagctttgcccattgccactgtctttactgccccttctgcccctccacccacatccacattcagcatcactccaaggatgtgtcagcatcttgcccatgcaggtagaaatttgtgagtaggcctccatacttcctcgggggaagaaagagaaactagtgctggttttaagaatgtagctggcttttcatcagaacccttacgctaacctgaccacacttgctctcggggaagttcaagcctgtgatgtgcataaactccaacaagcctggctttggtgttcagcatgcacattccataaatatctcttgcaggcataccccacagctagactgcaggattaaaataacttccaaaaggtgctggattggagtttgttcaaatttctcattaaccactaatgttaattcataccaaatgcaaagtattctaaaccagctgatgctgtcagtgttcaagttttaagtgacttcaaacacaatggaagtgtttcaatgggagccagatctcatgagtaaaaatccattttataatagctctgtgatatatcagtgggagatgattcataggggagagatttgaacaagcagaattaagtgttagcaaaaatgctgcattgctttgattcatgtttaaagacctaaatttctatgcacaaggaataaagggcctacttaccaagtgtaaatcacaacataggctaccaaaatatttcttatttgctaggagaacaaagctgtcacggtgcatgatagttggacagagatggctaaaaaagaggcaaattcagatttggaaacagggtggcctcttcattatttattgccaagatctgaaaatcttcaacatcttataagacaacaatgaagtagcccctgaacagcatggagttgctgtgagtttgttcgttgcagacctttgtgttgggtcctgggaatctgagctttgttccctgtgcatggtggataattgaaaccaagaggacatgggatagaccttgtgacagaccaattctgtgacccctgtcttctgggtcacattattcattgttgatttaaatacaggactaccaaacagtacaaatctatcatgagtctggtagaaaagtaaaagtaaaagctgcacacgttacatactgtttattgttctaatgtacaactaactatttgcatataatgtgatttaatttattgctgttttgtgtagaaaaggagaactaatgactgtggatataacccatgttttgtataatatattttatttcttgtgcgaactggtcatttaaaatatctacttcatttgatgtttggatataaatgtgtatgtgtccttgtaaatgtttctatcaagcaagaatgccacgtactcagagtataacaatgtgttctcattaaaaaatacatcccacggaaaaaaattcc

SEQ ID NO: 424800 - DNA, 1214 bp, Homo sapiens
tgactggaaaaccggaagtgaaatcgtggcagccgcctcggccgccgcaatgcagccctcctttctatgtgtcatactcgtttatctgggtgaccaacctgttcctattggtgcagagagaggagaagcagcttgaggcatcattagatgcactgctgagtcaagtggctgatctgaagaactctctggggagtttcatttgcaagttggagaacgagtatggccggctgacctgctttgccttgctttctggacagctgaacactctgaacaaggtcttgaagcatgaaaaaacaccgctgttccgtaaccaggtcatcattcctctggtgttgtctccagaccgagatgaagatctcatgcggcagactgaaggacgggtgcctgttttcagccatgaggtagtccctgaccatctgagaaccaagcctgaccctgaagtggaagaacaggagaagcaactgacgacagatgctgcccgcattggtgcagatgcagcccagaagcagatccagagcttgaataaaatgtgttcaaaccttctggagaaaatcagcaaagaggagcgagaatcagagagtggaggtctccggccgaacaagcagacctttaaccctacagacactaatgccttggtggcagctgttgcctttgggaaaggactatctaattggagaccttcaggcagcagtggtcctggccaggcaggccagccaggagctgggacgatccttgcaggaacctcaggattacagcaggtgcagatggcaggagctccaagccagcagcagccaatgctcagtggggtacaaatggctcaggcaggtcaaccagggaaaatgccaagtggaataaaaaccaacatcaagtcggcttccatgcatccctaccagcggtgagtgtggctggcaacctcgactccctggtgctctttgcagagttgggcagtgaaattaccttttgctcaaggctcacctagatgggtacaataaaaagaacatgggctttcagcagcagacaaatcccacttccaccactgactagctgtgtgaccttggacaagtgacctaatttttctgagcctgtttctcatttgtaaatggtgataatacctacctcatagggttgttgtgaggattaaaatgaggaaatgaatgtaaagcacttagtacagtatatgaaataatgggtattcaataaatgatagtttctac

SEQ ID NO: 424801 - DNA, 679 bp, Homo sapiens
tgactggaaaaccggaagtgaaatcgtggcagccgcctcggccgccgcaatgcagccctcctttctatgtgtcatactcgtttatctgggtgaccaacctgttcctattggtgcagagagaggagaagcagcttgaggcatcattagatgcactgctgagtcaagtggctgatctgaagaactctctggggagtttcatttgcaagttggagaacgagtatggccggctgacctggccatctgtcctggacagctttgccttgctttctggacagctgaacactctgaacaaggtcttgaagcatgaaaaaacaccgctgttccgtaaccaggtcatcattcctctggtgttgtctccagaccgagatgaagatctcatgcggcagactgaaggacgggtgcctgttttcagccatgaggtagtccctgaccatctgagaaccaagcctgaccctgaagtggaagaacaggagaagcaactgacgacagatgctgcccgcattggtgcagatgcagcccagaagcagatccagagcttgaataaaatgtgttcaaaccttctggagaaaatcagcaaagaggagcgagaatcagagagtggagtcagtggaagttttccgacgaaccatacctttaacccttcagacaactttggctttgtgggcctgtttgctttggg

SEQ ID NO: 424802 - DNA, 2042 bp, Homo sapiens
tgactggaaaaccggaagtgaaatcgtggcagccgcctcggccgccgcaatgcagccctcctttctatgtgtcatactcgtttatctgggtgaccaacctgttcctattggtgcagagagaggagaagcagcttgaggcatcattagatgcactgctgagtcaagtggctgatctgaagaactctctggggagtttcatttgcaagttggagaacgagtatggccggctgacctggccatctgtcctggacagctttgccttgctttctggacagctgaacactctgaacaaggtcttgaagcatgaaaaaacaccgctgttccgtaaccaggtcatcattcctctggtgttgtctccagaccgagatgaagatctcatgcggcagactgaaggacgggtgcctgttttcagccatgaggtagtccctgaccatctgagaaccaagcctgaccctgaagtggaagaacaggagaagcaactgacgacagatgctgcccgcattggtgcagatgcagcccagaagcagatccagagcttgaataaaatgtgttcaaaccttctggagaaaatcagcaaagaggagcgagaatcagagagtggaggtctccggccgaacaagcagacctttaaccctacagacactaatgccttggtggcagctgttgcctttgggaaaggactatctaattggagaccttcaggcagcagtggtcctggccaggcaggccagccaggagctgggacgatccttgcaggaacctcaggattacagcaggtgcagatggcaggagctccaagccagcagcagccaatgctcagtggggtacaaatggctcaggcaggtcaaccagggaaaatgccaagtggaataaaaaccaacatcaagtcggcttccatgcatccctaccagcggtgagtgtggctggcaacctcgactccctggtgctctttgcagagttgggcagtgaaattaccttttgctcaaggctcacctagatgggtacaataaaaagaacatgggctttcagcagcagacaaatcccacttccaccactgactagctgtgtgaccttggacaagtgacctaatttttctgagcctgtttctcatttgtaaatggtgataatacctacctcatagggttgttgtgaggattaaaatgaggaaatgaatgtaaagcacttagtacagtatatgaaataatgggtattcaataaatgatagtttctacagatccttctccccaccaccctccacagtccttgatccagaacttaccctaatctgatactgcctcacgtcaatggtgagctgatggacacaagatcaaataaggctatgcttattttgtgctgccagaaactgtagcaacctctgtgttcttagaggcacactgtttttgcaggccctcctgcctgggtttcattctggctatccctctaaggcgcaaggtgaagaagcttctgggccaggaaggaaaaaaaaatgcccacctgcagctctggtgaagcttgggcctgctctcctttccatcctctaaggagccaacttggcttttacctgtcaaatagtcataaagtcccctatcctttaccccaccttatacacacgaggctttctcaggaagtggctctgccaggcaggactatgtgggaaagggtttttccttagcacacgaaaaagccccttcccctggattcatgtttcttattttggagggagaagggaattgcacttcacactgccatcagggtttagttgacctcataatggtgcccactttctcgactttggccaggatttccttcaaagaaaacgactttccttcatttccctaagcctgtggcccaaatggtggaccagaatgatggtgggagggggcaacccccagtagctttgcctgcttttataaagttgaacaaattgaatttagacattcaggctaacctgcctttcttagtactcctttgttggcatgggcaggggttgagtcagcagaagtggaccaaaggattcctctgaataaagttatttaaattga

SEQ ID NO: 424803 - DNA, 2185 bp, Homo sapiens
aggcatagattaggaggtgatggggaaaaggaatcagttggtggaaggacttggggtcaggcaaacaggttggaaggtctcagggttgatgctgtctataacccaaataccaaagatagaaaacaacctggctatcctatgccaatgagatcctgtgttacctgactggtgttgcacaccatctccttggctttccagccctcctttctatgtgtcatactcgtttatctgggtgaccaacctgttcctattggtgcagagagaggagaagcagcttgaggcatcattagatgcactgctgagtcaagtggctgatctgaagaactctctggggagtttcatttgcaagttggagaacgagtatggccggctgacctggccatctgtcctggacagctttgccttgctttctggacagctgaacactctgaacaaggtcttgaagcatgaaaaaacaccgctgttccgtaaccaggtcatcattcctctggtgttgtctccagaccgagatgaagatctcatgcggcagactgaaggacgggtgcctgttttcagccatgaggtagtccctgaccatctgagaaccaagcctgaccctgaagtggaagaacaggagaagcaactgacgacagatgctgcccgcattggtgcagatgcagcccagaagcagatccagagcttgaataaaatgtgttcaaaccttctggagaaaatcagcaaagaggagcgagaatcagagagtggaggtctccggccgaacaagcagacctttaaccctacagacactaatgccttggtggcagctgttgcctttgggaaaggactatctaattggagaccttcaggcagcagtggtcctggccaggcaggccagccaggagctgggacgatccttgcaggaacctcaggattacagcaggtgcagatggcaggagctccaagccagcagcagccaatgctcagtggggtacaaatggctcaggcaggtcaaccagggaaaatgccaagtggaataaaaaccaacatcaagtcggcttccatgcatccctaccagcggtgagtgtggctggcaacctcgactccctggtgctctttgcagagttgggcagtgaaattaccttttgctcaaggctcacctagatgggtacaataaaaagaacatgggctttcagcagcagacaaatcccacttccaccactgactagctgtgtgaccttggacaagtgacctaatttttctgagcctgtttctcatttgtaaatggtgataatacctacctcatagggttgttgtgaggattaaaatgaggaaatgaatgtaaagcacttagtacagtatatgaaataatgggtattcaataaatgatagtttctacagatccttctccccaccaccctccacagtccttgatccagaacttaccctaatctgatactgcctcacgtcaatggtgagctgatggacacaagatcaaataaggctatgcttattttgtgctgccagaaactgtagcaacctctgtgttcttagaggcacactgtttttgcaggccctcctgcctgggtttcattctggctatccctctaaggcgcaaggtgaagaagcttctgggccaggaaggaaaaaaaaatgcccacctgcagctctggtgaagcttgggcctgctctcctttccatcctctaaggagccaacttggcttttacctgtcaaatagtcataaagtcccctatcctttaccccaccttatacacacgaggctttctcaggaagtggctctgccaggcaggactatgtgggaaagggtttttccttagcacacgaaaaagccccttcccctggattcatgtttcttattttggagggagaagggaattgcacttcacactgccatcagggtttagttgacctcataatggtgcccactttctcgactttggccaggatttccttcaaagaaaacgactttccttcatttccctaagcctgtggcccaaatggtggaccagaatgatggtgggagggggcaacccccagtagctttgcctgcttttataaagttgaacaaattgaatttagacattcaggctaacctgcctttcttagtactcctttgttggcatgggcaggggttgagtcagcagaagtggaccaaaggattcctctgaataaagttatttaaattga

SEQ ID NO: 424804 - DNA, 1927 bp, Homo sapiens
tgactggaaaaccggaagtgaaatcgtggcagccgcctcggccgccgcaatgcagagagaggagaagcagcttgaggcatcattagatgcactgctgagtcaagtggctgatctgaagaactctctggggagtttcatttgcaagttggagaacgagtatggccggctgacctggccatctgtcctggacagctttgccttgctttctggacagctgaacactctgaacaaggtcttgaagcatgaaaaaacaccgctgttccgtaaccaggtcatcattcctctggtgttgtctccagaccgagatgaagatctcatgcggcagactgaaggacgggtgcctgttttcagccatgaggtagtccctgaccatctgagaaccaagcctgaccctgaagtggaagaacaggagaagcaactgacgacagatgctgcccgcattggtgcagatgcagcccagaagcagatccagagcttgaataaaatgtgttcaaaccttctggagaaaatcagcaaagaggagcgagaatcagagagtggaggtctccggccgaacaagcagacctttaaccctacagacactaatgccttggtggcagctgttgcctttgggaaaggactatctaattggagaccttcaggcagcagtggtcctggccaggcaggccagccaggagctgggacgatccttgcaggaacctcaggattacagcaggtgcagatggcaggagctccaagccagcagcagccaatgctcagtggggtacaaatggctcaggcaggtcaaccagggaaaatgccaagtggaataaaaaccaacatcaagtcggcttccatgcatccctaccagcggtgagtgtggctggcaacctcgactccctggtgctctttgcagagttgggcagtgaaattaccttttgctcaaggctcacctagatgggtacaatatgtgtgaccttggacaagtgacctaatttttctgagcctgtttctcatttgtaaatggtgataatacctacctcatagggttgttgtgaggattaaaatgaggaaatgaatgtaaagcacttagtacagtatatgaaataatgggtattcaataaatgatagtttctacagatccttctccccaccaccctccacagtccttgatccagaacttaccctaatctgatactgcctcacgtcaatggtgagctgatggacacaagatcaaataaggctatgcttattttgtgctgccagaaactgtagcaacctctgtgttcttagaggcacactgtttttgcaggccctcctgcctgggtttcattctggctatccctctaaggcgcaaggtgaagaagcttctgggccaggaaggaaaaaaaaatgcccacctgcagctctggtgaagcttgggcctgctctcctttccatcctctaaggagccaacttggcttttacctgtcaaatagtcataaagtcccctatcctttaccccaccttatacacacgaggctttctcaggaagtggctctgccaggcaggactatgtgggaaagggtttttccttagcacacgaaaaagccccttcccctggattcatgtttcttattttggagggagaagggaattgcacttcacactgccatcagggtttagttgacctcataatggtgcccactttctcgactttggccaggatttccttcaaagaaaacgactttccttcatttccctaagcctgtggcccaaatggtggaccagaatgatggtgggagggggcaacccccagtagctttgcctgcttttataaagttgaacaaattgaatttagacattcaggctaacctgcctttcttagtactcctttgttggcatgggcaggggttgagtcagcagaagtggaccaaaggattcctctgaataaagttatttaaattga

SEQ ID NO: 424805 - DNA, 2024 bp, Homo sapiens
tgactggaaaaccggaagtgaaatcgtggcagccgcctcggccgccgcaatgcagccctcctttctatgtgtcatactcgtttatctgggtgaccaacctgttcctattggtgcagagagaggagaagcagcttgaggcatcattagatgcactgctgagtcaagtggctgatctgaagaactctctggggagtttcatttgcaagttggagaacgagtatggccggctgacctgctttgccttgctttctggacagctgaacactctgaacaaggtcttgaagcatgaaaaaacaccgctgttccgtaaccaggtcatcattcctctggtgttgtctccagaccgagatgaagatctcatgcggcagactgaaggacgggtgcctgttttcagccatgaggtagtccctgaccatctgagaaccaagcctgaccctgaagtggaagaacaggagaagcaactgacgacagatgctgcccgcattggtgcagatgcagcccagaagcagatccagagcttgaataaaatgtgttcaaaccttctggagaaaatcagcaaagaggagcgagaatcagagagtggaggtctccggccgaacaagcagacctttaaccctacagacactaatgccttggtggcagctgttgcctttgggaaaggactatctaattggagaccttcaggcagcagtggtcctggccaggcaggccagccaggagctgggacgatccttgcaggaacctcaggattacagcaggtgcagatggcaggagctccaagccagcagcagccaatgctcagtggggtacaaatggctcaggcaggtcaaccagggaaaatgccaagtggaataaaaaccaacatcaagtcggcttccatgcatccctaccagcggtgagtgtggctggcaacctcgactccctggtgctctttgcagagttgggcagtgaaattaccttttgctcaaggctcacctagatgggtacaataaaaagaacatgggctttcagcagcagacaaatcccacttccaccactgactagctgtgtgaccttggacaagtgacctaatttttctgagcctgtttctcatttgtaaatggtgataatacctacctcatagggttgttgtgaggattaaaatgaggaaatgaatgtaaagcacttagtacagtatatgaaataatgggtattcaataaatgatagtttctacagatccttctccccaccaccctccacagtccttgatccagaacttaccctaatctgatactgcctcacgtcaatggtgagctgatggacacaagatcaaataaggctatgcttattttgtgctgccagaaactgtagcaacctctgtgttcttagaggcacactgtttttgcaggccctcctgcctgggtttcattctggctatccctctaaggcgcaaggtgaagaagcttctgggccaggaaggaaaaaaaaatgcccacctgcagctctggtgaagcttgggcctgctctcctttccatcctctaaggagccaacttggcttttacctgtcaaatagtcataaagtcccctatcctttaccccaccttatacacacgaggctttctcaggaagtggctctgccaggcaggactatgtgggaaagggtttttccttagcacacgaaaaagccccttcccctggattcatgtttcttattttggagggagaagggaattgcacttcacactgccatcagggtttagttgacctcataatggtgcccactttctcgactttggccaggatttccttcaaagaaaacgactttccttcatttccctaagcctgtggcccaaatggtggaccagaatgatggtgggagggggcaacccccagtagctttgcctgcttttataaagttgaacaaattgaatttagacattcaggctaacctgcctttcttagtactcctttgttggcatgggcaggggttgagtcagcagaagtggaccaaaggattcctctgaataaagttatttaaattga

SEQ ID NO: 424806 - DNA, 1924 bp, Homo sapiens
aggctggacgctcagacgctggcctcgcactcgttgacacgacacgtcatcgtgagcgcgcagccttctcactgtatgacacacgctatgcgagaacgagtatggccggctgacctggccatctgtcctggacagctttgccttgctttctggacagctgaacactctgaacaaggtcttgaagcatgaaaaaacaccgctgttccgtaaccaggtcatcattcctctggtgttgtctccagaccgagatgaagatctcatgcggcagactgaaggacgggtgcctgttttcagccatgaggtagtccctgaccatctgagaaccaagcctgaccctgaagtggaagaacaggagaagcaactgacgacagatgctgcccgcattggtgcagatgcagcccagaagcagatccagagcttgaataaaatgtgttcaaaccttctggagaaaatcagcaaagaggagcgagaatcagagagtggaggtctccggccgaacaagcagacctttaaccctacagacactaatgccttggtggcagctgttgcctttgggaaaggactatctaattggagaccttcaggcagcagtggtcctggccaggcaggccagccaggagctgggacgatccttgcaggaacctcaggattacagcaggtgcagatggcaggagctccaagccagcagcagccaatgctcagtggggtacaaatggctcaggcaggtcaaccagggaaaatgccaagtggaataaaaaccaacatcaagtcggcttccatgcatccctaccagcggtgagtgtggctggcaacctcgactccctggtgctctttgcagagttgggcagtgaaattaccttttgctcaaggctcacctagatgggtacaataaaaagaacatgggctttcagcagcagacaaatcccacttccaccactgactagctgtgtgaccttggacaagtgacctaatttttctgagcctgtttctcatttgtaaatggtgataatacctacctcatagggttgttgtgaggattaaaatgaggaaatgaatgtaaagcacttagtacagtatatgaaataatgggtattcaataaatgatagtttctacagatccttctccccaccaccctccacagtccttgatccagaacttaccctaatctgatactgcctcacgtcaatggtgagctgatggacacaagatcaaataaggctatgcttattttgtgctgccagaaactgtagcaacctctgtgttcttagaggcacactgtttttgcaggccctcctgcctgggtttcattctggctatccctctaaggcgcaaggtgaagaagcttctgggccaggaaggaaaaaaaaatgcccacctgcagctctggtgaagcttgggcctgctctcctttccatcctctaaggagccaacttggcttttacctgtcaaatagtcataaagtcccctatcctttaccccaccttatacacacgaggctttctcaggaagtggctctgccaggcaggactatgtgggaaagggtttttccttagcacacgaaaaagccccttcccctggattcatgtttcttattttggagggagaagggaattgcacttcacactgccatcagggtttagttgacctcataatggtgcccactttctcgactttggccaggatttccttcaaagaaaacgactttccttcatttccctaagcctgtggcccaaatggtggaccagaatgatggtgggagggggcaacccccagtagctttgcctgcttttataaagttgaacaaattgaatttagacattcaggctaacctgcctttcttagtactcctttgttggcatgggcaggggttgagtcagcagaagtggaccaaaggattcctctgaataaagttatttaaattga

SEQ ID NO: 424807 - DNA, 2346 bp, Homo sapiens
tgactggaaaaccggaagtgaaatcgtggcagccgcctcggccgccgcaatgcagagagaggagaagcagcttgaggcatcattagatgcactgctgagtcaagtggctgatctgaagaactctctggggagtttcatttgcaagttggagaacgagtatggccggctgacctggccatctgtcctggacagctttgccttgctttctggacagctgaacactctgaacaaggtcttgaagcatgaaaaaacaccgctgttccgtaaccaggtcatcattcctctggtgttgtctccagaccgagatgaagatctcatgcggcagactgaaggacgggtgcctgttttcagccatgaggtagtccctgaccatctgagaaccaagcctgaccctgaagtggaagaacaggagaagcaactgacgacagatgctgcccgcattggtgcagatgcagcccagaagcagatccagagcttgaataaaatgtgttcaaaccttctggagaaaatcagcaaagaggagcgagaatcagagagtggagggtatgatgggactggtggctaaacagagaaggagaggtatataagatcactggaatgggaatggttgttttggaagtagtgaagttaggacacaagggtgaactgctttggggtttgtatccattctgttagccttttgtatttaaggccagcactgaagcagtggaggaaatgggcaaagtaagaagagagaattctgagataggcttgggggtcctctggctctttttctgggctgtgagggagtctagatgttgctgaattcagaactccaaaccctggcactcatactggtcttccagctgccacgttcagtcctgcatcagaagcatacttcaggatccccattactttttcttcaggtgtctccggccgaacaagcagacctttaaccctacagacactaatgccttggtggcagctgttgcctttgggaaaggactatctaattggagaccttcaggcagcagtggtcctggccaggcaggccagccaggagctgggacgatccttgcaggaacctcaggattacagcaggtgcagatggcaggagctccaagccagcagcagccaatgctcagtggggtacaaatggctcaggcaggtcaaccagggaaaatgccaagtggaataaaaaccaacatcaagtcggcttccatgcatccctaccagcggtgagtgtggctggcaacctcgactccctggtgctctttgcagagttgggcagtgaaattaccttttgctcaaggctcacctagatgggtacaataaaaagaacatgggctttcagcagcagacaaatcccacttccaccactgactagctgtgtgaccttggacaagtgacctaatttttctgagcctgtttctcatttgtaaatggtgataatacctacctcatagggttgttgtgaggattaaaatgaggaaatgaatgtaaagcacttagtacagtatatgaaataatgggtattcaataaatgatagtttctacagatccttctccccaccaccctccacagtccttgatccagaacttaccctaatctgatactgcctcacgtcaatggtgagctgatggacacaagatcaaataaggctatgcttattttgtgctgccagaaactgtagcaacctctgtgttcttagaggcacactgtttttgcaggccctcctgcctgggtttcattctggctatccctctaaggcgcaaggtgaagaagcttctgggccaggaaggaaaaaaaaatgcccacctgcagctctggtgaagcttgggcctgctctcctttccatcctctaaggagccaacttggcttttacctgtcaaatagtcataaagtcccctatcctttaccccaccttatacacacgaggctttctcaggaagtggctctgccaggcaggactatgtgggaaagggtttttccttagcacacgaaaaagccccttcccctggattcatgtttcttattttggagggagaagggaattgcacttcacactgccatcagggtttagttgacctcataatggtgcccactttctcgactttggccaggatttccttcaaagaaaacgactttccttcatttccctaagcctgtggcccaaatggtggaccagaatgatggtgggagggggcaacccccagtagctttgcctgcttttataaagttgaacaaattgaatttagacattcaggctaacctgcctttcttagtactcctttgttggcatgggcaggggttgagtcagcagaagtggaccaaaggattcctctgaataaagttatttaaattga

SEQ ID NO: 424808 - DNA, 1488 bp, Homo sapiens
tgactggaaaaccggaagtgaaatcgtggcagccgcctcggccgccgcaatgcagagagaggagaagcagcttgaggcatcattagatgcactgctgagtcaagtggctgatctgaagaactctctggggagtttcatttgcaagttggagaacgagtatggccggctgacctggccatctgtcctggacagctttgccttgctttctggacagctgaacactctgaacaaggtcttgaagcatgaaaaaacaccgctgttccgtaaccaggtcatcattcctctggtgttgtctccagaccgagatgaagatctcatgcggcagactgaaggacgggtgcctgttttcagccatgaggtagtccctgaccatctgagaaccaagcctgaccctgaagtggaagaacaggagaagcaactgacgacagatgctgcccgcattggtgcagatgcagcccagaagcagatccagagcttgaataaaatgtgttcaaaccttctggagaaaatcagcaaagaggagcgagaatcagagagtggaggtctccggccgaacaagcagacctttaaccctacagacactaatgccttggtggcagctgttgcctttgggaaaggactatctaattggagaccttcaggcagcagtggtcctggccaggcaggccagccaggagctgggacgatccttgcaggaacctcaggattacagcaggtgcagatggcaggagctccaagccagcagcagccaatgctcagtggggtacaaatggctcaggcaggtcaaccagggaaaatgccaagtggaataaaaaccaacatcaagtcggcttccatgcatccctaccagcggccctcctgcctgggtttcattctggctatccctctaaggcgcaaggtgaagaagcttctgggccaggaaggaaaaaaaaatgcccacctgcagctctggtgaagcttgggcctgctctcctttccatcctctaaggagccaacttggcttttacctgtcaaatagtcataaagtcccctatcctttaccccaccttatacacacgaggctttctcaggaagtggctctgccaggcaggactatgtgggaaagggtttttccttagcacacgaaaaagccccttcccctggattcatgtttcttattttggagggagaagggaattgcacttcacactgccatcagggtttagttgacctcataatggtgcccactttctcgactttggccaggatttccttcaaagaaaacgactttccttcatttccctaagcctgtggcccaaatggtggaccagaatgatggtgggagggggcaacccccagtagctttgcctgcttttataaagttgaacaaattgaatttagacattcaggctaacctgcctttcttagtactcctttgttggcatgggcaggggttgagtcagcagaagtggaccaaaggattcctctgaataaagttatttaaattga

SEQ ID NO: 424809 - DNA, 1944 bp, Homo sapiens
tgactggaaaaccggaagtgaaatcgtggcagccgcctcggccgccgcaatgcagagagaggagaagcagcttgaggcatcattagatgcactgctgagtcaagtggctgatctgaagaactctctggggagtttcatttgcaagttggagaacgagtatggccggctgacctggccatctgtcctggacagctttgccttgctttctggacagctgaacactctgaacaaggtcttgaagcatgaaaaaacaccgctgttccgtaaccaggtcatcattcctctggtgttgtctccagaccgagatgaagatctcatgcggcagactgaaggacgggtgcctgttttcagccatgaggtagtccctgaccatctgagaaccaagcctgaccctgaagtggaagaacaggagaagcaactgacgacagatgctgcccgcattggtgcagatgcagcccagaagcagatccagagcttgaataaaatgtgttcaaaccttctggaggtctccggccgaacaagcagacctttaaccctacagacactaatgccttggtggcagctgttgcctttgggaaaggactatctaattggagaccttcaggcagcagtggtcctggccaggcaggccagccaggagctgggacgatccttgcaggaacctcaggattacagcaggtgcagatggcaggagctccaagccagcagcagccaatgctcagtggggtacaaatggctcaggcaggtcaaccagggaaaatgccaagtggaataaaaaccaacatcaagtcggcttccatgcatccctaccagcggtgagtgtggctggcaacctcgactccctggtgctctttgcagagttgggcagtgaaattaccttttgctcaaggctcacctagatgggtacaataaaaagaacatgggctttcagcagcagacaaatcccacttccaccactgactagctgtgtgaccttggacaagtgacctaatttttctgagcctgtttctcatttgtaaatggtgataatacctacctcatagggttgttgtgaggattaaaatgaggaaatgaatgtaaagcacttagtacagtatatgaaataatgggtattcaataaatgatagtttctacagatccttctccccaccaccctccacagtccttgatccagaacttaccctaatctgatactgcctcacgtcaatggtgagctgatggacacaagatcaaataaggctatgcttattttgtgctgccagaaactgtagcaacctctgtgttcttagaggcacactgtttttgcaggccctcctgcctgggtttcattctggctatccctctaaggcgcaaggtgaagaagcttctgggccaggaaggaaaaaaaaatgcccacctgcagctctggtgaagcttgggcctgctctcctttccatcctctaaggagccaacttggcttttacctgtcaaatagtcataaagtcccctatcctttaccccaccttatacacacgaggctttctcaggaagtggctctgccaggcaggactatgtgggaaagggtttttccttagcacacgaaaaagccccttcccctggattcatgtttcttattttggagggagaagggaattgcacttcacactgccatcagggtttagttgacctcataatggtgcccactttctcgactttggccaggatttccttcaaagaaaacgactttccttcatttccctaagcctgtggcccaaatggtggaccagaatgatggtgggagggggcaacccccagtagctttgcctgcttttataaagttgaacaaattgaatttagacattcaggctaacctgcctttcttagtactcctttgttggcatgggcaggggttgagtcagcagaagtggaccaaaggattcctctgaataaagttatttaaattga

SEQ ID NO: 424810 - DNA, 2213 bp, Homo sapiens
ggaaggggtacaacattcttacaccttgttaccaccaccaggccatctgtcctggacagctttgccttgctttctggacagctgaacactctgaacaaggtcttgaagcatgaaaaaacaccgctgttccgtaaccaggtcatcattcctctggtgttgtctccagaccgagatgaagatctcatgcggcagactgaaggacgggtgcctgttttcagccatgaggtagtccctgaccatctgagaaccaagcctgaccctgaagtggaagaacaggagaagcaactgacgacagatgctgcccgcattggtgcagatgcagcccagaagcagatccagagcttgaataaaatgtgttcaaaccttctggagaaaatcagcaaagaggagcgagaatcagagagtggagggtatgatgggactggtggctaaacagagaaggagaggtatataagatcactggaatgggaatggttgttttggaagtagtgaagttaggacacaagggtgaactgctttggggtttgtatccattctgttagccttttgtatttaaggccagcactgaagcagtggaggaaatgggcaaagtaagaagagagaattctgagataggcttgggggtcctctggctctttttctgggctgtgagggagtctagatgttgctgaattcagaactccaaaccctggcactcatactggtcttccagctgccacgttcagtcctgcatcagaagcatacttcaggatccccattactttttcttcaggtgtctccggccgaacaagcagacctttaaccctacagacactaatgccttggtggcagctgttgcctttgggaaaggactatctaattggagaccttcaggcagcagtggtcctggccaggcaggccagccaggagctgggacgatccttgcaggaacctcaggattacagcaggtgcagatggcaggagctccaagccagcagcagccaatgctcagtggggtacaaatggctcaggcaggtcaaccagggaaaatgccaagtggaataaaaaccaacatcaagtcggcttccatgcatccctaccagcggtgagtgtggctggcaacctcgactccctggtgctctttgcagagttgggcagtgaaattaccttttgctcaaggctcacctagatgggtacaataaaaagaacatgggctttcagcagcagacaaatcccacttccaccactgactagctgtgtgaccttggacaagtgacctaatttttctgagcctgtttctcatttgtaaatggtgataatacctacctcatagggttgttgtgaggattaaaatgaggaaatgaatgtaaagcacttagtacagtatatgaaataatgggtattcaataaatgatagtttctacagatccttctccccaccaccctccacagtccttgatccagaacttaccctaatctgatactgcctcacgtcaatggtgagctgatggacacaagatcaaataaggctatgcttattttgtgctgccagaaactgtagcaacctctgtgttcttagaggcacactgtttttgcaggccctcctgcctgggtttcattctggctatccctctaaggcgcaaggtgaagaagcttctgggccaggaaggaaaaaaaaatgcccacctgcagctctggtgaagcttgggcctgctctcctttccatcctctaaggagccaacttggcttttacctgtcaaatagtcataaagtcccctatcctttaccccaccttatacacacgaggctttctcaggaagtggctctgccaggcaggactatgtgggaaagggtttttccttagcacacgaaaaagccccttcccctggattcatgtttcttattttggagggagaagggaattgcacttcacactgccatcagggtttagttgacctcataatggtgcccactttctcgactttggccaggatttccttcaaagaaaacgactttccttcatttccctaagcctgtggcccaaatggtggaccagaatgatggtgggagggggcaacccccagtagctttgcctgcttttataaagttgaacaaattgaatttagacattcaggctaacctgcctttcttagtactcctttgttggcatgggcaggggttgagtcagcagaagtggaccaaaggattcctctgaataaagttatttaaattga

SEQ ID NO: 424811 - DNA, 1549 bp, Homo sapiens
tgactggaaaaccggaagtgaaatcgtggcagccgcctcggccgccgcaatgcagccctcctttctatgtgtcatactcgtttatctgggtgaccaacctgttcctattggtgcagagagaggagaagcagcttgaggcatcattagatgcactgctgagtcaagtggctgatctgaagaactctctggggagtttcatttgcaagttggagaacgagtatggccggctgacctggccatctgtcctggacagctttgccttgctttctggacagctgaacactctgaacaaggtcttgaagcatgaaaaaacaccgctgttccgtaaccaggtcatcattcctctggtgttgtctccagaccgagatgaagatctcatgcggcagactgaaggacgggtgcctgttttcagccatgaggtagtccctgaccatctgagaaccaagcctgaccctgaagtggaagaacaggagaagcaactgacgacagatgctgcccgcattggtgcagatgcagcccagaagcagatccagagcttgaataaaatgtgttcaaaccttctggagaaaatcagcaaagaggagcgagaatcagagagtggaggtctccggccgaacaagcagacctttaaccctacagacactaatgccttggtggcagctgttgcctttgggaaaggactatctaattggagaccttcaggcagcagtggtcctggccaggcaggccagccaggagctgggacgatccttgcaggaacctcaggattacagcaggtgcagatggcaggagctccaagccagcagcagccaatgctcagtggggtacaaatggctcaggcaggtcaaccagggaaaatgccaagtggaataaaaaccaacatcaagtcggcttccatgcatccctaccagcggccctcctgcctgggtttcattctggctatccctctaaggcgcaaggtgaagaagcttctgggccaggaaggaaaaaaaaatgcccacctgcagctctggtgaagcttgggcctgctctcctttccatcctctaaggagccaacttggcttttacctgtcaaatagtcataaagtcccctatcctttaccccaccttatacacacgaggctttctcaggaagtggctctgccaggcaggactatgtgggaaagggtttttccttagcacacgaaaaagccccttcccctggattcatgtttcttattttggagggagaagggaattgcacttcacactgccatcagggtttagttgacctcataatggtgcccactttctcgactttggccaggatttccttcaaagaaaacgactttccttcatttccctaagcctgtggcccaaatggtggaccagaatgatggtgggagggggcaacccccagtagctttgcctgcttttataaagttgaacaaattgaatttagacattcaggctaacctgcctttcttagtactcctttgttggcatgggcaggggttgagtcagcagaagtggaccaaaggattcctctgaataaagttatttaaattga

SEQ ID NO: 424812 - DNA, 1814 bp, Homo sapiens
tgactggaaaaccggaagtgaaatcgtggcagccgcctcggccgccgcaatgcagagagaggagaagcagcttgaggcatcattagatgcactgctgagtcaagtggctgatctgaagaactctctggggagtttcatttgcaagttggagaacgagtatggccggctgacctggccatctgtcctggacagctttgccttgctttctggacagctgaacactctgaacaaggtcttgaagcatgaaaaaacaccgctgttccgtaaccaggtcatcattcctctggtgttgtctccagaccgagatgaagatctcatgcggcagactgaaggacgggtgcctgttttcagccatgaggtagtccctgaccatctgagaaccaagcctgaccctgaagtggaagaacaggagaagcaactgacgacagatgctgcccgcattggtgcagatgcagcccagaagcagatccagagcttgaataaaatgtgttcaaaccttctggagaaaatcagcaaagaggagcgagaatcagagagtggaggtctccggccgaacaagcagacctttaaccctacagacactaatgctcagtggggtacaaatggctcaggcaggtcaaccagggaaaatgccaagtggaataaaaaccaacatcaagtcggcttccatgcatccctaccagcggtgagtgtggctggcaacctcgactccctggtgctctttgcagagttgggcagtgaaattaccttttgctcaaggctcacctagatgggtacaataaaaagaacatgggctttcagcagcagacaaatcccacttccaccactgactagctgtgtgaccttggacaagtgacctaatttttctgagcctgtttctcatttgtaaatggtgataatacctacctcatagggttgttgtgaggattaaaatgaggaaatgaatgtaaagcacttagtacagtatatgaaataatgggtattcaataaatgatagtttctacagatccttctccccaccaccctccacagtccttgatccagaacttaccctaatctgatactgcctcacgtcaatggtgagctgatggacacaagatcaaataaggctatgcttattttgtgctgccagaaactgtagcaacctctgtgttcttagaggcacactgtttttgcaggccctcctgcctgggtttcattctggctatccctctaaggcgcaaggtgaagaagcttctgggccaggaaggaaaaaaaaatgcccacctgcagctctggtgaagcttgggcctgctctcctttccatcctctaaggagccaacttggcttttacctgtcaaatagtcataaagtcccctatcctttaccccaccttatacacacgaggctttctcaggaagtggctctgccaggcaggactatgtgggaaagggtttttccttagcacacgaaaaagccccttcccctggattcatgtttcttattttggagggagaagggaattgcacttcacactgccatcagggtttagttgacctcataatggtgcccactttctcgactttggccaggatttccttcaaagaaaacgactttccttcatttccctaagcctgtggcccaaatggtggaccagaatgatggtgggagggggcaacccccagtagctttgcctgcttttataaagttgaacaaattgaatttagacattcaggctaacctgcctttcttagtactcctttgttggcatgggcaggggttgagtcagcagaagtggaccaaaggattcctctgaataaagttatttaaattga

SEQ ID NO: 424813 - DNA, 1101 bp, Homo sapiens
tgactggaaaaccggaagtgaaatcgtggcagccgcctcggccgccgcaatgcagagagaggagaagcagcttgaggcatcattagatgcactgctgagtcaagtggctgatctgaagaactctctggggagtttcatttgcaagttggagaacgagtatggccggctgacctggccatctgtcctggacagctttgccttgctttctggacagctgaacactctgaacaaggtcttgaagcatgaaaaaacaccgctgttccgtaaccaggtcatcattcctctggtgttgtctccagaccgagatgaagatctcatgcggcagactgaaggacgggtgcctgttttcagccatgaggtagtccctgaccatctgagaaccaagcctgaccctgaagtggaagaacaggagaagcaactgacgacagatgctgcccgcattggtgcagatgcagcccagaagcagatccagagcttgaataaaatgtgttcaaaccttctggagaaaatcagcaaagaggagcgagaatcagagagtggaggtctccggccgaacaagcagacctttaaccctacagacactaatgccttggtggcagctgttgcctttgggaaaggactatctaattggagaccttcaggcagcagtggtcctggccaggcaggccagccaggagctgggacgatccttgcaggaacctcaggattacagcaggtgcagatggcaggagctccaagccagcagcagccaatgctcagtggggtacaaatggctcaggcaggtcaaccagggaaaatgccaagtggaataaaaaccaacatcaagtcggcttccatgcatccctaccagcgagtccttagccaggatggaggctgttgtgaacttgtaccaagaggtgatgaagcacgcagatccccggatccagggctaccctctgatggggtcccccttgctaatgacctccattctcctgacctacgtgtacttcgttctctcacttgggcctcgcatcatggctaatcggaagcccttccagctccgtggcttcatgattgtctacaacttctcactggtggcactctccctctacattgtctatg

SEQ ID NO: 424814 - DNA, 1981 bp, Homo sapiens
tgactggaaaaccggaagtgaaatcgtggcagccgcctcggccgccgcaatgcagagagaggagaagcagcttgaggcatcattagatgcactgctgagtcaagtggctgatctgaagaactctctggggagtttcatttgcaagttggagaacgagtatggccggctgacctggccatctgtcctggacagctttgccttgctttctggacagctgaacactctgaacaaggtcttgaagcatgaaaaaacaccgctgttccgtaaccaggtcatcattcctctggtgttgtctccagaccgagatgaagatctcatgcggcagactgaaggacgggtgcctgttttcagccatgaggtagtccctgaccatctgagaaccaagcctgaccctgaagtggaagaacaggagaagcaactgacgacagatgctgcccgcattggtgcagatgcagcccagaagcagatccagagcttgaataaaatgtgttcaaaccttctggagaaaatcagcaaagaggagcgagaatcagagagtggaggtctccggccgaacaagcagacctttaaccctacagacactaatgccttggtggcagctgttgcctttgggaaaggactatctaattggagaccttcaggcagcagtggtcctggccaggcaggccagccaggagctgggacgatccttgcaggaacctcaggattacagcaggtgcagatggcaggagctccaagccagcagcagccaatgctcagtggggtacaaatggctcaggcaggtcaaccagggaaaatgccaagtggaataaaaaccaacatcaagtcggcttccatgcatccctaccagcggtgagtgtggctggcaacctcgactccctggtgctctttgcagagttgggcagtgaaattaccttttgctcaaggctcacctagatgggtacaataaaaagaacatgggctttcagcagcagacaaatcccacttccaccactgactagctgtgtgaccttggacaagtgacctaatttttctgagcctgtttctcatttgtaaatggtgataatacctacctcatagggttgttgtgaggattaaaatgaggaaatgaatgtaaagcacttagtacagtatatgaaataatgggtattcaataaatgatagtttctacagatccttctccccaccaccctccacagtccttgatccagaacttaccctaatctgatactgcctcacgtcaatggtgagctgatggacacaagatcaaataaggctatgcttattttgtgctgccagaaactgtagcaacctctgtgttcttagaggcacactgtttttgcaggccctcctgcctgggtttcattctggctatccctctaaggcgcaaggtgaagaagcttctgggccaggaaggaaaaaaaaatgcccacctgcagctctggtgaagcttgggcctgctctcctttccatcctctaaggagccaacttggcttttacctgtcaaatagtcataaagtcccctatcctttaccccaccttatacacacgaggctttctcaggaagtggctctgccaggcaggactatgtgggaaagggtttttccttagcacacgaaaaagccccttcccctggattcatgtttcttattttggagggagaagggaattgcacttcacactgccatcagggtttagttgacctcataatggtgcccactttctcgactttggccaggatttccttcaaagaaaacgactttccttcatttccctaagcctgtggcccaaatggtggaccagaatgatggtgggagggggcaacccccagtagctttgcctgcttttataaagttgaacaaattgaatttagacattcaggctaacctgcctttcttagtactcctttgttggcatgggcaggggttgagtcagcagaagtggaccaaaggattcctctgaataaagttatttaaattga

SEQ ID NO: 424815 - DNA, 2167 bp, Homo sapiens
aggcatagattaggaggtgatggggaaaaggaatcagttggtggaaggacttggggtcaggcaaacaggttggaaggtctcagggttgatgctgtctataacccaaataccaaagatagaaaacaacctggctatcctatgccaatgagatcctgtgttacctgactggtgttgcacaccatctccttggctttccagccctcctttctatgtgtcatactcgtttatctgggtgaccaacctgttcctattggtgcagagagaggagaagcagcttgaggcatcattagatgcactgctgagtcaagtggctgatctgaagaactctctggggagtttcatttgcaagttggagaacgagtatggccggctgacctgctttgccttgctttctggacagctgaacactctgaacaaggtcttgaagcatgaaaaaacaccgctgttccgtaaccaggtcatcattcctctggtgttgtctccagaccgagatgaagatctcatgcggcagactgaaggacgggtgcctgttttcagccatgaggtagtccctgaccatctgagaaccaagcctgaccctgaagtggaagaacaggagaagcaactgacgacagatgctgcccgcattggtgcagatgcagcccagaagcagatccagagcttgaataaaatgtgttcaaaccttctggagaaaatcagcaaagaggagcgagaatcagagagtggaggtctccggccgaacaagcagacctttaaccctacagacactaatgccttggtggcagctgttgcctttgggaaaggactatctaattggagaccttcaggcagcagtggtcctggccaggcaggccagccaggagctgggacgatccttgcaggaacctcaggattacagcaggtgcagatggcaggagctccaagccagcagcagccaatgctcagtggggtacaaatggctcaggcaggtcaaccagggaaaatgccaagtggaataaaaaccaacatcaagtcggcttccatgcatccctaccagcggtgagtgtggctggcaacctcgactccctggtgctctttgcagagttgggcagtgaaattaccttttgctcaaggctcacctagatgggtacaataaaaagaacatgggctttcagcagcagacaaatcccacttccaccactgactagctgtgtgaccttggacaagtgacctaatttttctgagcctgtttctcatttgtaaatggtgataatacctacctcatagggttgttgtgaggattaaaatgaggaaatgaatgtaaagcacttagtacagtatatgaaataatgggtattcaataaatgatagtttctacagatccttctccccaccaccctccacagtccttgatccagaacttaccctaatctgatactgcctcacgtcaatggtgagctgatggacacaagatcaaataaggctatgcttattttgtgctgccagaaactgtagcaacctctgtgttcttagaggcacactgtttttgcaggccctcctgcctgggtttcattctggctatccctctaaggcgcaaggtgaagaagcttctgggccaggaaggaaaaaaaaatgcccacctgcagctctggtgaagcttgggcctgctctcctttccatcctctaaggagccaacttggcttttacctgtcaaatagtcataaagtcccctatcctttaccccaccttatacacacgaggctttctcaggaagtggctctgccaggcaggactatgtgggaaagggtttttccttagcacacgaaaaagccccttcccctggattcatgtttcttattttggagggagaagggaattgcacttcacactgccatcagggtttagttgacctcataatggtgcccactttctcgactttggccaggatttccttcaaagaaaacgactttccttcatttccctaagcctgtggcccaaatggtggaccagaatgatggtgggagggggcaacccccagtagctttgcctgcttttataaagttgaacaaattgaatttagacattcaggctaacctgcctttcttagtactcctttgttggcatgggcaggggttgagtcagcagaagtggaccaaaggattcctctgaataaagttatttaaattga

SEQ ID NO: 424816 - DNA, 2145 bp, Homo sapiens
aggcatagattaggaggtgatggggaaaaggaatcagttggtggaaggacttggggtcaggcaaacaggttggaaggtctcagggttgatgctgtctataacccaaataccaaagatagaaaacaacctggctatcctatgccaatgagatcctgtgttacctgactggtgttgcacaccatctccttggctttccagccctcctttctatgtgtcatactcgtttatctgggtgaccaacctgttcctattggtgcagagagaggagaagcagcttgaggcatcattagatgcactgctgagtcaagtggctgatctgaagaactctctggggagtttcatttgcaagttggagaacgagtatggccggctgacctgctgaacactctgaacaaggtcttgaagcatgaaaaaacaccgctgttccgtaaccaggtcatcattcctctggtgttgtctccagaccgagatgaagatctcatgcggcagactgaaggacgggtgcctgttttcagccatgaggtagtccctgaccatctgagaaccaagcctgaccctgaagtggaagaacaggagaagcaactgacgacagatgctgcccgcattggtgcagatgcagcccagaagcagatccagagcttgaataaaatgtgttcaaaccttctggagaaaatcagcaaagaggagcgagaatcagagagtggaggtctccggccgaacaagcagacctttaaccctacagacactaatgccttggtggcagctgttgcctttgggaaaggactatctaattggagaccttcaggcagcagtggtcctggccaggcaggccagccaggagctgggacgatccttgcaggaacctcaggattacagcaggtgcagatggcaggagctccaagccagcagcagccaatgctcagtggggtacaaatggctcaggcaggtcaaccagggaaaatgccaagtggaataaaaaccaacatcaagtcggcttccatgcatccctaccagcggtgagtgtggctggcaacctcgactccctggtgctctttgcagagttgggcagtgaaattaccttttgctcaaggctcacctagatgggtacaataaaaagaacatgggctttcagcagcagacaaatcccacttccaccactgactagctgtgtgaccttggacaagtgacctaatttttctgagcctgtttctcatttgtaaatggtgataatacctacctcatagggttgttgtgaggattaaaatgaggaaatgaatgtaaagcacttagtacagtatatgaaataatgggtattcaataaatgatagtttctacagatccttctccccaccaccctccacagtccttgatccagaacttaccctaatctgatactgcctcacgtcaatggtgagctgatggacacaagatcaaataaggctatgcttattttgtgctgccagaaactgtagcaacctctgtgttcttagaggcacactgtttttgcaggccctcctgcctgggtttcattctggctatccctctaaggcgcaaggtgaagaagcttctgggccaggaaggaaaaaaaaatgcccacctgcagctctggtgaagcttgggcctgctctcctttccatcctctaaggagccaacttggcttttacctgtcaaatagtcataaagtcccctatcctttaccccaccttatacacacgaggctttctcaggaagtggctctgccaggcaggactatgtgggaaagggtttttccttagcacacgaaaaagccccttcccctggattcatgtttcttattttggagggagaagggaattgcacttcacactgccatcagggtttagttgacctcataatggtgcccactttctcgactttggccaggatttccttcaaagaaaacgactttccttcatttccctaagcctgtggcccaaatggtggaccagaatgatggtgggagggggcaacccccagtagctttgcctgcttttataaagttgaacaaattgaatttagacattcaggctaacctgcctttcttagtactcctttgttggcatgggcaggggttgagtcagcagaagtggaccaaaggattcctctgaataaagttatttaaattga

SEQ ID NO: 424817 - DNA, 1848 bp, Homo sapiens
ggaaggggtacaacattcttacaccttgttaccaccaccaggccatctgtcctggacagctttgccttgctttctggacagctgaacactctgaacaaggtcttgaagcatgaaaaaacaccgctgttccgtaaccaggtcatcattcctctggtgttgtctccagaccgagatgaagatctcatgcggcagactgaaggacgggtgcctgttttcagccatgaggtagtccctgaccatctgagaaccaagcctgaccctgaagtggaagaacaggagaagcaactgacgacagatgctgcccgcattggtgcagatgcagcccagaagcagatccagagcttgaataaaatgtgttcaaaccttctggagaaaatcagcaaagaggagcgagaatcagagagtggaggtctccggccgaacaagcagacctttaaccctacagacactaatgccttggtggcagctgttgcctttgggaaaggactatctaattggagaccttcaggcagcagtggtcctggccaggcaggccagccaggagctgggacgatccttgcaggaacctcaggattacagcaggtgcagatggcaggagctccaagccagcagcagccaatgctcagtggggtacaaatggctcaggcaggtcaaccagggaaaatgccaagtggaataaaaaccaacatcaagtcggcttccatgcatccctaccagcggtgagtgtggctggcaacctcgactccctggtgctctttgcagagttgggcagtgaaattaccttttgctcaaggctcacctagatgggtacaataaaaagaacatgggctttcagcagcagacaaatcccacttccaccactgactagctgtgtgaccttggacaagtgacctaatttttctgagcctgtttctcatttgtaaatggtgataatacctacctcatagggttgttgtgaggattaaaatgaggaaatgaatgtaaagcacttagtacagtatatgaaataatgggtattcaataaatgatagtttctacagatccttctccccaccaccctccacagtccttgatccagaacttaccctaatctgatactgcctcacgtcaatggtgagctgatggacacaagatcaaataaggctatgcttattttgtgctgccagaaactgtagcaacctctgtgttcttagaggcacactgtttttgcaggccctcctgcctgggtttcattctggctatccctctaaggcgcaaggtgaagaagcttctgggccaggaaggaaaaaaaaatgcccacctgcagctctggtgaagcttgggcctgctctcctttccatcctctaaggagccaacttggcttttacctgtcaaatagtcataaagtcccctatcctttaccccaccttatacacacgaggctttctcaggaagtggctctgccaggcaggactatgtgggaaagggtttttccttagcacacgaaaaagccccttcccctggattcatgtttcttattttggagggagaagggaattgcacttcacactgccatcagggtttagttgacctcataatggtgcccactttctcgactttggccaggatttccttcaaagaaaacgactttccttcatttccctaagcctgtggcccaaatggtggaccagaatgatggtgggagggggcaacccccagtagctttgcctgcttttataaagttgaacaaattgaatttagacattcaggctaacctgcctttcttagtactcctttgttggcatgggcaggggttgagtcagcagaagtggaccaaaggattcctctgaataaagttatttaaattga

SEQ ID NO: 424818 - DNA, 1981 bp, Homo sapiens
tgactggaaaaccggaagtgaaatcgtggcagccgcctcggccgccgcaatgcagccctcctttctatgtgtcatactcgtttatctgggtgaccaacctgttcctattggtgcagagagaggagaagcagcttgaggcatcattagatgcactgctgagtcaagtggctgatctgaagaactctctggggagtttcatttgcaagttggagaacgagtatggccggctgacctggccatctgtcctggacagctttgccttgctttctggacagctgaacactctgaacaaggtcttgaagcatgaaaaaacaccgctcggcagactgaaggacgggtgcctgttttcagccatgaggtagtccctgaccatctgagaaccaagcctgaccctgaagtggaagaacaggagaagcaactgacgacagatgctgcccgcattggtgcagatgcagcccagaagcagatccagagcttgaataaaatgtgttcaaaccttctggagaaaatcagcaaagaggagcgagaatcagagagtggaggtctccggccgaacaagcagacctttaaccctacagacactaatgccttggtggcagctgttgcctttgggaaaggactatctaattggagaccttcaggcagcagtggtcctggccaggcaggccagccaggagctgggacgatccttgcaggaacctcaggattacagcaggtgcagatggcaggagctccaagccagcagcagccaatgctcagtggggtacaaatggctcaggcaggtcaaccagggaaaatgccaagtggaataaaaaccaacatcaagtcggcttccatgcatccctaccagcggtgagtgtggctggcaacctcgactccctggtgctctttgcagagttgggcagtgaaattaccttttgctcaaggctcacctagatgggtacaataaaaagaacatgggctttcagcagcagacaaatcccacttccaccactgactagctgtgtgaccttggacaagtgacctaatttttctgagcctgtttctcatttgtaaatggtgataatacctacctcatagggttgttgtgaggattaaaatgaggaaatgaatgtaaagcacttagtacagtatatgaaataatgggtattcaataaatgatagtttctacagatccttctccccaccaccctccacagtccttgatccagaacttaccctaatctgatactgcctcacgtcaatggtgagctgatggacacaagatcaaataaggctatgcttattttgtgctgccagaaactgtagcaacctctgtgttcttagaggcacactgtttttgcaggccctcctgcctgggtttcattctggctatccctctaaggcgcaaggtgaagaagcttctgggccaggaaggaaaaaaaaatgcccacctgcagctctggtgaagcttgggcctgctctcctttccatcctctaaggagccaacttggcttttacctgtcaaatagtcataaagtcccctatcctttaccccaccttatacacacgaggctttctcaggaagtggctctgccaggcaggactatgtgggaaagggtttttccttagcacacgaaaaagccccttcccctggattcatgtttcttattttggagggagaagggaattgcacttcacactgccatcagggtttagttgacctcataatggtgcccactttctcgactttggccaggatttccttcaaagaaaacgactttccttcatttccctaagcctgtggcccaaatggtggaccagaatgatggtgggagggggcaacccccagtagctttgcctgcttttataaagttgaacaaattgaatttagacattcaggctaacctgcctttcttagtactcctttgttggcatgggcaggggttgagtcagcagaagtggaccaaaggattcctctgaataaagttatttaaattga

SEQ ID NO: 424819 - DNA, 2005 bp, Homo sapiens
tgactggaaaaccggaagtgaaatcgtggcagccgcctcggccgccgcaatgcagccctcctttctatgtgtcatactcgtttatctgggtgaccaacctgttcctattggtgcagagagaggagaagcagcttgaggcatcattagatgcactgctgagtcaagtggctgatctgaagaactctctggggagtttcatttgcaagttggagaacgagtatggccggctgacctggccatctgtcctggacagctttgccttgctttctggacagctgaacactctgaacaaggtcttgaagcatgaaaaaacaccgctgttccgtaaccaggtcatcattcctctggtgttgtctccagaccgagatgaagatctcatgcggcagactgaaggacgggtgcctgttttcagccatgaggtagtccctgaccatctgagaaccaagcctgaccctgaagtggaagaacaggagaagcaactgacgacagatgctgcccgcattggtgcagatgcagcccagaagcagatccagagcttgaataaaatgtgttcaaaccttctggaggtctccggccgaacaagcagacctttaaccctacagacactaatgccttggtggcagctgttgcctttgggaaaggactatctaattggagaccttcaggcagcagtggtcctggccaggcaggccagccaggagctgggacgatccttgcaggaacctcaggattacagcaggtgcagatggcaggagctccaagccagcagcagccaatgctcagtggggtacaaatggctcaggcaggtcaaccagggaaaatgccaagtggaataaaaaccaacatcaagtcggcttccatgcatccctaccagcggtgagtgtggctggcaacctcgactccctggtgctctttgcagagttgggcagtgaaattaccttttgctcaaggctcacctagatgggtacaataaaaagaacatgggctttcagcagcagacaaatcccacttccaccactgactagctgtgtgaccttggacaagtgacctaatttttctgagcctgtttctcatttgtaaatggtgataatacctacctcatagggttgttgtgaggattaaaatgaggaaatgaatgtaaagcacttagtacagtatatgaaataatgggtattcaataaatgatagtttctacagatccttctccccaccaccctccacagtccttgatccagaacttaccctaatctgatactgcctcacgtcaatggtgagctgatggacacaagatcaaataaggctatgcttattttgtgctgccagaaactgtagcaacctctgtgttcttagaggcacactgtttttgcaggccctcctgcctgggtttcattctggctatccctctaaggcgcaaggtgaagaagcttctgggccaggaaggaaaaaaaaatgcccacctgcagctctggtgaagcttgggcctgctctcctttccatcctctaaggagccaacttggcttttacctgtcaaatagtcataaagtcccctatcctttaccccaccttatacacacgaggctttctcaggaagtggctctgccaggcaggactatgtgggaaagggtttttccttagcacacgaaaaagccccttcccctggattcatgtttcttattttggagggagaagggaattgcacttcacactgccatcagggtttagttgacctcataatggtgcccactttctcgactttggccaggatttccttcaaagaaaacgactttccttcatttccctaagcctgtggcccaaatggtggaccagaatgatggtgggagggggcaacccccagtagctttgcctgcttttataaagttgaacaaattgaatttagacattcaggctaacctgcctttcttagtactcctttgttggcatgggcaggggttgagtcagcagaagtggaccaaaggattcctctgaataaagttatttaaattga

SEQ ID NO: 424820 - DNA, 1171 bp, Homo sapiens
tgactggaaaaccggaagtgaaatcgtggcagccgcctcggccgccgcaatgcagagagaggagaagcagcttgaggcatcattagatgcactgctgagtcaagtggctgatctgaagaactctctggggagtttcatttgcaagttggagaacgagtatggccggctgacctggccatctgtcctggacagctttgccttgctttctggacagctgaacactctgaacaaggtcttgaagcatgaaaaaacaccgctgttccgtaaccaggtcatcattcctctggtgttgtctccagaccgagatgaagatctcatgcggcagactgaaggacgggtgcctgttttcagccatgaggtagtccctgaccatctgagaaccaagcctgaccctgaagtggaagaacaggagaagcaactgacgacagatgctgcccgcattggtgcagatgcagcccagaagcagatccagagcttgaataaaatgtgttcaaaccttctggagaaaatcagcaaagaggagcgagaatcagagagtggaggtctccggccgaacaagcagacctttaaccctacagacactaatgccttggtggcagctgttgcctttgggaaaggactatctaattggagaccttcaggcagcagtggtcctggccaggcaggccagccaggagctgggacgatccttgcaggaacctcaggattacagcaggtgcagatggcaggagctccaagccagcagcagccaatgctcagtggggtacaaatggctcaggcaggtcaaccagggaaaatgccaagtggaataaaaaccaacatcaagtcggcttccatgcatccctaccagcggtgagtgtggctggcaacctcgactccctggtgctctttgcagagttgggcagtgaaattaccttttgctcaaggctcacctagatgggtacaataaaaagaacatgggctttcagcagcagacaaatcccacttccaccactgactagctgtgtgaccttggacaagtgacctaatttttctgagcctgtttctcatttgtaaatggtgataatacctacctcatagggttgttgtgaggattaaaatgaggaaatgaatgtaaagcacttagtacagtatatgaaataatgggtattcaataaatgatagtttctac

SEQ ID NO: 424821 - DNA, 2115 bp, Homo sapiens
tgactggaaaaccggaagtgaaatcgtggcagccgcctcggccgccgcaatgcagagagaggagaagcagcttgaggcatcattagatgcactgctgagtcaagtggctgatctgaagaactctctggggagtttcatttgcaagttggagaacgagtatggccggctgacctggccatctgtcctggacagctttgccttgctttctggacagctgaacactctgaacaaggtcttgaagcatgaaaaaacaccgctgttccgtaaccaggtcatcattcctctggtgttgtctccagaccgagatgaagatctcatgcggcagactgaaggacgggtgcctgttttcagccatgaggtagtccctgaccatctgagaaccaagcctgaccctgaagtggaagaacaggagaagcaactgacgacagatgctgcccgcattggtgcagatgcagcccagaagcagatccagagcttgaataaaatgtgttcaaaccttctggagaaaatcagcaaagaggagcgagaatcagagagtggaggtctccggccgaacaagcagacctttaaccctacagacactaatgccttggtggcagctgttgcctttgggaaaggactatctaattggagaccttcaggcagcagtggtcctggccaggcaggccagccaggagctgggacgatccttgcaggaacctcaggattacagcaggtgcagatggcaggagctccaagccagcagcagccaatgctcagtggggtacaaatggctcaggcaggtcaaccagggaaaatgccaagtggaataaaaaccaacatcaagtcggcttccatgcatccctaccagcggtgagtgtggctggcaacctcgactccctggtgctctttgcagagttgggcagtgaaattaccttttgctcaaggctcacctagatgggtacaataaaaagaacatgggctttcagcagcagacaaatcccacttccaccactgactagctgtgtgaccttggacaagtgacctaatttttctgagcctgtttctcatttgtaaatggtgataatacctacctcatagggttgttgtgaggattaaaatgaggaaatgcaaacacaaaaaaacaaaaacaaaaaacaaaaaaaaaaaaaaacaacaaagagggggacaaaaaaaaaacaaacaaaaacaacaaaaaaacagtgtcggggggcgccgcccggcccccccagaaaaacttgttcaaaacaacacggggggggggcggcggcggggccacacaaggatgaacgaaagaacacaagagtggggcaacaagcaggtgcgtaccacacagaaaagaaccgcggcggaacacaaagaagcgagggggggggcgcttctcccaccaacaaaaaaaagaagcggcgcggggggggaacacacagcaggcggctgttagcggaagaaaacacacaccagaacaggagggaggcagctacgaggcgagcgaacaccaacagaggaggggcgaaaaacaaacaacagagaggagagcagaccacaaaggagagcgcaagagaaataaataaaaaaacgcccccccgcccgggccgggggggcggctggacacgcacacgacagaacgaagaacacagaaaaccaaacaataagaaaaacgaccaacacaccaaagcaaggacgaaaaaacaaaagaagcaaaggaggaaaagagcagacagcaaccaacaaggaaacagaaaaagagcggagagaagaaacaagaaaaacaaccgaagaaacaccacacaagtgcaagaagggagaaaaagaaagagaggcgcagaaaagaagaggaagagcagggagcagagagagagaaagaagagagaagacaagagaacagaggaggcacgaaagcagagaacaaaaggaagggacggagagggcaagaggaagcagaagagaagagcgaggagagaagacgagagaggagagaggagcagaggacgagcgagagagagctagagagaagagaagaagagaaagagagcgaagggaaggaaaaaagaaagagaagacgaaaaaagaagagacacagaaagcaaaacagaacgagaaagagaagagagaagg

SEQ ID NO: 424822 - DNA, 949 bp, Homo sapiens
cacgcaaagcagtgtgggttgattctgaggtgcactgtgggaaagagcttgtcgctgcggtgttgctgttggagactcgattgttggtgacagcgaaagaacgataacaaaatgccggagcgagatagtgagccgttctccaaccctttggcccccgatggccacgatgtggatgatcctcactccttccaccaatcaaaactcaccaatgaagacttcaggaaacttctcatgacccccagggctgcacctacctctgcaccaccttctaagtcacgtcaccatgagatgccaagggagtacaatgaggatgaagacccagctgcacgaaggaggaaaaagaaaagttattatgccaagctacgccaacaagaaattgagagagagagagagctagcagagaagtaccgggatcgtgccaaggaacggagagatggagtgaacaaagattatgaagaaaccgagcttatcagcaccacagctaactatagggctgttggccccactgctgaggcggacaaatcagctgcagagaagagaagacagttgatccaggagtccaaattcttgggtggtgacatggaacacacccatttggtgaaaggcttggattttgctctgcttcaaaaggtacgagctgagattgccagcaaagagaaagaggaagaggaactgatggaaaagccccagaaagaaaccaagaaagatgaggatcctgaaaataaaattgaatttaaaacacgtctgggtgagtacagtttctatactagtgactatgcattctggatgaattgtacggaatttaatgctctgggaaggatatgcttctcctttcccccaacctcctttcttctttctttctttttgagacagtgtctcacttaatcgcccaggctggagtgcagtggtgtgatcatggctcagtgcagccttgacctcctggactcag

SEQ ID NO: 424823 - DNA, 546 bp, Homo sapiens
ggtcacaggtggtggaatgtggtaaaagctatgttgacagagcagttataggaccgaacttcttagatttctgtatggtacaccacactctgaagaagaaaagaacccagttctatttgtgagttaactatgaatagcaaagttttgtgacttgtgactcacgttaaatcaccccatctgaaattcatttacaaggtttttacattaataaaacagtagtgtggtacatatattggactcagatgaagtctaaagtacactggactctagagagtggattacataccaacgaccaagattcaagtgagaagcaaagtagatatgagcccatggacgttgacaaaggacctgggtctaccaaggagttgatcaagtccatcaatgaaaagtttgctgggtctgctggctgggaaggcacagaatcgctgaagaagccagaagacaaaaagcagctgggagatttctttggcatgtccaacagttatgcagagtgctacccagccacgatgtgacatggctgtggatagggaggctgggatgattggg

SEQ ID NO: 424824 - DNA, 215 bp, Homo sapiens
cacgcaaagcagtgtgggttgattctgaggtgcactgtgggaaagagcttgtcgctgcggtgttgctgttggagactcgattgttggtgacagcgaaagaacgataacaaaatgccggagcgagatagtaaggctcaggccatccgttatttcttccccatggcacttggggcacttggcgcattattgtagcttctgagcttaagccgggtgtg

SEQ ID NO: 424825 - DNA, 2323 bp, Homo sapiens
cacgcaaagcagtgtgggttgattctgaggtgcactgtgggaaagagcttgtcgctgcggtgttgctgttggagactcgattgttggtgacagcgaaagaacgataacaaaatgccggagcgagatagtgagccgttctccaaccctttggcccccgatggccacgatgtggatgatcctcactccttccaccaatcaaaactcaccaatgaagacttcaggaaacttctcatgacccccagggctgcacctacctctgcaccaccttctaagtcacgtcaccatgagatgccaagggagtacaatgaggatgaagacccagctgcacgaaggaggaaaaagaaaagttattatgccaagctacgccaacaagaaattgagagagagagagagctagcagagaagtaccgggatcgtgccaaggaacggagagatggagtgaacaaagattatgaagaaaccgagcttatcagcaccacagctaactatagggctgttggccccactgctgaggcggacaaatcagctgcagagaagagaagacagttgatccaggagtccaaattcttgggtggtgacatggaacacacccatttggtgaaaggcttggattttgctctgcttcaaaaggtacgagctgagattgccagcaaagagaaagaggaagaggaactgatggaaaagccccagaaagaaaccaagaaagatgaggatcctgaaaataaaattgaatttaaaacacgtctgggccgcaatgtttaccgaatgctttttaagagcaaagcatatgagcggaatgagttgttcctgccgggccgcatggcctatgtggtagacctggatgatgagtatgctgacacagatatccccaccactcttatccgcagcaaggctgattgccccaccatggaggcccagaccacactgaccacaaatgacattgtcattagcaagctgacccagatcctttcatacctgaggcagggaacccgtaacaagaagcttaagaagaaggataaagggaagctggaagagaagaaacctcctgaggctgacatgaatatttttgaagacattggggattacgtaccctccacaaccaagacacctcgggacaaggagcgggagagatatcgggaacgggagcgtgatcgggaaagagacagagaccgtgaccgagagcgagagcgagaacgagatcgggaacgagagcgagagcgggaccgagagagagaagaggaaaagaagagacacagctactttgagaagccaaaagtagatgatgagcccatggacgttgacaaaggacctgggtctaccaaggagttgatcaagtccatcaatgaaaagtttgctgggtctgctggctgggaaggcacagaatcgctgaagaagccagaagacaaaaagcagctgggagatttctttggcatgtccaacagttatgcagagtgctacccagccacgatggatgacatggctgtggatagtgatgaggaggtggattatagcaaaatggaccagggtaacaagaaggggcccttaggccgttgggactttgatacccaggaagaatacagcgagtatatgaacaacaaagaagctttgcccaaggctgcattccagtatggtatcaaaatgtctgaagggcggaaaaccaggcgcttcaaggaaaccaatgacaaagcagagcttgatcgccagtggaagaagattagtgcaatcattgagaagaggaagaagatggaagctgatggggttgaagtcaaaagaccaaaatactaatcactagttacaaccagagatgctccacaaggatatgctccccactgttttctttctacaatttccaaaggttgcaagatgtttttttgtggatgaatataaaattttattgtgtaattacttggttccattaaaattggttaacttgctgctattttctttgttgagcatgtcccctccagtgcccttgaagcaccaagaacactaattccactggttgtgtaaaatcacatgcagaaagtcatcagtcctttcctgagctgtggttctagattcctagacagtaaggatgctctctagccagtgtgcccagtagagaagagaataatgatcctcactgatgggcaagaggtggatagaggaatgtaagtatgattggtctcaaatgtcagactcattccggcccatcttcaggcctagtccctggggaaagatttcctggggattgctgtcagcctgatgggctgctaatctgatctccaggctatgaaggactgggctctggatgaaggcatctaatgaaaatcacttatgggtg

SEQ ID NO: 424826 - DNA, 1930 bp, Homo sapiens
cacgcaaagcagtgtgggttgattctgaggtgcactgtgggaaagagcttgtcgctgcggtgttgctgttggagactcgattgttggtgacagcgaaagaacgataacaaaatgccggagcgagatagtgagccgttctccaaccctttggcccccgatggccacgatgtggatgatcctcactccttccaccaatcaaaactcaccaatgaagacttcaggaaacttctcatgacccccagggctgcacctacctctgcaccaccttctaagtcacgtcaccatgagatgccaagggagtacaatgaggatgaagacccagctgcacgaaggaggaaaaagaaaagttattatgccaagctacgccaacaagaaattgagagagagagagagctagcagagaagtaccgggatcgtgccaaggaacggagagatggagtgaacaaagattatgaagaaaccgagcttatcagcaccacagctaactatagggctgttggccccactgctgaggcggacaaatcagctgcagagaagagaagacagttgatccaggagtccaaattcttgggtggtgacatggaacacacccatttggtgaaaggcttggattttgctctgcttcaaaaggtacgagctgagattgccagcaaagagaaagaggaagaggaactgatggaaaagccccagaaagaaaccaagaaagatgaggatcctgaaaataaaattgaatttaaaacacgtctgggccgcaatgtttaccgaatgctttttaagagcaaagcatatgagcggaatgagttgttcctgccgggccgcatggcctatgtggtagacctggatgatgagtatgctgacacagatatccccaccactcttatccgcagcaaggctgattgccccaccatggaggcccagaccacactgaccacaaatgacattgtcattagcaagctgacccagatcctttcatacctgaggcagggaacccgtaacaagaagcttaagaagaaggataaagggaagctggaagagaagaaacctcctgaggctgacatgaatatttttgaagacattggggattacgtaccctccacaaccaagacacctcgggacaaggagcgggagagatatcgggaacgggagcgtgatcgggaaagagacagagaccgtgaccgagagcgagagcgagaacgagatcgggaacgagagcgagagcgggaccgagagagagaagaggaaaagaagagacacagctactttgagaagccaaaagtagatgatgagcccatggacgttgacaaaggacctgggtctaccaaggagttgatcaagtccatcaatgaaaagtttgctgggtctgctggctgggaaggcacagaatcgctgaagaagccagaagacaaaaagcagctgggagatttctttggcatgtccaacagttatgcagagtgctacccagccacgatggatgacatggctgtggatagtgatgaggaggtggattatagcaaaatggaccagggtaacaagaaggggcccttaggccgttgggactttgatacccaggaagaatacagcgagtatatgaacaacaaagaagctttgcccaaggctgcattccagtatggtatcaaaatgtctgaagggcggaaaaccaggcgcttcaaggaaaccaatgacaaagcagagcttgatcgccagtggaagaagattagtgcaatcattgagaagaggaagaagatggaagctgatggggttgaagtcaaaagaccaaaatactaatcactagttacaaccagagatgctccacaaggatatgctccccactgttttctttctacaatttccaaaggttgcaagatgtttttttgtggatgaatataaaatttatcagtcataggtgttccatatgtgctgcgcatgctcc

SEQ ID NO: 424827 - DNA, 2738 bp, Homo sapiens
cacgcaaagcagtgtgggttgattctgaggtgcactgtgggaaagagcttgtcgctgcggtgttgctgttggagactcgattgttggtgacagcgaaagaacgataacaaaatgccggagcgagatagtgagccgttctccaaccctttggcccccgatggccacgatgtggatgatcctcactccttccaccaatcaaaactcaccaatgaagacttcaggaaacttctcatgacccccagggctgcacctacctctgcaccaccttctaagtcacgtcaccatgagatgccaagggagtacaatgaggatgaagacccagctgcacgaaggaggaaaaagaaaagttattatgccaagctacgccaacaagaaattgagagagagagagagctagcagagaagtaccgggatcgtgccaaggaacggagagatggagtgaacaaagattatgaagaaaccgagcttatcagcaccacagctaactatagggctgttggccccactgctgaggcggacaaatcagctgcagagaagagaagacagttgatccaggagtccaaattcttgggtggtgacatggaacacacccatttggtgaaaggcttggattttgctctgcttcaaaaggtacgagctgagattgccagcaaagagaaagaggaagaggaactgatggaaaagccccagaaagaaaccaagaaagatgaggatcctgaaaataaaattgaatttaaaacacgtctgggccgcaatgtttaccgaatgctttttaagagcaaagcatatgagcggaatgagttgttcctgccgggccgcatggcctatgtggtagacctggatgatgagtatgctgacacagatatccccaccactcttatccgcagcaaggctgattgccccaccatggaggcccagaccacactgaccacaaatgacattgtcattagcaagctgacccagatcctttcatacctgaggcagggaacccgtaacaagaagcttaagaagaaggataaagggaagctggaagagaagaaacctcctgaggctgacatgaatatttttgaagacattggggattacgtaccctccacaaccaagacacctcgggacaaggagcgggagagatatcgggaacgggagcgtgatcgggaaagagacagagaccgtgaccgagagcgagagcgagaacgagatcgggaacgagagcgagagcgggaccgagagagagaagaggaaaagaagagacacagctactttgagaagccaaaagtagatgatgagcccatggacgttgacaaaggacctgggtctaccaaggagttgatcaagtccatcaatgaaaagtttgctgggtctgctggctgggaaggcacagaatcgctgaagaagccagaagacaaaaagcagctgggagatttctttggcatgtccaacagttatgcagagtgctacccagccacgatggatgacatggctgtggatagtgatgaggaggtggattatagcaaaatggaccaggtatgtagttagaaggatggtgggcgcctttgggcagttattatttgttttacatgtatctccttccccactcctaaaaaatctatctcatttactgggccccaccctcctttagctgcagcagtagaaacagcagcattgagggtcatgagcagcttaactatttcagagtctttgcacaagatcaaatgacatagggtcaaaaatctattttttacttcctatagcaaagtgccaggctttgattcccatggtaggcagtaaacaagcatcaatgcataagtagaaagggcagaaaaaattgcagtctttggaaaataactaaattttattctagccaggattgaagttttcctctaagtcttaagcaaaattaaaaagaaaaaaaccactaatgccactaatagtgaagaagtctgtgttcttcccctgagttcactgtattgaaatagcatggtttaatcttggagccttgtttaatcctgcctctactgtttattagttttgtgaacttgccaagttctttcactgtttatgcctcagtttcctcatcaggaaaatggagagaaatatagttccctcttcatagattttatgagaattaagtgagatatgcatttagtgtacagaataatgcctgtcacatagtaagtatgtaataagcatttattattacttatcagggtatgatttatgaattgtggaacctgggattatgggagagtctggcttcaatcaagggctgaaattccatttccactgacatctcttccttccccatcccccgattctgtcctgcaacagggtaacaagaaggggcccttaggccgttgggactttgatacccaggaagaatacagcgagtatatgaacaacaaagaagctttgcccaaggctgcattccagtatggtatcaaaatgtctgaagggcggaaaaccaggcgcttcaaggaaaccaatgacaaagcagagcttgatcgccagtggaagaagattagtgcaatcattgagaagaggaagaagatggaagctgatggggttgaagtcaaaagaccaaaatactaatcactagttacaaccagagatgctccacaaggatatgctccccactgttttctttctacaatttccaaaggttgcaagatgtttttttgtggatgaatataaaattttattgtgtaattacttggttccattaaaattggttaacttgc

SEQ ID NO: 424828 - DNA, 2761 bp, Homo sapiens
cacgcaaagcagtgtgggttgattctgaggtgcactgtgggaaagagcttgtcgctgcggtgttgctgttggagactcgattgttggtgacagcgaaagaacgataacaaaatgccggagcgagatagtgagccgttctccaaccctttggcccccgatggccacgatgtggatgatcctcactccttccaccaatcaaaactcaccaatgaagacttcaggaaacttctcatgacccccagggctgcacctacctctgcaccaccttctaagtcacgtcaccatgagatgccaagggagtacaatgaggatgaagacccagctgcacgaaggaggaaaaagaaaagttattatgccaagctacgccaacaagaaattgagagagagagagagctagcagagaagtaccgggatcgtgccaaggaacggagagatggagtgaacaaagattatgaagaaaccgagcttatcagcaccacagctaactatagggctgttggccccactgctgaggcggacaaatcagctgcagagaagagaagacagttgatccaggagtccaaattcttgggtggtgacatggaacacacccatttggtgaaaggcttggattttgctctgcttcaaaaggtacgagctgagattgccagcaaagagaaagaggaagaggaactgatggaaaagccccagaaagaaaccaagaaagatgaggatcctgaaaataaaattgaatttaaaacacgtctgggccgcaatgtttaccgaatgctttttaagagcaaagcatatgagcggaatgagttgttcctgccgggccgcatggcctatgtggtagacctggatgatgagtatgctgacacagatatccccaccactcttatccgcagcaaggctgattgccccaccatggaggcccagaccacactgaccacaaatgacattgtcattagcaagctgacccagatcctttcatacctgaggcagggaacccgtaacaagaagcttaagaagaaggataaagggaagctggaagagaagaaacctcctgaggctgacatgaatatttttgaagacattggggattacgtaccctccacaaccaagacacctcgggacaaggagcgggagagatatcgggaacgggagcgtgatcgggaaagagacagagaccgtgaccgagagcgagagcgagaacgagatcgggaacgagagcgagagcgggaccgagagagagaagaggaaaagaagagacacagctactttgagaagccaaaagtagatgatgagcccatggacgttgacaaaggacctgggtctaccaaggagttgatcaagtccatcaatgaaaagtttgctgggtctgctggctgggaaggcacagaatcgctgaagaagccagaagacaaaaagcagctgggagatttctttggcatgtccaacagttatgcagagtgctacccagccacgatggatgacatggctgtggatagtgatgaggaggtggattatagcaaaatggaccaggtatgtagttagaaggatggtgggcgcctttgggcagttattatttgttttacatgtatctccttccccactcctaaaaaatctatctcatttactgggccccaccctcctttagctgcagcagtagaaacagcagcattgagggtcatgagcagcttaactatttcagagtctttgcacaagatcaaatgacatagggtcaaaaatctattttttacttcctatagcaaagtgccaggctttgattcccatggtaggcagtaaacaagcatcaatgcataagtagaaagggcagaaaaaattgcagtctttggaaaataactaaattttattctagccaggattgaagttttcctctaagtcttaagcaaaattaaaaagaaaaaaaccactaatgccactaatagtgaagaagtctgtgttcttcccctgagttcactgtattgaaatagcatggtttaatcttggagccttgtttaatcctgcctctactgtttattagttttgtgaacttgccaagttctttcactgtttatgcctcagtttcctcatcaggaaaatggagagaaatatagttccctcttcatagattttatgagaattaagtgagatatgcatttagtgtacagaataatgcctgtcacatagtaagtatgtaataagcatttattattacttatcagggtatgatttatgaattgtggaacctgggattatgggagagtctggcttcaatcaagggctgaaattccatttccactgacatctcttccttccccatcccccgattctgtcctgcaacagggtaacaagaaggggcccttaggccgttgggactttgatacccaggaagaatacagcgagtatatgaacaacaaagaagctttgcccaaggctgcattccagtatggtatcaaaatgtctgaagggcggaaaaccaggcgcttcaaggaaaccaatgacaaagcagagcttgatcgccagtggaagaagattagtgcaatcattgagaagaggaagaagatggaagctgatggggttgaagtcaaaagaccaaaatactaatcactagttacaaccagagatgctccacaaggatatgctccccactgttttctttctacaatttccaaaggttgcaagatgtttttttgtggatgaatataaaattttattgtgtaattacttggttccattaaaattggttaacttgcaaaaaaaaaaaaaagaaaaactc

SEQ ID NO: 424829 - DNA, 2411 bp, Homo sapiens
cacgcaaagcagtgtgggttgattctgaggtgcactgtgggaaagagcttgtcgctgcggtgttgctgttggagactcgattgttggtgacagcgaaagaacgataacaaaatgccggagcgagatagtgagccgttctccaaccctttggcccccgatggccacgatgtggatgatcctcactccttccaccaatcaaaactcaccaatgaagacttcaggaaacttctcatgacccccagggctgcacctacctctgcaccaccttctaagtcacgtcaccatgagatgccaagggagtacaatgaggatgaagacccagctgcacgaaggaggaaaaagaaaagttattatgccaagctacgccaacaagaaattgagagagagagagagctagcagagaagtaccgggatcgtgccaaggaacggagagatggagtgaacaaagattatgaagaaaccgagcttatcagcaccacagctaactatagggctgttggccccactgctgaggcggacaaatcagctgcagagaagagaagacagttgatccaggagtccaaattcttgggtggtgacatggaacacacccatttggtgaaaggcttggattttgctctgcttcaaaaggtacgagctgagattgccagcaaagagaaagaggaagaggaactgatggaaaagccccagaaagaaaccaagaaagatgaggatcctgaaaataaaattgaatttaaaacacgtctgggccgcaatgtttaccgaatgctttttaagagcaaagcatatgagcggaatgagttgttcctgccgggccgcatggcctatgtggtagacctggatgatgagtatgctgacacagatatccccaccactcttatccgcagcaaggctgattgccccaccatggaggcccagaccacactgaccacaaatgacattgtcattagcaagctgacccagatcctttcatacctgaggcagggaacccgtaacaagaagcttaagaagaaggataaagggaagctggaagagaagaaacctcctgaggctgacatgaatatttttgaagacattggggattacgtaccctccacaaccaagacacctcgggacaaggagcgggagagatatcgggaacgggagcgtgatcgggaaagagacagagaccgtgaccgagagcgagagcgagaacgagatcgggaacgagagcgagagcgggaccgagagagagaagaggaaaagaagagacacagctactttgagaagccaaaagtagatgatgagcccatggacgttgacaaaggacctgggtctaccaaggagttgatcaagtccatcaatgaaaagtttgctgggtctgctggctgggaaggcacagaatcgctgaagaagccagaagacaaaaagcagctgggagatttctttggcatgtccaacagttatgcagagtgctacccagccacgatggatgacatggctgtggatagtgatgaggaggtggattatagcaaaatggaccagggtaacaagaaggggcccttaggccgttgggactttgatacccaggaagaatacagcgagtatatgaacaacaaagaagctttgcccaaggctgcattccagtatggtatcaaaatgtctgaagggcggaaaaccaggcgcttcaaggaaaccaatgacaaagcagagcttgatcgccagtggaagaagattagtgcaatcattgagaagaggaagaagatggaagctgatgggtgagcggcattattcttcctctgtgggactggtgggaattgcttagtgtattgatcttatactgacccatttctccttccattgcagggttgaagtcaaaagaccaaaatactaatcactagttacaaccagagatgctccacaaggatatgctccccactgttttctttctacaatttccaaaggttgcaagatgtttttttgtggatgaatataaaattttattgtgtaattacttggttccattaaaattggttaacttgctgctattttctttgttgagcatgtcccctccagtgcccttgaagcaccaagaacactaattccactggttgtgtaaaatcacatgcagaaagtcatcagtcctttcctgagctgtggttctagattcctagacagtaaggatgctctctagccagtgtgcccagtagagaagagaataatgatcctcactgatgggcaagaggtggatagaggaatgtaagtatgattggtctcaaatgtcagactcattccggcccatcttcaggcctagtccctggggaaagatttcctggggattgctgtcagcctgatgggctgctaatctgatctccaggctatgaaggactgggctctggatgaaggcatctaatgaaaatcacttatgggtg

SEQ ID NO: 424830 - DNA, 1996 bp, Homo sapiens
cacgcaaagcagtgtgggttgattctgaggtgcactgtgggaaagagcttgtcgctgcggtgttgctgttggagactcgattgttggtgacagcgaaagaacgataacaaaatgccggagcgagatagtgagccgttctccaaccctttggcccccgatggccacgatgtggatgatcctcactccttccaccaatcaaaactcaccaatgaagacttcaggaaacttctcatgacccccagggctgcacctacctctgcaccaccttctaagtcacgtcaccatgagatgccaagggagtacaatgaggatgaagacccagctgcacgaaggaggaaaaagaaaagttattatgccaagctacgccaacaagaaattgagagagagagagagctagcagagaagtaccgggatcgtgccaaggaacggagagatggagtgaacaaagattatgaagaaaccgagcttatcagcaccacagctaactatagggctgttggccccactgctgaggcggacaaatcagctgcagagaagagaagacagttgatccaggagtccaaattcttgggtggtgacatggaacacacccatttggtgaaaggcttggattttgctctgcttcaaaaggtacgagctgagattgccagcaaagagaaagaggaagaggaactgatggaaaagccccagaaagaaaccaagaaagatgaggatcctgaaaataaaattgaatttaaaacacgtctgggccgcaatgtttaccgaatgctttttaagagcaaagcatatgagcggaatgagttgttcctgccgggccgcatggcctatgtggtagacctggatgatgagtatgctgacacagatatccccaccactcttatccgcagcaaggctgattgccccaccatggaggcccagaccacactgaccacaaatgacattgtcattagcaagctgacccagatcctttcatacctgaggcagggaacccgtaacaagaagcttaagaagaaggataaagggaagctggaagagaagaaacctcctgaggctgacatgaatatttttgaagacattggggattacgtaccctccacaaccaagacacctcgggacaaggagcgggagagatatcgggaacgggagcgtgatcgggaaagagacagagaccgtgaccgagagcgagagcgagaacgagatcgggaacgagagcgagagcgggaccgagagagagaagaggaaaagaagagacacagctactttgagaagccaaaagtagatgatgagcccatggacgttgacaaaggacctgggtctaccaaggagttgatcaagtccatcaatgaaaagtttgctgggtctgctggctgggaaggcacagaatcgctgaagaagccagaagacaaaaagcagctgggagatttctttggcatgtccaacagttatgcagagtgctacccagccacgatggatgacatggctgtggatagtgatgaggaggtggattatagcaaaatggaccagggtaacaagaaggggcccttaggccgttgggactttgatacccaggaagaatacagcgagtatatgaacaacaaagaagctttgcccaaggctgcattccagtatggtatcaaaatgtctgaagggcggaaaaccaggcgcttcaaggaaaccaatgacaaagcagagcttgatcgccagtggaagaagattagtgcactcattgcagaagagggagaaggatggaagttgatgggggtttgaagtcaagagaccaaaatactaatcactagttacaaccagggatgctccaccaaggatttgtctccccaggtttcttctacattcccacggtgcgcgatgttgtggggtgatctcaacgtatgggcgatcggggcctaactggtttggctaaaaaaaaaagggggcgaaatacgggggcaatcccctttaaggctagggataaaggggaaaagaaaagtgaacactttta

SEQ ID NO: 424831 - DNA, 1751 bp, Homo sapiens
cacgcaaagcagtgtgggttgattctgaggtgcactgtgggaaagagcttgtcgctgcggtgttgctgttggagactcgattgttggtgacagcgaaagaacgataacaaaatgccggagcgagatagtgagccgttctccaaccctttggcccccgatggccacgatgtggatgatcctcactccttccaccaatcaaaactcaccaatgaagacttcaggaaacttctcatgacccccagggctgcacctacctctgcaccaccttctaagtcacgtcaccatgagatgccaagggagtacaatgaggatgaagacccagctgcacgaaggaggaaaaagaaaagttattatgccaagctacgccaacaagaaattgagagagagagagagctagcagagaagtaccgggatcgtgccaaggaacggagagatggagtgaacaaagattatgaagaaaccgagcttatcagcaccacagctaactatagggctgttggccccactgctgaggcggacaaatcagctgcagagaagagaagacagttgatccaggagtccaaattcttgggtggtgacatggaacacacccatttggtgaaaggcttggattttgctctgcttcaaaaggtacgagctgagattgccagcaaagagaaagaggaagaggaactgatggaaaagccccagaaagaaaccaagaaagatgaggatcctgaaaataaaattgaatttaaaacacgtctgggccgcaatgtttaccgaatgctttttaagagcaaagcatatgagcggaatgagttgttcctgccgggccgcatggcctatgtggtagacctggatgatgagtatgctgacacagatatccccaccactcttatccgcagcaaggctgattgccccaccatggaggcccagaccacactgaccacaaatgacattgtcattagcaagctgacccagatcctttcatacctgaggcagggaacccgtaacaagaagcttaagaagaaggataaagggaagctggaagagaagaaacctcctgaggctgacatgaatatttttgaagacattggggattacgtaccctccacaaccaagacacctcgggacaaggagcgggagagatatcgggaacgggagcgtgatcgggaaagagacagagaccgtgaccgagagcgagagcgagaacgagatcgggaacgagagcgagagcgggaccgagagagagaagaggaaaagaagagacacagctactttgagaagccaaaagtagatgatgagcccatggacgttgacaaaggacctgggtctaccaaggagttgatcaagtccatcaatgaaaagtttgctgggtctgctggctgggaaggcacagaatcgctgaagaagccagaagacaaaaagcagctgggagatttctttggcatgtccaacagttatgcagagtgctacccagccacgatggatgacatggctgtggatagtgatgaggaggtggattatagcaaaatggaccagggtaacaagaaggggcccttaggccgttgggactttgatacccaggaagaatacagcgagtatatgaacaacaaagaagctttgcccaaggctgcattccagtatggtacggccggaggcggaaaccagggcccagggaacccatgaaacaaacctgacgccagggacagattacgcgacccgggggaccaacggaccgagggggaagccagaacccccaccagtac

SEQ ID NO: 424832 - DNA, 1540 bp, Homo sapiens
cacgcaaagcagtgtgggttgattctgaggtgcactgtgggaaagagcttgtcgctgcggtgttgctgttggagactcgattgttggtgacagcgaaagaacgataacaaaatgccggagcgagatagtgagccgttctccaaccctttggcccccgatggccacgatgtggatgatcctcactccttccaccaatcaaaactcaccaatgaagacttcaggaaacttctcatgacccccagggctgcacctacctctgcaccaccttctaagtcacgtcaccatgagatgccaagggagtacaatgaggatgaagacccagctgcacgaaggaggaaaaagaaaagttattatgccaagctacgccaacaagaaattgagagagagagagagctagcagagaagtaccgggatcgtgccaaggaacggagagatggagtgaacaaagattatgaagaaaccgagcttatcagcaccacagctaactatagggctgttggccccactgctgaggcggacaaatcagctgcagagaagagaagacagttgatccaggagtccaaattcttgggtggtgacatggaacacacccatttggtgaaaggcttggattttgctctgcttcaaaaggtacgagctgagattgccagcaaagagaaagaggaagaggaactgatggaaaagccccagaaagaaaccaagaaagatgaggatcctgaaaataaaattgaatttaaaacacgtctgggccgcaatgtttaccgaatgctttttaagagcaaagcatatgagcggaatgagttgttcctgccgggccgcatggcctatgtggtagacctggatgatgagtatgctgacacagatatccccaccactcttatccgcagcaaggctgattgccccaccatggaggcccagaccacactgaccacaaatgacattgtcattagcaagctgacccagatcctttcatacctgaggcagggaacccgtaacaagaagcttaagaagaaggataaagggaagctggaagagaagaaacctcctgaggctgacatgaatatttttgaagacattggggattacgtaccctccacaaccaagacacctcgggacaaggagcgggagagatatcgggaacgggagcgtgatcgggaaagagacagagaccgtgaccgagagcgagagcgagaacgagatcgggaacgagagcgagagcgggaccgagagagagaagaggaaaagaagagacacagctactttgagaagccaaaagtagatgatgagcccatggacgttgacaaaggacctgggtctaccaaggagttgatcaagtccatcaatgaaaagtttgctgggtctgctggctgggaaggcacagaatcgctgaagaagccagaagacaaaaagcagctgggagatttctttggcatgtccaacagttatgcagagtgctacccagccacgatggatgacatggctgtatgtggaggtagcactctgtatgtgtaggtagcactctgtttgtggaggtatcact

SEQ ID NO: 424833 - DNA, 1533 bp, Homo sapiens
cacgcaaagcagtgtgggttgattctgaggtgcactgtgggaaagagcttgtcgctgcggtgttgctgttggagactcgattgttggtgacagcgaaagaacgataacaaaatgccggagcgagatagtgagccgttctccaaccctttggcccccgatggccacgatgtggatgatcctcactccttccaccaatcaaaactcaccaatgaagacttcaggaaacttctcatgacccccagggctgcacctacctctgcaccaccttctaagtcacgtcaccatgagatgccaagggagtacaatgaggatgaagacccagctgcacgaaggaggaaaaagaaaagttattatgccaagctacgccaacaagaaattgagagagagagagagctagcagagaagtaccgggatcgtgccaaggaacggagagatggagtgaacaaagattatgaagaaaccgagcttatcagcaccacagctaactatagggctgttggccccactgctgaggcggacaaatcagctgcagagaagagaagacagttgatccaggagtccaaattcttgggtggtgacatggaacacacccatttggtgaaaggcttggattttgctctgcttcaaaaggtacgagctgagattgccagcaaagagaaagaggaagaggaactgatggaaaagccccagaaagaaaccaagaaagatgaggatcctgaaaataaaattgaatttaaaacacgtctgggccgcaatgtttaccgaatgctttttaagagcaaagcatatgagcggaatgagttgttcctgccgggccgcatggcctatgtggtagacctggatgatgagtatgctgacacagatatccccaccactcttatccgcagcaaggctgattgccccaccatggaggcccagaccacactgaccacaaatgacattgtcattagcaagctgacccagatcctttcatacctgaggcagggaacccgtaacaagaagcttaagaagaaggataaagggaagctggaagagaagaaacctcctgaggctgacatgaatatttttgaagacattggggattacgtaccctccacaaccaagacacctcgggacaaggagcgggagagatatcgggaacgggagcgtgatcgggaaagagacagagaccgtgaccgagagcgagagcgagaacgagatcgggaacgagagcgagagcgggaccgagagagagaagaggaaaagaagagacacagctactttgagaagccaaaagtagatgatgagcccatggacgttgacaaaggacctgggtctaccaaggagttgatcaagtccatcaatgaaaagtttgctgggtctgctggctgggaaggcacagaatcgctgaagaagccagaagacaaaaagcagctgggagacttctttttcttgtctttaaccacagactcatcatcactgtcgaccgaaggtgtcgtgctagggatgatggcggaggcggtgtctgacccactgtccttattcttccccttg

SEQ ID NO: 424834 - DNA, 1987 bp, Homo sapiens
gcttcttgtagtttcctatttcagcacttattacattgtgttgacactgtcgctgttctaacttttgttctgtattgttcactactatatctcaaatttttgcataggatctgacacgtaagagactgattaaattaacgtcaattttttttgtcaggtgagccgttctccaaccctttggcccccgatggccacgatgtggatgatcctcactccttccaccaatcaaaactcaccaatgaagacttcaggaaacttctcatgacccccagggctgcacctacctctgcaccaccttctaagtcacgtcaccatgagatgccaagggagtacaatgaggatgaagacccagctgcacgaaggaggaaaaagaaaagttattatgccaagctacgccaacaagaaattgagagagagagagagctagcagagaagtaccgggatcgtgccaaggaacggagagatggagtgaacaaagattatgaagaaaccgagcttatcagcaccacagctaactatagggctgttggccccactgctgaggcggacaaatcagctgcagagaagagaagacagttgatccaggagtccaaattcttgggtggtgacatggaacacacccatttggtgaaaggcttggattttgctctgcttcaaaaggtacgagctgagattgccagcaaagagaaagaggaagaggaactgatggaaaagccccagaaagaaaccaagaaagatgaggatcctgaaaataaaattgaatttaaaacacgtctgggccgcaatgtttaccgaatgctttttaagagcaaagcatatgagcggaatgagttgttcctgccgggccgcatggcctatgtggtagacctggatgatgagtatgctgacacagatatccccaccactcttatccgcagcaaggctgattgccccaccatggaggcccagaccacactgaccacaaatgacattgtcattagcaagctgacccagatcctttcatacctgaggcagggaacccgtaacaagaagcttaagaagaaggataaagggaagctggaagagaagaaacctcctgaggctgacatgaatatttttgaagacattggggattacgtaccctccacaaccaagacacctcgggacaaggagcgggagagatatcgggaacgggagcgtgatcgggaaagagacagagaccgtgaccgagagcgagagcgagaacgagatcgggaacgagagcgagagcgggaccgagagagagaagaggaaaagaagagacacagctactttgagaagccaaaagtagatgatgagcccatggacgttgacaaaggacctgggtctaccaaggagttgatcaagtccatcaatgaaaagtttgctgggtctgctggctgggaaggcacagaatcgctgaagaagccagaagacaaaaagcagctgggagatttctttggcatgtccaacagttatgcagagtgctacccagccacgatggatgacatggctgtggatagtgatgaggaggtggattatagcaaaatggaccagggtaacaagaaggggcccttaggccgttgggactttgatacccaggaagaatacagcgagtatatgaacaacaaagaagctttgcccaaggctgcattccagtatggtatcaaaatgtctgaagggcggaaaaccaggcgcttcaaggaaaccaatgacaaagcagagcttgatcgccagtggaagaagattagtgcaatcattgagaagaggaagaagatggaagctgatggggttgaagtcaaaagaccaaaatactaatcactagttacaaccagagatgctccacaaggatatgctccccactgttttctttctacaatttccaaaggttgcaagatgtttttttgtggatgaatataaaattttattgtgtaattacttggttccattaaaattggttaacttgcaaaaaaaaaaaaaagaaaaactc

SEQ ID NO: 424835 - DNA, 2242 bp, Homo sapiens
  misc_feature (515)..(515): n is a, c, g, or t
cacgcaaagcagtgtgggttgattctgaggtgcactgtgggaaagagcttgtcgctgcggtgttgctgttggagactcgattgttggtgacagcgaaagaacgataacaaaatgccggagcgagatagtgagccgttctccaaccctttggcccccgatggccacgatgtggatgatcctcactccttccaccaatcaaaactcaccaatgaagacttcaggaaacttctcatgacccccagggctgcacctacctctgcaccaccttctaagtcacgtcaccatgagatgccaagggagtacaatgaggatgaagacccagctgcacgaaggaggaaaaagaaaagtttcctgaagtcttcattggtgagttatgatgggagcgagatagggagccgatctacgatcgcgttggtcgccggatggaacgggatgtggatggaggcctcactccttgccaccgagatctagaaagtcatcgaatgagaggactgcagtgagaacttgctcgaggnacgccagtgcctggagctgaccatctgtcaccggcttgctaagtcacgatcaccatgagatgccaagggagtacaaggaggatgaagacccagctgcacgaaggaggaaagacgaaattattatgccaagctacgccaacaagaaattgagagagagagagagctagcagagaagtaccgggatcgtgccaaggaacggagagatggagtgaacaaagattatgaagaaaccgagcttatcagcaccacagctaactatagggctgttggccccactgctgaggcggacaaatcagctgcagagaagagaagacagttgatccaggagtccaaattcttgggtggtgacatggaacacacccatttggtgaaaggcttggattttgctctgcttcaaaaggtacgagctgagattgccagcaaagagaaagaggaagaggaactgatggaaaagccccagaaagaaaccaagaaagatgaggatcctgaaaataaaattgaatttaaaacacgtctgggccgcaatgtttaccgaatgctttttaagagcaaagcatatgagcggaatgagttgttcctgccgggccgcatggcctatgtggtagacctggatgatgagtatgctgacacagatatccccaccactcttatccgcagcaaggctgattgccccaccatggaggcccagaccacactgaccacaaatgacattgtcattagcaagctgacccagatcctttcatacctgaggcagggaacccgtaacaagaagcttaagaagaaggataaagggaagctggaagagaagaaacctcctgaggctgacatgaatatttttgaagacattggggattacgtaccctccacaaccaagacacctcgggacaaggagcgggagagatatcgggaacgggagcgtgatcgggaaagagacagagaccgtgaccgagagcgagagcgagaacgagatcgggaacgagagcgagagcgggaccgagagagagaagaggaaaagaagagacacagctactttgagaagccaaaagtagatgatgagcccatggacgttgacaaaggacctgggtctaccaaggagttgatcaagtccatcaatgaaaagtttgctgggtctgctggctgggaaggcacagaatcgctgaagaagccagaagacaaaaagcagctgggagatttctttggcatgtccaacagttatgcagagtgctacccagccacgatggatgacatggctgtggatagtgatgaggaggtggattatagcaaaatggaccagggtaacaagaaggggcccttaggccgttgggactttgatacccaggaagaatacagcgagtatatgaacaacaaagaagctttgcccaaggctgcattccagtatggtatcaaaatgtctgaagggcggaaaaccaggcgcttcaaggaaaccaatgacaaagcagagcttgatcgccagtggaagaagattagtgcaatcattgagaagaggaagaagatggaagctgatggggttgaagtcaaaagaccaaaatactaatcactagttacaaccagagatgctccacaaggatatgctccccactgttttctttctacaatttccaaaggttgcaagatgtttttttgtggatgaatataaaattttattgtgtaattacttggttccattaaaattggttaacttgcaaaaaaaaaaaaaagaaaaactc

SEQ ID NO: 424836 - DNA, 1657 bp, Homo sapiens
gactggatactcctactaggtcaactctaacattgggggtcacatttcaacatgagattgaagacaaatatccagactatatccaccttctagaggggacagggacttctgctcctggaaattcagacccaggaataggacttggcattcttctgctccatcttatgcccactccccagccacacagatcacccttcgtgccccactgctgaggcggacaaatcagctgcagagaagagaagacagttgatccaggagtccaaattcttgggtggtgacatggaacacacccatttggtgaaaggcttggattttgctctgcttcaaaaggtacgagctgagattgccagcaaagagaaagaggaagaggaactgatggaaaagccccagaaagaaaccaagaaagatgaggatcctgaaaataaaattgaatttaaaacacgtctgggccgcaatgtttaccgaatgctttttaagagcaaagcatatgagcggaatgagttgttcctgccgggccgcatggcctatgtggtagacctggatgatgagtatgctgacacagatatccccaccactcttatccgcagcaaggctgattgccccaccatggaggcccagaccacactgaccacaaatgacattgtcattagcaagctgacccagatcctttcatacctgaggcagggaacccgtaacaagaagcttaagaagaaggataaagggaagctggaagagaagaaacctcctgaggctgacatgaatatttttgaagacattggggattacgtaccctccacaaccaagacacctcgggacaaggagcgggagagatatcgggaacgggagcgtgatcgggaaagagacagagaccgtgaccgagagcgagagcgagaacgagatcgggaacgagagcgagagcgggaccgagagagagaagaggaaaagaagagacacagctactttgagaagccaaaagtagatgatgagcccatggacgttgacaaaggacctgggtctaccaaggagttgatcaagtccatcaatgaaaagtttgctgggtctgctggctgggaaggcacagaatcgctgaagaagccagaagacaaaaagcagctgggagatttctttggcatgtccaacagttatgcagagtgctacccagccacgatggatgacatggctgtggatagtgatgaggaggtggattatagcaaaatggaccagggtaacaagaaggggcccttaggccgttgggactttgatacccaggaagaatacagcgagtatatgaacaacaaagaagctttgcccaaggctgcattccagtatggtatcaaaatgtctgaagggcggaaaaccaggcgcttcaaggaaaccaatgacaaagcagagcttgatcgccagtggaagaagattagtgcaatcattgagaagaggaagaagatggaagctgatggggttgaagtcaaaagaccaaaatactaatcactagttacaaccagagatgctccacaaggatatgctccccactgttttctttctacaatttccaaaggttgcaagatgtttttttgtggatgaatataaaattttattgtgtaattacttggttccattaaaattggttaacttgcaaaaaaaaaaaaaagaaaaactc

SEQ ID NO: 424837 - DNA, 1639 bp, Homo sapiens
ccgtggatcgtgccacggtaacggaaatatggagtgaacatatgattatgaacgaaaccgagtcttatctagacaccagcagacatacacttatacgagtgcgtgattgtgtcccccacttgcttagatggctgtgagcagaagtacaagcgtggcacgtacgcataaggagacaagaacagcttggagtcctaggtatgatccgaaaattctatggtgatggtgacgattggtaatcatcacctcattttggttgaataggtcttgtgaattttagactgctgtcatcaagacagtgtatcgatgctgtggtattgccagcatagtgatataagacggaagaggatctgatggaaaagccccagaaagaaacctagatggatgatggatcctgacaatataaattgaagtttaaacacacgtcttgggcgccgcaatgtttaccgaatgctttttaagagcaaagcatatgagcggaatgagttgttcctgccgggccgcatggcctatgtggtagacctggatgatgagtatgctgacacagatatccccaccactcttatccgcagcaaggctgattgccccaccatggaggcccagaccacactgaccacaaatgacattgtcattagcaagctgacccagatcctttcatacctgaggcagggaacccgtaacaagaagcttaagaagaaggataaagggaagctggaagagaagaaacctcctgaggctgacatgaatatttttgaagacattggggattacgtaccctccacaaccaagacacctcgggacaaggagcgggagagatatcgggaacgggagcgtgatcgggaaagagacagagaccgtgaccgagagcgagagcgagaacgagatcgggaacgagagcgagagcgggaccgagagagagaagaggaaaagaagagacacagctactttgagaagccaaaagtagatgatgagcccatggacgttgacaaaggacctgggtctaccaaggagttgatcaagtccatcaatgaaaagtttgctgggtctgctggctgggaaggcacagaatcgctgaagaagccagaagacaaaaagcagctgggagatttctttggcatgtccaacagttatgcagagtgctacccagccacgatggatgacatggctgtggatagtgatgaggaggtggattatagcaaaatggaccagggtaacaagaaggggcccttaggccgttgggactttgatacccaggaagaatacagcgagtatatgaacaacaaagaagctttgcccaaggctgcattccagtatggtatcaaaatgtctgaagggcggaaaaccaggcgcttcaaggaaaccaatgacaaagcagagcttgatcgccagtggaagaagattagtgcaatcattgagaagaggaagaagatggaagctgatggggttgaagtcaaaagaccaaaatactaatcactagttacaaccagagatgctccacaaggatatgctccccactgttttctttctacaatttccaaaggttgcaagatgtttttttgtggatgaatataaaattttattgtgtaattacttggttccattaaaattggttaacttgcaaaaaaaaaaaaaagaaaaactc

SEQ ID NO: 424838 - DNA, 1089 bp, Homo sapiens
  misc_feature (57)..(57): n is a, c, g, or t
  misc_feature (60)..(60): n is a, c, g, or t
  misc_feature (63)..(63): n is a, c, g, or t
ccgtttcaaaatatcatgtcagctcaggaggttcttctcttccagctccctttatcnttnttnttaagcttcttgttacgggttccctgacccagatcctttcatacctgaggcagggaacccgtaacaagaagcttaagaagaaggataaagggaagctggaagagaagaaacctcctgaggctgacatgaatatttttgaagacattggggattacgtaccctccacaaccaagacacctcgggacaaggagcgggagagatatcgggaacgggagcgtgatcgggaaagagacagagaccgtgaccgagagcgagagcgagaacgagatcgggaacgagagcgagagcgggaccgagagagagaagaggaaaagaagagacacagctactttgagaagccaaaagtagatgatgagcccatggacgttgacaaaggacctgggtctaccaaggagttgatcaagtccatcaatgaaaagtttgctgggtctgctggctgggaaggcacagaatcgctgaagaagccagaagacaaaaagcagctgggagatttctttggcatgtccaacagttatgcagagtgctacccagccacgatggatgacatggctgtggatagtgatgaggaggtggattatagcaaaatggaccagggtaacaagaaggggcccttaggccgttgggactttgatacccaggaagaatacagcgagtatatgaacaacaaagaagctttgcccaaggctgcattccagtatggtatcaaaatgtctgaagggcggaaaaccaggcgcttcaaggaaaccaatgacaaagcagagcttgatcgccagtggaagaagattagtgcaatcattgagaagaggaagaagatggaagctgatggggttgaagtcaaaagaccaaaatactaatcactagttacaaccagagatgctccacaaggatatgctccccactgttttctttctacaatttccaaaggttgcaagatgtttttttgtggatgaatataaaattttattgtgtaattacttggttccattaaaattggttaacttgcaaaaaaaaaaaaaagaaaaactc

SEQ ID NO: 424839 - DNA, 1058 bp, Homo sapiens
cagccttgacccacgttttaaacagaagatgtttaaaagggcattaagagctggagaggatggtgaagttcagtggaaattaactgaggagtatgttcctgactcctctctttaaatttcagggaagctggaagagaagaaacctcctgaggctgacatgaatatttttgaagacattggggattacgtaccctccacaaccaagacacctcgggacaaggagcgggagagatatcgggaacgggagcgtgatcgggaaagagacagagaccgtgaccgagagcgagagcgagaacgagatcgggaacgagagcgagagcgggaccgagagagagaagaggaaaagaagagacacagctactttgagaagccaaaagtagatgatgagcccatggacgttgacaaaggacctgggtctaccaaggagttgatcaagtccatcaatgaaaagtttgctgggtctgctggctgggaaggcacagaatcgctgaagaagccagaagacaaaaagcagctgggagatttctttggcatgtccaacagttatgcagagtgctacccagccacgatggatgacatggctgtggatagtgatgaggaggtggattatagcaaaatggaccagggtaacaagaaggggcccttaggccgttgggactttgatacccaggaagaatacagcgagtatatgaacaacaaagaagctttgcccaaggctgcattccagtatggtatcaaaatgtctgaagggcggaaaaccaggcgcttcaaggaaaccaatgacaaagcagagcttgatcgccagtggaagaagattagtgcaatcattgagaagaggaagaagatggaagctgatggggttgaagtcaaaagaccaaaatactaatcactagttacaaccagagatgctccacaaggatatgctccccactgttttctttctacaatttccaaaggttgcaagatgtttttttgtggatgaatataaaattttattgtgtaattacttggttccattaaaattggttaacttgcaaaaaaaaaaaaaagaaaaactc

SEQ ID NO: 424840 - DNA, 1028 bp, Homo sapiens
  misc_feature (57)..(57): n is a, c, g, or t
  misc_feature (60)..(60): n is a, c, g, or t
  misc_feature (63)..(63): n is a, c, g, or t
ccgtttcaaaatatcatgtcagctcaggaggttcttctcttccagctccctttatcnttnttnttaagcttcttgttacgggttccctgcctcaggtatgaaaggatctgggtcagcttgctaatgacaatgtatttttgaagacattggggattacgtaccctccacaaccaagacacctcgggacaaggagcgggagagatatcgggaacgggagcgtgatcgggaaagagacagagaccgtgaccgagagcgagagcgagaacgagatcgggaacgagagcgagagcgggaccgagagagagaagaggaaaagaagagacacagctactttgagaagccaaaagtagatgatgagcccatggacgttgacaaaggacctgggtctaccaaggagttgatcaagtccatcaatgaaaagtttgctgggtctgctggctgggaaggcacagaatcgctgaagaagccagaagacaaaaagcagctgggagatttctttggcatgtccaacagttatgcagagtgctacccagccacgatggatgacatggctgtggatagtgatgaggaggtggattatagcaaaatggaccagggtaacaagaaggggcccttaggccgttgggactttgatacccaggaagaatacagcgagtatatgaacaacaaagaagctttgcccaaggctgcattccagtatggtatcaaaatgtctgaagggcggaaaaccaggcgcttcaaggaaaccaatgacaaagcagagcttgatcgccagtggaagaagattagtgcaatcattgagaagaggaagaagatggaagctgatggggttgaagtcaaaagaccaaaatactaatcactagttacaaccagagatgctccacaaggatatgctccccactgttttctttctacaatttccaaaggttgcaagatgtttttttgtggatgaatataaaattttattgtgtaattacttggttccattaaaattggttaacttgcaaaaaaaaaaaaaagaaaaactc

SEQ ID NO: 424841 - DNA, 930 bp, Homo sapiens
tacagtatacagagatggagacatccagcccacttctcctggaacaggggaaacataatcggggagggaacacaggtcagtctcgggacaaggagcgggagagatatcgggaacgggagcgtgatcgggaaagagacagagaccgtgaccgagagcgagagcgagaacgagatcgggaacgagagcgagagcgggaccgagagagagaagaggaaaagaagagacacagctactttgagaagccaaaagtagatgatgagcccatggacgttgacaaaggacctgggtctaccaaggagttgatcaagtccatcaatgaaaagtttgctgggtctgctggctgggaaggcacagaatcgctgaagaagccagaagacaaaaagcagctgggagatttctttggcatgtccaacagttatgcagagtgctacccagccacgatggatgacatggctgtggatagtgatgaggaggtggattatagcaaaatggaccagggtaacaagaaggggcccttaggccgttgggactttgatacccaggaagaatacagcgagtatatgaacaacaaagaagctttgcccaaggctgcattccagtatggtatcaaaatgtctgaagggcggaaaaccaggcgcttcaaggaaaccaatgacaaagcagagcttgatcgccagtggaagaagattagtgcaatcattgagaagaggaagaagatggaagctgatggggttgaagtcaaaagaccaaaatactaatcactagttacaaccagagatgctccacaaggatatgctccccactgttttctttctacaatttccaaaggttgcaagatgtttttttgtggatgaatataaaattttattgtgtaattacttggttccattaaaattggttaacttgcaaaaaaaaaaaaaagaaaaactc

SEQ ID NO: 424842 - DNA, 797 bp, Homo sapiens
catatactaaaattggaacgatacagagaagattagcatggcccctgcgcaaggatgacacgcaaattcgtgaagcgttccatatttttggaggaggttgtgagagcctcagttcaaggtctgggctgagttctcttttctcctaggacctgggtctaccaaggagttgatcaagtccatcaatgaaaagtttgctgggtctgctggctgggaaggcacagaatcgctgaagaagccagaagacaaaaagcagctgggagatttctttggcatgtccaacagttatgcagagtgctacccagccacgatggatgacatggctgtggatagtgatgaggaggtggattatagcaaaatggaccagggtaacaagaaggggcccttaggccgttgggactttgatacccaggaagaatacagcgagtatatgaacaacaaagaagctttgcccaaggctgcattccagtatggtatcaaaatgtctgaagggcggaaaaccaggcgcttcaaggaaaccaatgacaaagcagagcttgatcgccagtggaagaagattagtgcaatcattgagaagaggaagaagatggaagctgatggggttgaagtcaaaagaccaaaatactaatcactagttacaaccagagatgctccacaaggatatgctccccactgttttctttctacaatttccaaaggttgcaagatgtttttttgtggatgaatataaaattttattgtgtaattacttggttccattaaaattggttaacttgcaaaaaaaaaaaaaagaaaaactc

SEQ ID NO: 424843 - DNA, 678 bp, Homo sapiens
ccactcagaattttcatgttggggcttctagccttggccccctcctggctgaagctttacagcaataggtagaatcctgtgtagtgttttctttaacatagcatatgctgaagaagccagaagacaaaaagcagctgggagatttctttggcatgtccaacagttatgcagagtgctacccagccacgatggatgacatggctgtggatagtgatgaggaggtggattatagcaaaatggaccagggtaacaagaaggggcccttaggccgttgggactttgatacccaggaagaatacagcgagtatatgaacaacaaagaagctttgcccaaggctgcattccagtatggtatcaaaatgtctgaagggcggaaaaccaggcgcttcaaggaaaccaatgacaaagcagagcttgatcgccagtggaagaagattagtgcaatcattgagaagaggaagaagatggaagctgatggggttgaagtcaaaagaccaaaatactaatcactagttacaaccagagatgctccacaaggatatgctccccactgttttctttctacaatttccaaaggttgcaagatgtttttttgtggatgaatataaaattttattgtgtaattacttggttccattaaaattggttaacttgcaaaaaaaaaaaaaagaaaaactc

SEQ ID NO: 424844 - DNA, 1491 bp, Homo sapiens
ctgccctcctcagcctccaaaagtgcggggattacaggagtgagccactgcgcctggcccaaggctacttcttacttggatgaactattttattaggctctaagtgggaggtctagggggtggtcattcctatgcagataacctcttagtcgggtaggtttccagatgaagcatagggtcagggtatgcaacatctgtttaactcttgcttctccttaggatggatgacatggctgtggatagtgatgaggaggtggattatagcaaaatggaccaggtatgtagttagaaggatggtgggcgcctttgggcagttattatttgttttacatgtatctccttccccactcctaaaaaatctatctcatttactgggccccaccctcctttagctgcagcagtagaaacagcagcattgagggtcatgagcagcttaactatttcagagtctttgcacaagatcaaatgacatagggtcaaaaatctattttttacttcctatagcaaagtgccaggctttgattcccatggtaggcagtaaacaagcatcaatgcataagtagaaagggcagaaaaaattgcagtctttggaaaataactaaattttattctagccaggattgaagttttcctctaagtcttaagcaaaattaaaaagaaaaaaaccactaatgccactaatagtgaagaagtctgtgttcttcccctgagttcactgtattgaaatagcatggtttaatcttggagccttgtttaatcctgcctctactgtttattagttttgtgaacttgccaagttctttcactgtttatgcctcagtttcctcatcaggaaaatggagagaaatatagttccctcttcatagattttatgagaattaagtgagatatgcatttagtgtacagaataatgcctgtcacatagtaagtatgtaataagcatttattattacttatcagggtatgatttatgaattgtggaacctgggattatgggagagtctggcttcaatcaagggctgaaattccatttccactgacatctcttccttccccatcccccgattctgtcctgcaacagggtaacaagaaggggcccttaggccgttgggactttgatacccaggaagaatacagcgagtatatgaacaacaaagaagctttgcccaaggctgcattccagtatggtatcaaaatgtctgaagggcggaaaaccaggcgcttcaaggaaaccaatgacaaagcagagcttgatcgccagtggaagaagattagtgcaatcattgagaagaggaagaagatggaagctgatggggttgaagtcaaaagaccaaaatactaatcactagttacaaccagagatgctccacaaggatatgctccccactgttttctttctacaatttccaaaggttgcaagatgtttttttgtggatgaatataaaattttattgtgtaattacttggttccattaaaattggttaacttgc

SEQ ID NO: 424845 - DNA, 537 bp, Homo sapiens
cacgcaaagcagtgtgggttgattctgaggtgcactgtgggaaagagcttgtcgctgcggtgttgctgttggagactcgattgttggtgacagcgaaagaacgataacaaaatgccggagcgagatagtgagccgttctccaaccctttggcccccgatggccacgatgtggatgatcctcactccttccaccaatcaaaactcaccaatgaagacttcaggaaacttctcatgacccccagggctgcacctacctctgcaccaccttctaagtcacgtcaccatgagatgccaagggagtacaatgaggatgaagacccagctgcacgaaggaggaaaaagaaaagttattatgccaagctacgccaacaagaaattgagagagagagagagctagcagagaagtaccgggatcgtgccaaggaacggagagatggagtgaacaaagattatgaagaaaccgagcttatcagcaccacagctaactatagggctgttggccccactgctgaggcgtgagtactgagggaacagggc

SEQ ID NO: 424846 - DNA, 1450 bp, Homo sapiens
ggtcacaggtggtggaatgtggtaaaagctatgttgacagagcagttataggaccgaacttcttagatttctgtatggtacaccacactctgaagaagaaaagaacccagttctatttgtgagttaactatgaatagcaaagttttgtgacttgtgactcacgttaaatcaccccatctgaaattcatttacaaggtttttacattaataaaacagtagtgtggtacatatattggactcagatgaagtctaaagtacactggactctagagagtggattacataccaacgaccaagattcaagtgagaagcaaagtagatatgagcccatggacgttgacaaaggacctgggtctaccaaggagttgatcaagtccatcaatgaaaagtttgctgggtctgctggctgggaaggcacagaatcgctgaagaagccagaagacaaaaagcagctgggagatttctttggcatgtccaacagttatgcagagtgctacccagccacgatggatgacatggctgtggatagtgatgaggaggtggattatagcaaaatggaccagggtaacaagaaggggcccttaggccgttgggactttgatacccaggaagaatacagcgagtatatgaacaacaaagaagctttgcccaaggctgcattccagtatggtatcaaaatgtctgaagggcggaaaaccaggcgcttcaaggaaaccaatgacaaagcagagcttgatcgccagtggaagaagattagtgcaatcattgagaagaggaagaagatggaagctgatgggtgagcggcattattcttcctctgtgggactggtgggaattgcttagtgtattgatcttatactgacccatttctccttccattgcagggttgaagtcaaaagaccaaaatactaatcactagttacaaccagagatgctccacaaggatatgctccccactgttttctttctacaatttccaaaggttgcaagatgtttttttgtggatgaatataaaattttattgtgtaattacttggttccattaaaattggttaacttgctgctattttctttgttgagcatgtcccctccagtgcccttgaagcaccaagaacactaattccactggttgtgtaaaatcacatgcagaaagtcatcagtcctttcctgagctgtggttctagattcctagacagtaaggatgctctctagccagtgtgcccagtagagaagagaataatgatcctcactgatgggcaagaggtggatagaggaatgtaagtatgattggtctcaaatgtcagactcattccggcccatcttcaggcctagtccctggggaaagatttcctggggattgctgtcagcctgatgggctgctaatctgatctccaggctatgaaggactgggctctggatgaaggcatctaatgaaaatcacttatgggtg

SEQ ID NO: 424847 - DNA, 404 bp, Homo sapiens
tggtaaaaattcagaagattttctgatttttgtgtggaaaagtcttatatctatagagaattggtagagttgggtggtattaaaaagttctgaagtgacagatggagtgtcccaagttggcactggaaaagtatatctataagctggaagaagttgtagttctgattttgagtaactacgaagaggtggccagcagttctatcaggacagacatgagcttttccccatagagagtaggttggagatgtagggaagcaagcaggaacagttctgttgaccttgaggtagcagctgatgagccttatacatttgcctttctctggtcacattattatgccaagctacgccaacaagaaattgagagagagagagagctagcagagaagtaccgggatcgtgccaag

SEQ ID NO: 424848 - DNA, 346 bp, Homo sapiens
gttctgaggaggtgaggtagaggtcaagtatggaatgttctggataccctaccctcatctcaaccagagtgactcattaattggagtttgtttaaaactttgttagacaaaagggttctatgccttaaaaatgttttttaagtgtgttgtggggaggaggttgtgagagcctcagttcaaggtctgggctgagttctcttttctcctaggacctgggtctaccaaggagttgatcaagtccatcaatgaaaagtttgctgggtctgctggctgggaaggcacagaatcatatcctttattttaatacgttcctgggttccagagaactggtctctttactccaacc

SEQ ID NO: 424849 - DNA, 1934 bp, Homo sapiens
cacgcaaagcagtgtgggttgattctgaggtgcactgtgggaaagagcttgtcgctgcggtgttgctgttggagactcgattgttggtgacagcgaaagaacgataacaaaatgccggagcgagatagtgagccgttctccaaccctttggcccccgatggccacgatgtggatgatcctcactccttccaccaatcaaaactcaccaatgaagacttcaggaaacttctcatgacccccagggctgcacctacctctgcaccaccttctaagtcacgtcaccatgagatgccaagggagtacaatgaggatgaagacccagctgcacgaaggaggaaaaagaaaagttattatgccaagctacgccaacaagaaattgagagagagagagagctagcagagaagtaccgggatcgtgccaaggaacggagagatggagtgaacaaagattatgaagaaaccgagcttatcagcaccacagctaactatagggctgttggccccactgctgaggcggacaaatcagctgcagagaagagaagacagttgatccaggagtccaaattcttgggtggtgacatggaacacacccatttggtgaaaggcttggattttgctctgcttcaaaaggtacgagctgagattgccagcaaagagaaagaggaagaggaactgatggaaaagccccagaaagaaaccaagaaagatgaggatcctgaaaataaaattgaatttaaaacacgtctgggccgcaatgtttaccgaatgctttttaagagcaaagcatatgagcggaatgagttgttcctgccgggccgcatggcctatgtggtagacctggatgatgagtatgctgacacagatatccccaccactcttatccgcagcaaggctgattgccccaccatggaggcccagaccacactgaccacaaatgacattgtcattagcaagctgacccagatcctttcatacctgaggcagggaacccgtaacaagaagcttaagaagaaggataaagggaagctggaagagaagaaacctcctgaggctgacatgaatatttttgaagacattggggattacgtaccctccacaaccaagacacctcgggacaaggagcgggagagatatcgggaacgggagcgtgatcgggaaagagacagagaccgtgaccgagagcgagagcgagaacgagatcgggaacgagagcgagagcgggaccgagagagagaagaggaaaagaagagacacagctactttgagaagccaaaagtagatgatgagcccatggacgttgacaaaggacctgggtctaccaaggagttgatcaagtccatcaatgaaaagtttgctgggtctgctggctgggaaggcacagaatcgctgaagaagccagaagacaaaaagcagctgggagatttctttggcatgtccaacagttatgcagagtgctacccagccacgatggatgacatggctgtggatagtgatgaggaggtggattatagcaaaatggaccagggtaacaagaaggggcccttaggccgttgggactttgatacccaggaagaatacagcgagtatatgaacaacaaagaagctttgcccaaggctgcattccagtatggtatcaaaatgtctgaagggcggaaaaccaggcgcttcaaggaaaccaatgacaaagcagagcttgatcgccagtggaagaagattagtgcaatcattgagaagaggaagaagatggaagctgatggggttgaagtcaaaagaccaaaatactaatcactagttacaaccagagatgctccacaaggatatgctccccactgttttctttctacaatttccaaaggttgcaagatgtttttttgtggatgaatataaaattttattgtgtaattacttggttccattaaaattggttaacttgc

SEQ ID NO: 424850 - DNA, 1957 bp, Homo sapiens
cacgcaaagcagtgtgggttgattctgaggtgcactgtgggaaagagcttgtcgctgcggtgttgctgttggagactcgattgttggtgacagcgaaagaacgataacaaaatgccggagcgagatagtgagccgttctccaaccctttggcccccgatggccacgatgtggatgatcctcactccttccaccaatcaaaactcaccaatgaagacttcaggaaacttctcatgacccccagggctgcacctacctctgcaccaccttctaagtcacgtcaccatgagatgccaagggagtacaatgaggatgaagacccagctgcacgaaggaggaaaaagaaaagttattatgccaagctacgccaacaagaaattgagagagagagagagctagcagagaagtaccgggatcgtgccaaggaacggagagatggagtgaacaaagattatgaagaaaccgagcttatcagcaccacagctaactatagggctgttggccccactgctgaggcggacaaatcagctgcagagaagagaagacagttgatccaggagtccaaattcttgggtggtgacatggaacacacccatttggtgaaaggcttggattttgctctgcttcaaaaggtacgagctgagattgccagcaaagagaaagaggaagaggaactgatggaaaagccccagaaagaaaccaagaaagatgaggatcctgaaaataaaattgaatttaaaacacgtctgggccgcaatgtttaccgaatgctttttaagagcaaagcatatgagcggaatgagttgttcctgccgggccgcatggcctatgtggtagacctggatgatgagtatgctgacacagatatccccaccactcttatccgcagcaaggctgattgccccaccatggaggcccagaccacactgaccacaaatgacattgtcattagcaagctgacccagatcctttcatacctgaggcagggaacccgtaacaagaagcttaagaagaaggataaagggaagctggaagagaagaaacctcctgaggctgacatgaatatttttgaagacattggggattacgtaccctccacaaccaagacacctcgggacaaggagcgggagagatatcgggaacgggagcgtgatcgggaaagagacagagaccgtgaccgagagcgagagcgagaacgagatcgggaacgagagcgagagcgggaccgagagagagaagaggaaaagaagagacacagctactttgagaagccaaaagtagatgatgagcccatggacgttgacaaaggacctgggtctaccaaggagttgatcaagtccatcaatgaaaagtttgctgggtctgctggctgggaaggcacagaatcgctgaagaagccagaagacaaaaagcagctgggagatttctttggcatgtccaacagttatgcagagtgctacccagccacgatggatgacatggctgtggatagtgatgaggaggtggattatagcaaaatggaccagggtaacaagaaggggcccttaggccgttgggactttgatacccaggaagaatacagcgagtatatgaacaacaaagaagctttgcccaaggctgcattccagtatggtatcaaaatgtctgaagggcggaaaaccaggcgcttcaaggaaaccaatgacaaagcagagcttgatcgccagtggaagaagattagtgcaatcattgagaagaggaagaagatggaagctgatggggttgaagtcaaaagaccaaaatactaatcactagttacaaccagagatgctccacaaggatatgctccccactgttttctttctacaatttccaaaggttgcaagatgtttttttgtggatgaatataaaattttattgtgtaattacttggttccattaaaattggttaacttgcaaaaaaaaaaaaaagaaaaactc

SEQ ID NO: 424851 - DNA, 3445 bp, Homo sapiens
agcggcccggccgggggggcaagatggcggcggcagtaggggttcgtggccggtacgagctgccgccttgctccggcccaggctggctcctcagcctttccgccttgctgagtgtggcggcacgaggggccttcgccaccacgcactgggtcgtcacggaggacgggaaaatccagcagcaggtggattcaccaatgaacttgaagcatcctcatgacctagtcatattaatgagacaagaagcaacagttaactacctcaaagaattagagaaacaattagttgctcaaaaaattcacatagaagagaatgaggacagagacacaggactggaacagagacataataaagaagacccagactgcatcaaagccaaggtgcccttaggggacctggatctatatgatggcacatacataactttggagagcaaagacatcagtcctgaagattatatagacacagaatctcctgtccctccagacccagagcaacctgattgtactaaaattctagaacttccatatagtatacatgcttttcagcacttgagaggtgtacaggagagagttaatctttctgcacctctgctacctaaagaagacccaatcttcacatatttatctaaacggttaggaaggagtatagatgacataggtcacctcattcatgaaggcctacagaagaacacttcctcgtgggtactgtataacatggcttcattttactggagaattaagaatgagccatatcaggtagtagaatgtgccatgcgagcacttcacttctcttccaggcacaataaagacattgccctggtcaacctggcaaacgttctacacagagcacacttctctgctgatgctgctgtcgtggtccatgcagctctggatgacagtgacttcttcaccagctattacactttggggaatatatatgcaatgcttggggaatataaccactcagtgctctgttatgaccacgctttgcaggccagacctgggtttgagcaagctataaagaggaagcatgctgtcctatgtcagcaaaaactggagcagaaattggaggctcagcatagatctctccagcgaacactgaatgagttaaaagagtatcaaaagcagcatgaccactacctgagacagcaggaaatcctagaaaaacataaactgattcaggaggagcaaatcttaagaaatatcattcatgagactcagatggcaaaagaggcacaattaggaaatcatcagatatgccgactggtcaaccagcagcatagtttacattgccagtgggaccagcctgtacgctatcatcgtggagatatctttgaaaatgtggactatgttcagtttggtgaggattcatcaacctccagtatgatgtctgtgaactttgatgttcaatcaaatcagagtgatatcaatgattcggtcaagtcttctcccgtagcccattctattctctggatttggggcagggactctgatgcatatagggacaaacagcatattctatggcctaaaagagcagattgtacagaaagctaccctagagtccctgttggtggggaattgccaacgtattttctgcctccggaaaacaaaggactcaggatccacgaactcagcagtgatgattattctacagaagaagaggcccaaacccctgactgttccataactgacttcagaaaaagccacactctgtcctacttagtcaaagaattagaggttcgcatggatctgaaagccaaaatgccagatgaccatgcacgaaaaattttgctttcccgtattaataactatactatcccagaagaagaaattgggtctttcttatttcatgctattaataagccaaatgctcctatctggctcatactcaatgaagctggactatactggagagcagtaggaaatagcacttttgctattgcctgtcttcagagggctttgaatttagctccacttcaataccaagatgttcctcttgtcaacttggccaaccttttgattcattacggccttcatcttgatgccactaagctgctacttcaagctttggccatcaatagctctgagcctctgacctttttgagcctgggaaatgcttaccttgctctgaagaatatcagtggggcacttgaggcctttagacaggccttgaaattaaccaccaaatgtccagagtgtgaaaacagcctgaagttgatccgctgtatgcagttttatccttttctgtacaacatcacttcttctgtttgcagtggtaattgtcatgagaaaaccctggacaacagccatgacaaacagaaatattttgacaactcacagtcactggatgctgctgaagaagagccctctgagagaggaacagaggaggaccctgtattctctgttgagaattcagggagggactcagatgcccttagacttgaaagtacggtggttgaggagagcaatggttctgatgagatggagaattcagatgaaaccaaaatgtcagaagaaatactggctttggtggatgaatttcaacaggcatggcctttggaaggctttgggggtgcactagagatgaaagggcggcgtctagacttacaaggaatacgggtgctgaagaaaggtccccaggatggagtggccagaagctcttgctatggagactgcagaagtgaagatgatgaagcaacagaatggattacattccaggtcaaacgtgtaaagaaacccaaaggagatcataagaaaactcctgggaaaaaagtagaaacaggtcagatagaaaatggacatcgttaccaagcaaacctagagatcactggccccaaggtggcatctcctgggccacaagggctactagactggaagaccaggaaagtgccatagacataatgtaactggatttcagcaaggcatttaacagagcctcttatgatatccttgtgaaccagatggagagatgtgggcttgaagccttcccattgcctacaggataaaattcaaacttcctagtgtggtgtacaagaccctttacagcccgcctctgtgtacccttcaacaccattctctgaaccaaccatgctcatgtttttacctcagtgcctttgcacatgctattccctctgcctggaatgccctgtgccccctctgccctctgccgtgctaaaatatcactcatccttaaacttcaaaatcaagtgccatctcttccttgttaccttcaggcagaattagttactctttcctctgtgcaattgttctatatcttcgctctagctcttttcctgttgtattgtaatgatttgtttatgtttaccttccttactagactgtgagctcaagagcaggccgtcttaattattcctttctgtacccctagtgtcttttatggttctcagccccttataacaggtgctcaataaatatttttcaaatga

SEQ ID NO: 424852 - DNA, 627 bp, Homo sapiens
tcacaccctaatgcacgtgctcagctgatgattagaatgctcttctgacaggtatagtttctttgcactgtgtcctgttctttatcattgcttatcattcagtctggctcttcttcatcttgaatttcagaagagccagaatattaaaggtgctccttttgagtattctaagttaaactgtcttgagtcgtgtttgtaattttacttttttaatctctagaacacttcctcgtgggtactgtataacatggcttcattttactggagaattaagaatgagccatatcaggtagtagaatgtgccatgcgagcacttcacttctcttccaggtaagattcctcctcttctggacctgattttccacattcctcaggactgttaaagaaacaatacataagaaagcagtaagaagcaacattgcattatatacttttctccatccctgttcaaagaaataagtcccaccacaaaaaaaaaaaaaaaatcacagatctcaaaaagttcaaagtgataattgtgtaatatactttccatttccattaaggaaaaaatatgtagatgccctatgattcacatgatacttgaatggaattatcataaactaagtttaacttttcttaaagcaa

SEQ ID NO: 424853 - DNA, 624 bp, Homo sapiens
gaagtgtatagtatattgaaagaaaaaatggcgggtgcggtggctcacatctgtaatcccagcactttgggaggccagggtgggaggatcacttgagtccaggaggttaaggctccagaaagctagtatcatgccacggcactctagcctgggcaagaaagcaaggtgctgtctctaacttaaaaaaagaaaaatggaaaaaacttaaccacatgaggttaaaaaaagaaaaatggaaaaaacttaaccacatgaggttaaggatgtaaagcacttagcatgggatctgaatacacaggaagtgctcttcaaatagttgataaccaggctggttcttggactgtggtggtgtggtgggggctgggaggagatgataatctttcattaacatcattactccctgctgctcttctttatagtagtggttctctctactgggtgtggacatttggcaatatctggagacatttttgttgttatatctggggaacagtgctaccaccatccagtgggtgaaggccaaagatgatgctaaacaccctccaatgcacaggacaggtccctcaaaaaattatccagcccaaaatgccaataataccaggttgagaaaccctgctttagaga

SEQ ID NO: 424854 - DNA, 263 bp, Homo sapiens
atgatttgtttatgtttacaatacaacaggaaaagagctagagcgaagatatagaacaattgcacagaggaaagagtaactaattctatatcttcgctctagctcttttcctgttgtattgtaatgatttgtttatgtttaccttccttactagactgtgagctcaagagcaggccgtcttaattattcctttctgtacccctagtgtcttttatggttctcagccccttataacaggtgctcaataaatatttttcaaatga

SEQ ID NO: 424855 - DNA, 4653 bp, Homo sapiens
agcggcccggccgggggggcaagatggcggcggcagtaggggttcgtggccggtacgagctgccgccttgctccggcccaggctggctcctcagcctttccgccttgctgagtgtggcggcacgaggggccttcgccaccacgcactgggtcgtcacggaggacgggaaaatccagcagcaggtggattcaccaatgaacttgaagcatcctcatgacctagtcatattaatgagacaagaagcaacagttaactacctcaaagaattagagaaacaattagttgctcaaaaaattcacatagaagagaatgaggacagagacacaggactggaacagagacataataaagaagacccagactgcatcaaagccaaggtgcccttaggggacctggatctatatgatggcacatacataactttggagagcaaagacatcagtcctgaagattatatagacacagaatctcctgtccctccagacccagagcaacctgattgtactaaaattctagaacttccatatagtatacatgcttttcagcacttgagaggtgtacaggagagagttaatctttctgcacctctgctacctaaagaagacccaatcttcacatatttatctaaacggttaggaaggagtatagatgacataggtcacctcattcatgaaggcctacagaagaacacttcctcgtgggtactgtataacatggcttcattttactggagaattaagaatgagccatatcaggtagtagaatgtgccatgcgagcacttcacttctcttccaggcacaataaagacattgccctggtcaacctggcaaacgttctacacagagcacacttctctgctgatgctgctgtcgtggtccatgcagctctggatgacagtgacttcttcaccagctattacactttggggaatatatatgcaatgcttggggaatataaccactcagtgctctgttatgaccacgctttgcaggccagacctgggtttgagcaagctataaagaggaagcatgctgtcctatgtcagcaaaaactggagcagaaattggaggctcagcatagatctctccagcgaacactgaatgagttaaaagagtatcaaaagcagcatgaccactacctgagacagcaggaaatcctagaaaaacataaactgattcaggaggagcaaatcttaagaaatatcattcatgagactcagatggcaaaagaggcacaattaggaaatcatcagatatgccgactggtcaaccagcagcatagtttacattgccagtgggaccagcctgtacgctatcatcgtggagatatctttgaaaatgtggactatgttcagtttggtgaggattcatcaacctccagtatgatgtctgtgaactttgatgttcaatcaaatcagagtgatatcaatgattcggtcaagtcttctcccgtagcccattctattctctggatttggggcagggactctgatgcatatagggacaaacagcatattctatggcctaaaagagcagattgtacagaaagctaccctagagtccctgttggtggggaattgccaacgtattttctgcctccggaaaacaaaggactcaggatccacgaactcagcagtgatgattattctacagaagaagaggcccaaacccctgactgttccataactgacttcagaaaaagccacactctgtcctacttagtcaaagaattagaggttcgcatggatctgaaagccaaaatgccagatgaccatgcacgaaaaattttgctttcccgtattaataactatactatcccagaagaagaaattgggtctttcttatttcatgctattaataagccaaatgctcctatctggctcatactcaatgaagctggactatactggagagcagtaggaaatagcacttttgctattgcctgtcttcagagggctttgaatttagctccacttcaataccaagatgttcctcttgtcaacttggccaaccttttgattcattacggccttcatcttgatgccactaagctgctacttcaagctttggccatcaatagctctgagcctctgacctttttgagcctgggaaatgcttaccttgctctgaagaatatcagtggggcacttgaggcctttagacaggccttgaaattaaccaccaaatgtccagagtgtgaaaacagcctgaagttgatccgctgtatgcagttttatccttttctgtacaacatcacttcttctgtttgcagtggtaattgtcatgagaaaaccctggacaacagccatgacaaacagaaatattttgacaactcacagtcactggatgctgctgaagaagagccctctgagagaggaacagaggaggaccctgtattctctgttgagaattcagggagggactcagatgcccttagacttgaaagtacggtggttgaggagagcaatggttctgatgagatggagaattcagatgaaaccaaaatgtcagaagaaatactggctttggtggatgaatttcaacaggcatggcctttggaaggctttgggggtgcactagagatgaaagggcggcgtctagacttacaaggaatacgggtgctgaagaaaggtccccaggatggagtggccagaagctcttgctatggagactgcagaagtgaagatgatgaagcaacagaatggattacattccaggtcaaacgtgtaaagaaacccaaaggagatcataagaaaactcctgggaaaaaagtagaaacaggtcagatagaaaatggacatcgttaccaagcaaacctagagatcactggccccaaggtggcatctcctgggccacaaggaaaaaaacgtgactaccagcgtctgggatggcccagcccggacgaatgcctcaaactccgctgggtagagctgactgccatcgtgagtacctggcttgcagtttcttcaaaaaacattgacatcacagaacacatagattttgccacccctatacagcagccagcaatggagcctctttgcaatggcaatctccccacgagtatgcataccctggaccacttgcatggggtttccaaccgagccagcctgcactacacaggggagagtcagttaacagaggtattacaaaatctcggcaaagaccaatatccacaacagtcgcttgaacagattggcacccgaattgccaaagttttggaaaagaaccagacgtcctgggtcctctccagcatggcagccctctactggagggtgaaaggccaaggaaagaaggcaatcgactgcctccgccaggctctgcactatgcgccacaccagatgaaggatgtgcccctgattagcctggccaacatcttgcacaatgccaagctctggaatgacgccgtcatagtagccaccatggcagtagagatcgcaccacactttgctgtgaaccacttcactctgggcaatgtctacgtggcaatggaagaatttgaaaaagcactggtgtggtatgaatccacattgaagcttcagcccgagtttgtcccagccaagaaccgaatccagaccatccagtgtcacttaatgctgaagaagggacggcgctctccttagtgcacttcttccttctctctttctctttactcatgctctaaaaaaaaagaataagaaaagaaaccaatcattgtcagtatctactattaatgatgtgtgtgaaaataactaagacttataacaggacttttacatatgtgggaattggtttgtttttgtttttacgtttctcctttcccccaaccaacctcagaagaggcaccttcagaaacacacatttcttaaaaggaaagtgcagcttcaagatattgtgtaaatactgagccaagacatttctggagctgtgctctgtctccaaaaacctcaatgcctttagggcttttctcagtggtccagctagccttctctttggaggaggatgaagccgcattgcacattctctgcttcctgtcgtagcctctgttgtcaatggaaatgcggaagcccatctggtgcccgtcagtgagaagcaacgttctgcgctctctccgttagacctccatgctgtccccagtcttgtccattccatgctgctgtgttacaaactctcagaggtagtttgcaggggaggaaggggaatatgattttaaaaacaaaatatttacaacaacaaaaattcttaggatcacctgacctttgtaatgttatttatgttggggagggaggggggctgagaaggggaaatcagcagtgtgcaacatctttataatttgtactttaattacaaatcacaaggaaaccaataagttgaaatcctatataacaggtttatatatatagaatatgtatatttgaagccctctacagactgagtctatgttttactaattctttgttcactgtgttacccatcttggaataagttgtgaatgtcagctccctctctctgaggcctccagacttagctcctcaggagggtaatgagccaaggttgagtgtttccatacaatgcttttacctttgatcccaggagaatcagaaactccaacattttggaatcttcaagggcacatactgagaaaaaaaataaaattgtttatgagcaaaaaaaaaa

SEQ ID NO: 424856 - DNA, 4602 bp, Homo sapiens
agcggcccggccgggggggcaagatggcggcggcagtaggggttcgtggccggtacgagctgccgccttgctccggcccaggctggctcctcagcctttccgccttgctgagtgtggcggcacgaggggccttcgccaccacgcactgggtcgtcacggaggacgggaaaatccagcagcaggtggattcaccaatgaacttgaagcatcctcatgacctagtcatattaatgagacaagaagcaacagttaactacctcaaagaattagagaaacaattagttgctcaaaaaattcacatagaagagaatgaggacagagacacaggactggaacagagacataataaagaagacccagactgcatcaaagccaaggtgcccttaggggacctggatctatatgatggcacatacataactttggagagcaaagacatcagtcctgaagattatatagacacagaatctcctgtccctccagacccagagcaacctgattgtactaaaattctagaacttccatatagtatacatgcttttcagcacttgagaggtgtacaggagagagttaatctttctgcacctctgctacctaaagaagacccaatcttcacatatttatctaaacggttaggaaggagtatagatgacataggtcacctcattcatgaaggcctacagaagaacacttcctcgtgggtactgtataacatggcttcattttactggagaattaagaatgagccatatcaggtagtagaatgtgccatgcgagcacttcacttctcttccaggcacaataaagacattgccctggtcaacctggcaaacgttctacacagagcacacttctctgctgatgctgctgtcgtggtccatgcagctctggatgacagtgacttcttcaccagctattacactttggggaatatatatgcaatgcttggggaatataaccactcagtgctctgttatgaccacgctttgcaggccagacctgggtttgagcaagctataaagaggaagcatgctgtcctatgtcagcaaaaactggagcagaaattggaggctcagcatagatctctccagcgaacactgaatgagttaaaagagtatcaaaagcagcatgaccactacctgagacagcaggaaatcctagaaaaacataaactgattcaggaggagcaaatcttaagaaatatcattcatgagactcagatggcaaaagaggcacaattaggaaatcatcagatatgccgactggtcaaccagcagcatagtttacattgccagtgggaccagcctgtacgctatcatcgtggagatatctttgaaaatgtggactatgttcagtttggtgaggattcatcaacctccagtatgatgtctgtgaactttgatgttcaatcaaatcagagtgatatcaatgattcggtcaagtcttctcccgtagcccattctattctctggatttggggcagggactctgatgcatatagggacaaacagcatattctatggcctaaaagagcagattgtacagaaagctaccctagagtccctgttggtggggaattgccaacgtattttctgcctccggaaaacaaaggactcaggatccacgaactcagcagtgatgattattctacagaagaagaggcccaaacccctgactgttccataactgacttcagaaaaagccacactctgtcctacttagtcaaagaattagaggttcgcatggatctgaaagccaaaatgccagatgaccatgcacgaaaatctttcttatttcatgctattaataagccaaatgctcctatctggctcatactcaatgaagctggactatactggagagcagtaggaaatagcacttttgctattgcctgtcttcagagggctttgaatttagctccacttcaataccaagatgttcctcttgtcaacttggccaaccttttgattcattacggccttcatcttgatgccactaagctgctacttcaagctttggccatcaatagctctgagcctctgacctttttgagcctgggaaatgcttaccttgctctgaagaatatcagtggggcacttgaggcctttagacaggccttgaaattaaccaccaaatgtccagagtgtgaaaacagcctgaagttgatccgctgtatgcagttttatccttttctgtacaacatcacttcttctgtttgcagtggtaattgtcatgagaaaaccctggacaacagccatgacaaacagaaatattttgacaactcacagtcactggatgctgctgaagaagagccctctgagagaggaacagaggaggaccctgtattctctgttgagaattcagggagggactcagatgcccttagacttgaaagtacggtggttgaggagagcaatggttctgatgagatggagaattcagatgaaaccaaaatgtcagaagaaatactggctttggtggatgaatttcaacaggcatggcctttggaaggctttgggggtgcactagagatgaaagggcggcgtctagacttacaaggaatacgggtgctgaagaaaggtccccaggatggagtggccagaagctcttgctatggagactgcagaagtgaagatgatgaagcaacagaatggattacattccaggtcaaacgtgtaaagaaacccaaaggagatcataagaaaactcctgggaaaaaagtagaaacaggtcagatagaaaatggacatcgttaccaagcaaacctagagatcactggccccaaggtggcatctcctgggccacaaggaaaaaaacgtgactaccagcgtctgggatggcccagcccggacgaatgcctcaaactccgctgggtagagctgactgccatcgtgagtacctggcttgcagtttcttcaaaaaacattgacatcacagaacacatagattttgccacccctatacagcagccagcaatggagcctctttgcaatggcaatctccccacgagtatgcataccctggaccacttgcatggggtttccaaccgagccagcctgcactacacaggggagagtcagttaacagaggtattacaaaatctcggcaaagaccaatatccacaacagtcgcttgaacagattggcacccgaattgccaaagttttggaaaagaaccagacgtcctgggtcctctccagcatggcagccctctactggagggtgaaaggccaaggaaagaaggcaatcgactgcctccgccaggctctgcactatgcgccacaccagatgaaggatgtgcccctgattagcctggccaacatcttgcacaatgccaagctctggaatgacgccgtcatagtagccaccatggcagtagagatcgcaccacactttgctgtgaaccacttcactctgggcaatgtctacgtggcaatggaagaatttgaaaaagcactggtgtggtatgaatccacattgaagcttcagcccgagtttgtcccagccaagaaccgaatccagaccatccagtgtcacttaatgctgaagaagggacggcgctctccttagtgcacttcttccttctctctttctctttactcatgctctaaaaaaaaagaataagaaaagaaaccaatcattgtcagtatctactattaatgatgtgtgtgaaaataactaagacttataacaggacttttacatatgtgggaattggtttgtttttgtttttacgtttctcctttcccccaaccaacctcagaagaggcaccttcagaaacacacatttcttaaaaggaaagtgcagcttcaagatattgtgtaaatactgagccaagacatttctggagctgtgctctgtctccaaaaacctcaatgcctttagggcttttctcagtggtccagctagccttctctttggaggaggatgaagccgcattgcacattctctgcttcctgtcgtagcctctgttgtcaatggaaatgcggaagcccatctggtgcccgtcagtgagaagcaacgttctgcgctctctccgttagacctccatgctgtccccagtcttgtccattccatgctgctgtgttacaaactctcagaggtagtttgcaggggaggaaggggaatatgattttaaaaacaaaatatttacaacaacaaaaattcttaggatcacctgacctttgtaatgttatttatgttggggagggaggggggctgagaaggggaaatcagcagtgtgcaacatctttataatttgtactttaattacaaatcacaaggaaaccaataagttgaaatcctatataacaggtttatatatatagaatatgtatatttgaagccctctacagactgagtctatgttttactaattctttgttcactgtgttacccatcttggaataagttgtgaatgtcagctccctctctctgaggcctccagacttagctcctcaggagggtaatgagccaaggttgagtgtttccatacaatgcttttacctttgatcccaggagaatcagaaactccaacattttggaatcttcaagggcacatactgagaaaaaaaataaaattgtttatgagcaaaaaaaaaa

SEQ ID NO: 424857 - DNA, 4809 bp, Homo sapiens
agcggcccggccgggggggcaagatggcggcggcagtaggggttcgtggccggtacgagctgccgccttgctccggcccaggctggctcctcagcctttccgccttgctgagtgtggcggcacgaggggccttcgccaccacgcactgggtcgtcacggaggacgggaaaatccagcagcaggtggattcaccaatgaacttgaagcatcctcatgacctagtcatattaatgagacaagaagcaacagttaactacctcaaagaattagagaaacaattagttgctcaaaaaattcacatagaagagaatgaggacagagacacaggactggaacagagacataataaagaagacccagactgcatcaaagccaaggtgcccttaggggacctggatctatatgatggcacatacataactttggagagcaaagacatcagtcctgaagattatatagacacagaatctcctgtccctccagacccagagcaacctgattgtactaaaattctagaacttccatatagtatacatgcttttcagcacttgagaggtgtacaggagagagttaatctttctgcacctctgctacctaaagaagacccaatcttcacatatttatctaaacggttaggaaggagtatagatgacataggtcacctcattcatgaaggcctacagaagaacacttcctcgtgggtactgtataacatggcttcattttactggagaattaagaatgagccatatcaggtagtagaatgtgccatgcgagcacttcacttctcttccaggcacaataaagacattgccctggtcaacctggcaaacgttctacacagagcacacttctctgctgatgctgctgtcgtggtccatgcagctctggatgacagtgacttcttcaccagctattacactttggggaatatatatgcaatgcttggggaatataaccactcagtgctctgttatgaccacgctttgcaggccagacctgggtttgagcaagctataaagaggaagcatgctgtcctatgtcagcaaaaactggagcagaaattggaggctcagcatagatctctccagcgaacactgaatgagttaaaagagtatcaaaagcagcatgaccactacctgagacagcaggaaatcctagaaaaacataaactgattcaggaggagcaaatcttaagaaatatcattcatgagactcagatggcaaaagaggcacaattaggaaatcatcagatatgccgactggtcaaccagcagcatagtttacattgccagtgggaccagcctgtacgctatcatcgtggagatatctttgaaaatgtggactatgttcagtttggtgaggattcatcaacctccagtatgatgtctgtgaactttgatgttcaatcaaatcagagtgatatcaatgattcggtcaagtcttctcccgtagcccattctattctctggatttggggcagggactctgatgcatatagggacaaacagcatattctatggcctaaaagagcagattgtacagaaagctaccctagagtccctgttggtggggaattgccaacgtattttctgcctccggaaaacaaaggactcaggcaagtggtgatggatttggcaaagcacctgattctgcatgattgtcatctagcggttctttgagagcaccagccttggacttgaaaagttaagtctttatcttgaagtcacccaaactttgaaaatatgaatcttgttcctttttcttgtgccaggatccacgaactcagcagtgatgattattctacagaagaagaggcccaaacccctgactgttccataactgacttcagaaaaagccacactctgtcctacttagtcaaagaattagaggttcgcatggatctgaaagccaaaatgccagatgaccatgcacgaaaaattttgctttcccgtattaataactatactatcccagaagaagaaattgggtctttcttatttcatgctattaataagccaaatgctcctatctggctcatactcaatgaagctggactatactggagagcagtaggaaatagcacttttgctattgcctgtcttcagagggctttgaatttagctccacttcaataccaagatgttcctcttgtcaacttggccaaccttttgattcattacggccttcatcttgatgccactaagctgctacttcaagctttggccatcaatagctctgagcctctgacctttttgagcctgggaaatgcttaccttgctctgaagaatatcagtggggcacttgaggcctttagacaggccttgaaattaaccaccaaatgtccagagtgtgaaaacagcctgaagttgatccgctgtatgcagttttatccttttctgtacaacatcacttcttctgtttgcagtggtaattgtcatgagaaaaccctggacaacagccatgacaaacagaaatattttgacaactcacagtcactggatgctgctgaagaagagccctctgagagaggaacagaggaggaccctgtattctctgttgagaattcagggagggactcagatgcccttagacttgaaagtacggtggttgaggagagcaatggttctgatgagatggagaattcagatgaaaccaaaatgtcagaagaaatactggctttggtggatgaatttcaacaggcatggcctttggaaggctttgggggtgcactagagatgaaagggcggcgtctagacttacaaggaatacgggtgctgaagaaaggtccccaggatggagtggccagaagctcttgctatggagactgcagaagtgaagatgatgaagcaacagaatggattacattccaggtcaaacgtgtaaagaaacccaaaggagatcataagaaaactcctgggaaaaaagtagaaacaggtcagatagaaaatggacatcgttaccaagcaaacctagagatcactggccccaaggtggcatctcctgggccacaaggaaaaaaacgtgactaccagcgtctgggatggcccagcccggacgaatgcctcaaactccgctgggtagagctgactgccatcgtgagtacctggcttgcagtttcttcaaaaaacattgacatcacagaacacatagattttgccacccctatacagcagccagcaatggagcctctttgcaatggcaatctccccacgagtatgcataccctggaccacttgcatggggtttccaaccgagccagcctgcactacacaggggagagtcagttaacagaggtattacaaaatctcggcaaagaccaatatccacaacagtcgcttgaacagattggcacccgaattgccaaagttttggaaaagaaccagacgtcctgggtcctctccagcatggcagccctctactggagggtgaaaggccaaggaaagaaggcaatcgactgcctccgccaggctctgcactatgcgccacaccagatgaaggatgtgcccctgattagcctggccaacatcttgcacaatgccaagctctggaatgacgccgtcatagtagccaccatggcagtagagatcgcaccacactttgctgtgaaccacttcactctgggcaatgtctacgtggcaatggaagaatttgaaaaagcactggtgtggtatgaatccacattgaagcttcagcccgagtttgtcccagccaagaaccgaatccagaccatccagtgtcacttaatgctgaagaagggacggcgctctccttagtgcacttcttccttctctctttctctttactcatgctctaaaaaaaaagaataagaaaagaaaccaatcattgtcagtatctactattaatgatgtgtgtgaaaataactaagacttataacaggacttttacatatgtgggaattggtttgtttttgtttttacgtttctcctttcccccaaccaacctcagaagaggcaccttcagaaacacacatttcttaaaaggaaagtgcagcttcaagatattgtgtaaatactgagccaagacatttctggagctgtgctctgtctccaaaaacctcaatgcctttagggcttttctcagtggtccagctagccttctctttggaggaggatgaagccgcattgcacattctctgcttcctgtcgtagcctctgttgtcaatggaaatgcggaagcccatctggtgcccgtcagtgagaagcaacgttctgcgctctctccgttagacctccatgctgtccccagtcttgtccattccatgctgctgtgttacaaactctcagaggtagtttgcaggggaggaaggggaatatgattttaaaaacaaaatatttacaacaacaaaaattcttaggatcacctgacctttgtaatgttatttatgttggggagggaggggggctgagaaggggaaatcagcagtgtgcaacatctttataatttgtactttaattacaaatcacaaggaaaccaataagttgaaatcctatataacaggtttatatatatagaatatgtatatttgaagccctctacagactgagtctatgttttactaattctttgttcactgtgttacccatcttggaataagttgtgaatgtcagctccctctctctgaggcctccagacttagctcctcaggagggtaatgagccaaggttgagtgtttccatacaatgcttttacctttgatcccaggagaatcagaaactccaacattttggaatcttcaagggcacatactgagaaaaaaaataaaattgtttatgagcaaaaaaaaaa

SEQ ID NO: 424858 - DNA, 4960 bp, Homo sapiens
agcggcccggccgggggggcaagatggcggcggcagtaggggttcgtggccggtacgagctgccgccttgctccggcccaggctggctcctcagcctttccgccttgctgagtgtggcggcacgaggggccttcgccaccacgcactgggtcgtcacggaggacgggaaaatccagcagcagttatagccaggagcccatgcgtatctctctcaagagtggaagctgggctgctatttttgcgaacctgtacttctctaaacctcaaagaagatgtaagcccatgatggttagacttgaatcctgaagagataattccatgagaagtggagcaacagactttctgcctgcgtcattccatccctgtgaaactcatcttgcttgctaccatagtagcctggaagggatcgcaaacagaagggtctcttagacaatcatttgattgtttgagctagatttgtgataagggtaaaaatctgagggaagaaaggtggattcaccaatgaacttgaagcatcctcatgacctagtcatattaatgagacaagaagcaacagttaactacctcaaagaattagagaaacaattagttgctcaaaaaattcacatagaagagaatgaggacagagacacaggactggaacagagacataataaagaagacccagactgcatcaaagccaaggtgcccttaggggacctggatctatatgatggcacatacataactttggagagcaaagacatcagtcctgaagattatatagacacagaatctcctgtccctccagacccagagcaacctgattgtactaaaattctagaacttccatatagtatacatgcttttcagcacttgagaggtgtacaggagagagttaatctttctgcacctctgctacctaaagaagacccaatcttcacatatttatctaaacggttaggaaggagtatagatgacataggtcacctcattcatgaaggcctacagaagaacacttcctcgtgggtactgtataacatggcttcattttactggagaattaagaatgagccatatcaggtagtagaatgtgccatgcgagcacttcacttctcttccaggcacaataaagacattgccctggtcaacctggcaaacgttctacacagagcacacttctctgctgatgctgctgtcgtggtccatgcagctctggatgacagtgacttcttcaccagctattacactttggggaatatatatgcaatgcttggggaatataaccactcagtgctctgttatgaccacgctttgcaggccagacctgggtttgagcaagctataaagaggaagcatgctgtcctatgtcagcaaaaactggagcagaaattggaggctcagcatagatctctccagcgaacactgaatgagttaaaagagtatcaaaagcagcatgaccactacctgagacagcaggaaatcctagaaaaacataaactgattcaggaggagcaaatcttaagaaatatcattcatgagactcagatggcaaaagaggcacaattaggaaatcatcagatatgccgactggtcaaccagcagcatagtttacattgccagtgggaccagcctgtacgctatcatcgtggagatatctttgaaaatgtggactatgttcagtttggtgaggattcatcaacctccagtatgatgtctgtgaactttgatgttcaatcaaatcagagtgatatcaatgattcggtcaagtcttctcccgtagcccattctattctctggatttggggcagggactctgatgcatatagggacaaacagcatattctatggcctaaaagagcagattgtacagaaagctaccctagagtccctgttggtggggaattgccaacgtattttctgcctccggaaaacaaaggactcaggatccacgaactcagcagtgatgattattctacagaagaagaggcccaaacccctgactgttccataactgacttcagaaaaagccacactctgtcctacttagtcaaagaattagaggttcgcatggatctgaaagccaaaatgccagatgaccatgcacgaaaaattttgctttcccgtattaataactatactatcccagaagaagaaattgggtctttcttatttcatgctattaataagccaaatgctcctatctggctcatactcaatgaagctggactatactggagagcagtaggaaatagcacttttgctattgcctgtcttcagagggctttgaatttagctccacttcaataccaagatgttcctcttgtcaacttggccaaccttttgattcattacggccttcatcttgatgccactaagctgctacttcaagctttggccatcaatagctctgagcctctgacctttttgagcctgggaaatgcttaccttgctctgaagaatatcagtggggcacttgaggcctttagacaggccttgaaattaaccaccaaatgtccagagtgtgaaaacagcctgaagttgatccgctgtatgcagttttatccttttctgtacaacatcacttcttctgtttgcagtggtaattgtcatgagaaaaccctggacaacagccatgacaaacagaaatattttgacaactcacagtcactggatgctgctgaagaagagccctctgagagaggaacagaggaggaccctgtattctctgttgagaattcagggagggactcagatgcccttagacttgaaagtacggtggttgaggagagcaatggttctgatgagatggagaattcagatgaaaccaaaatgtcagaagaaatactggctttggtggatgaatttcaacaggcatggcctttggaaggctttgggggtgcactagagatgaaagggcggcgtctagacttacaaggaatacgggtgctgaagaaaggtccccaggatggagtggccagaagctcttgctatggagactgcagaagtgaagatgatgaagcaacagaatggattacattccaggtcaaacgtgtaaagaaacccaaaggagatcataagaaaactcctgggaaaaaagtagaaacaggtcagatagaaaatggacatcgttaccaagcaaacctagagatcactggccccaaggtggcatctcctgggccacaaggaaaaaaacgtgactaccagcgtctgggatggcccagcccggacgaatgcctcaaactccgctgggtagagctgactgccatcgtgagtacctggcttgcagtttcttcaaaaaacattgacatcacagaacacatagattttgccacccctatacagcagccagcaatggagcctctttgcaatggcaatctccccacgagtatgcataccctggaccacttgcatggggtttccaaccgagccagcctgcactacacaggggagagtcagttaacagaggtattacaaaatctcggcaaagaccaatatccacaacagtcgcttgaacagattggcacccgaattgccaaagttttggaaaagaaccagacgtcctgggtcctctccagcatggcagccctctactggagggtgaaaggccaaggaaagaaggcaatcgactgcctccgccaggctctgcactatgcgccacaccagatgaaggatgtgcccctgattagcctggccaacatcttgcacaatgccaagctctggaatgacgccgtcatagtagccaccatggcagtagagatcgcaccacactttgctgtgaaccacttcactctgggcaatgtctacgtggcaatggaagaatttgaaaaagcactggtgtggtatgaatccacattgaagcttcagcccgagtttgtcccagccaagaaccgaatccagaccatccagtgtcacttaatgctgaagaagggacggcgctctccttagtgcacttcttccttctctctttctctttactcatgctctaaaaaaaaagaataagaaaagaaaccaatcattgtcagtatctactattaatgatgtgtgtgaaaataactaagacttataacaggacttttacatatgtgggaattggtttgtttttgtttttacgtttctcctttcccccaaccaacctcagaagaggcaccttcagaaacacacatttcttaaaaggaaagtgcagcttcaagatattgtgtaaatactgagccaagacatttctggagctgtgctctgtctccaaaaacctcaatgcctttagggcttttctcagtggtccagctagccttctctttggaggaggatgaagccgcattgcacattctctgcttcctgtcgtagcctctgttgtcaatggaaatgcggaagcccatctggtgcccgtcagtgagaagcaacgttctgcgctctctccgttagacctccatgctgtccccagtcttgtccattccatgctgctgtgttacaaactctcagaggtagtttgcaggggaggaaggggaatatgattttaaaaacaaaatatttacaacaacaaaaattcttaggatcacctgacctttgtaatgttatttatgttggggagggaggggggctgagaaggggaaatcagcagtgtgcaacatctttataatttgtactttaattacaaatcacaaggaaaccaataagttgaaatcctatataacaggtttatatatatagaatatgtatatttgaagccctctacagactgagtctatgttttactaattctttgttcactgtgttacccatcttggaataagttgtgaatgtcagctccctctctctgaggcctccagacttagctcctcaggagggtaatgagccaaggttgagtgtttccatacaatgcttttacctttgatcccaggagaatcagaaactccaacattttggaatcttcaagggcacatactgagaaaaaaaataaaattgtttatgagcaaaaaaaaaa

SEQ ID NO: 424859 - DNA, 4606 bp, Homo sapiens
agcggcccggccgggggggcaagatggcggcggcagtaggggttcgtggccggtacgagctgccgccttgctccggcccaggctggctcctcagcctttccgccttgctgagtgtggcggcacgaggggccttcgccaccacgcactgggtcgtcacggaggacgggaaaatccagcagcaggtggattcaccaatgaacttgaagcatcctcatgacctagtcatattaatgagacaagaagcaacagttaactacctcaaagaattagagaaacaattagttgctcaaaaaattcacatagaagagaatgaggacagagacacaggactggaacagagacataataaagaagacccagactgcatcaaagccaaggtgcccttaggggacctggatctatatgatggcacatacataactttggagagcaaagacatcagtcctgaagattatatagacacagaatctcctgtccctccagacccagagcaacctgattgtactaggtgtacaggagagagttaatctttctgcacctctgctacctaaagaagacccaatcttcacatatttatctaaacggttaggaaggagtatagatgacataggtcacctcattcatgaaggcctacagaagaacacttcctcgtgggtactgtataacatggcttcattttactggagaattaagaatgagccatatcaggtagtagaatgtgccatgcgagcacttcacttctcttccaggcacaataaagacattgccctggtcaacctggcaaacgttctacacagagcacacttctctgctgatgctgctgtcgtggtccatgcagctctggatgacagtgacttcttcaccagctattacactttggggaatatatatgcaatgcttggggaatataaccactcagtgctctgttatgaccacgctttgcaggccagacctgggtttgagcaagctataaagaggaagcatgctgtcctatgtcagcaaaaactggagcagaaattggaggctcagcatagatctctccagcgaacactgaatgagttaaaagagtatcaaaagcagcatgaccactacctgagacagcaggaaatcctagaaaaacataaactgattcaggaggagcaaatcttaagaaatatcattcatgagactcagatggcaaaagaggcacaattaggaaatcatcagatatgccgactggtcaaccagcagcatagtttacattgccagtgggaccagcctgtacgctatcatcgtggagatatctttgaaaatgtggactatgttcagtttggtgaggattcatcaacctccagtatgatgtctgtgaactttgatgttcaatcaaatcagagtgatatcaatgattcggtcaagtcttctcccgtagcccattctattctctggatttggggcagggactctgatgcatatagggacaaacagcatattctatggcctaaaagagcagattgtacagaaagctaccctagagtccctgttggtggggaattgccaacgtattttctgcctccggaaaacaaaggactcaggatccacgaactcagcagtgatgattattctacagaagaagaggcccaaacccctgactgttccataactgacttcagaaaaagccacactctgtcctacttagtcaaagaattagaggttcgcatggatctgaaagccaaaatgccagatgaccatgcacgaaaaattttgctttcccgtattaataactatactatcccagaagaagaaattgggtctttcttatttcatgctattaataagccaaatgctcctatctggctcatactcaatgaagctggactatactggagagcagtaggaaatagcacttttgctattgcctgtcttcagagggctttgaatttagctccacttcaataccaagatgttcctcttgtcaacttggccaaccttttgattcattacggccttcatcttgatgccactaagctgctacttcaagctttggccatcaatagctctgagcctctgacctttttgagcctgggaaatgcttaccttgctctgaagaatatcagtggggcacttgaggcctttagacaggccttgaaattaaccaccaaatgtccagagtgtgaaaacagcctgaagttgatccgctgtatgcagttttatccttttctgtacaacatcacttcttctgtttgcagtggtaattgtcatgagaaaaccctggacaacagccatgacaaacagaaatattttgacaactcacagtcactggatgctgctgaagaagagccctctgagagaggaacagaggaggaccctgtattctctgttgagaattcagggagggactcagatgcccttagacttgaaagtacggtggttgaggagagcaatggttctgatgagatggagaattcagatgaaaccaaaatgtcagaagaaatactggctttggtggatgaatttcaacaggcatggcctttggaaggctttgggggtgcactagagatgaaagggcggcgtctagacttacaaggaatacgggtgctgaagaaaggtccccaggatggagtggccagaagctcttgctatggagactgcagaagtgaagatgatgaagcaacagaatggattacattccaggtcaaacgtgtaaagaaacccaaaggagatcataagaaaactcctgggaaaaaagtagaaacaggtcagatagaaaatggacatcgttaccaagcaaacctagagatcactggccccaaggtggcatctcctgggccacaaggaaaaaaacgtgactaccagcgtctgggatggcccagcccggacgaatgcctcaaactccgctgggtagagctgactgccatcgtgagtacctggcttgcagtttcttcaaaaaacattgacatcacagaacacatagattttgccacccctatacagcagccagcaatggagcctctttgcaatggcaatctccccacgagtatgcataccctggaccacttgcatggggtttccaaccgagccagcctgcactacacaggggagagtcagttaacagaggtattacaaaatctcggcaaagaccaatatccacaacagtcgcttgaacagattggcacccgaattgccaaagttttggaaaagaaccagacgtcctgggtcctctccagcatggcagccctctactggagggtgaaaggccaaggaaagaaggcaatcgactgcctccgccaggctctgcactatgcgccacaccagatgaaggatgtgcccctgattagcctggccaacatcttgcacaatgccaagctctggaatgacgccgtcatagtagccaccatggcagtagagatcgcaccacactttgctgtgaaccacttcactctgggcaatgtctacgtggcaatggaagaatttgaaaaagcactggtgtggtatgaatccacattgaagcttcagcccgagtttgtcccagccaagaaccgaatccagaccatccagtgtcacttaatgctgaagaagggacggcgctctccttagtgcacttcttccttctctctttctctttactcatgctctaaaaaaaaagaataagaaaagaaaccaatcattgtcagtatctactattaatgatgtgtgtgaaaataactaagacttataacaggacttttacatatgtgggaattggtttgtttttgtttttacgtttctcctttcccccaaccaacctcagaagaggcaccttcagaaacacacatttcttaaaaggaaagtgcagcttcaagatattgtgtaaatactgagccaagacatttctggagctgtgctctgtctccaaaaacctcaatgcctttagggcttttctcagtggtccagctagccttctctttggaggaggatgaagccgcattgcacattctctgcttcctgtcgtagcctctgttgtcaatggaaatgcggaagcccatctggtgcccgtcagtgagaagcaacgttctgcgctctctccgttagacctccatgctgtccccagtcttgtccattccatgctgctgtgttacaaactctcagaggtagtttgcaggggaggaaggggaatatgattttaaaaacaaaatatttacaacaacaaaaattcttaggatcacctgacctttgtaatgttatttatgttggggagggaggggggctgagaaggggaaatcagcagtgtgcaacatctttataatttgtactttaattacaaatcacaaggaaaccaataagttgaaatcctatataacaggtttatatatatagaatatgtatatttgaagccctctacagactgagtctatgttttactaattctttgttcactgtgttacccatcttggaataagttgtgaatgtcagctccctctctctgaggcctccagacttagctcctcaggagggtaatgagccaaggttgagtgtttccatacaatgcttttacctttgatcccaggagaatcagaaactccaacattttggaatcttcaagggcacatactgagaaaaaaaataaaattgtttatgagcaaaaaaaaaa

SEQ ID NO: 424860 - DNA, 4533 bp, Homo sapiens
agtgaacggagagcgtagtgacctatcatgagcctcctcaacaagcccaagagtgagatgaccccagaggagctgcagaagcgagaggaggagtgaatttaacaccggtccactctctgtgctcacacagtcagtcaagaacaatacccaatgtgctcatcaactgccgcaacaataagaaactcctgggccgctgtgaaggcctttcgataggcactgcaacatggtgctggagaacgtgaaggagatgtggactgaggtacccaagagtggcaaggcgcaagaagaagtccaagccagtcaacaaagaccgctacatctccaagatgttcctgcagctggggactctatgtcatctgtggtcctgcggaacccgctcatcgccggcaagtaggggccgcctgtctgttgatgagcacttgggtattgtcctgggtgtacaggagagagttaatctttctgcacctctgctacctaaagaagacccaatcttcacatatttatctaaacggttaggaaggagtatagatgacataggtcacctcattcatgaaggcctacagaagaacacttcctcgtgggtactgtataacatggcttcattttactggagaattaagaatgagccatatcaggtagtagaatgtgccatgcgagcacttcacttctcttccaggcacaataaagacattgccctggtcaacctggcaaacgttctacacagagcacacttctctgctgatgctgctgtcgtggtccatgcagctctggatgacagtgacttcttcaccagctattacactttggggaatatatatgcaatgcttggggaatataaccactcagtgctctgttatgaccacgctttgcaggccagacctgggtttgagcaagctataaagaggaagcatgctgtcctatgtcagcaaaaactggagcagaaattggaggctcagcatagatctctccagcgaacactgaatgagttaaaagagtatcaaaagcagcatgaccactacctgagacagcaggaaatcctagaaaaacataaactgattcaggaggagcaaatcttaagaaatatcattcatgagactcagatggcaaaagaggcacaattaggaaatcatcagatatgccgactggtcaaccagcagcatagtttacattgccagtgggaccagcctgtacgctatcatcgtggagatatctttgaaaatgtggactatgttcagtttggtgaggattcatcaacctccagtatgatgtctgtgaactttgatgttcaatcaaatcagagtgatatcaatgattcggtcaagtcttctcccgtagcccattctattctctggatttggggcagggactctgatgcatatagggacaaacagcatattctatggcctaaaagagcagattgtacagaaagctaccctagagtccctgttggtggggaattgccaacgtattttctgcctccggaaaacaaaggactcaggatccacgaactcagcagtgatgattattctacagaagaagaggcccaaacccctgactgttccataactgacttcagaaaaagccacactctgtcctacttagtcaaagaattagaggttcgcatggatctgaaagccaaaatgccagatgaccatgcacgaaaaattttgctttcccgtattaataactatactatcccagaagaagaaattgggtctttcttatttcatgctattaataagccaaatgctcctatctggctcatactcaatgaagctggactatactggagagcagtaggaaatagcacttttgctattgcctgtcttcagagggctttgaatttagctccacttcaataccaagatgttcctcttgtcaacttggccaaccttttgattcattacggccttcatcttgatgccactaagctgctacttcaagctttggccatcaatagctctgagcctctgacctttttgagcctgggaaatgcttaccttgctctgaagaatatcagtggggcacttgaggcctttagacaggccttgaaattaaccaccaaatgtccagagtgtgaaaacagcctgaagttgatccgctgtatgcagttttatccttttctgtacaacatcacttcttctgtttgcagtggtaattgtcatgagaaaaccctggacaacagccatgacaaacagaaatattttgacaactcacagtcactggatgctgctgaagaagagccctctgagagaggaacagaggaggaccctgtattctctgttgagaattcagggagggactcagatgcccttagacttgaaagtacggtggttgaggagagcaatggttctgatgagatggagaattcagatgaaaccaaaatgtcagaagaaatactggctttggtggatgaatttcaacaggcatggcctttggaaggctttgggggtgcactagagatgaaagggcggcgtctagacttacaaggaatacgggtgctgaagaaaggtccccaggatggagtggccagaagctcttgctatggagactgcagaagtgaagatgatgaagcaacagaatggattacattccaggtcaaacgtgtaaagaaacccaaaggagatcataagaaaactcctgggaaaaaagtagaaacaggtcagatagaaaatggacatcgttaccaagcaaacctagagatcactggccccaaggtggcatctcctgggccacaaggaaaaaaacgtgactaccagcgtctgggatggcccagcccggacgaatgcctcaaactccgctgggtagagctgactgccatcgtgagtacctggcttgcagtttcttcaaaaaacattgacatcacagaacacatagattttgccacccctatacagcagccagcaatggagcctctttgcaatggcaatctccccacgagtatgcataccctggaccacttgcatggggtttccaaccgagccagcctgcactacacaggggagagtcagttaacagaggtattacaaaatctcggcaaagaccaatatccacaacagtcgcttgaacagattggcacccgaattgccaaagttttggaaaagaaccagacgtcctgggtcctctccagcatggcagccctctactggagggtgaaaggccaaggaaagaaggcaatcgactgcctccgccaggctctgcactatgcgccacaccagatgaaggatgtgcccctgattagcctggccaacatcttgcacaatgccaagctctggaatgacgccgtcatagtagccaccatggcagtagagatcgcaccacactttgctgtgaaccacttcactctgggcaatgtctacgtggcaatggaagaatttgaaaaagcactggtgtggtatgaatccacattgaagcttcagcccgagtttgtcccagccaagaaccgaatccagaccatccagtgtcacttaatgctgaagaagggacggcgctctccttagtgcacttcttccttctctctttctctttactcatgctctaaaaaaaaagaataagaaaagaaaccaatcattgtcagtatctactattaatgatgtgtgtgaaaataactaagacttataacaggacttttacatatgtgggaattggtttgtttttgtttttacgtttctcctttcccccaaccaacctcagaagaggcaccttcagaaacacacatttcttaaaaggaaagtgcagcttcaagatattgtgtaaatactgagccaagacatttctggagctgtgctctgtctccaaaaacctcaatgcctttagggcttttctcagtggtccagctagccttctctttggaggaggatgaagccgcattgcacattctctgcttcctgtcgtagcctctgttgtcaatggaaatgcggaagcccatctggtgcccgtcagtgagaagcaacgttctgcgctctctccgttagacctccatgctgtccccagtcttgtccattccatgctgctgtgttacaaactctcagaggtagtttgcaggggaggaaggggaatatgattttaaaaacaaaatatttacaacaacaaaaattcttaggatcacctgacctttgtaatgttatttatgttggggagggaggggggctgagaaggggaaatcagcagtgtgcaacatctttataatttgtactttaattacaaatcacaaggaaaccaataagttgaaatcctatataacaggtttatatatatagaatatgtatatttgaagccctctacagactgagtctatgttttactaattctttgttcactgtgttacccatcttggaataagttgtgaatgtcagctccctctctctgaggcctccagacttagctcctcaggagggtaatgagccaaggttgagtgtttccatacaatgcttttacctttgatcccaggagaatcagaaactccaacattttggaatcttcaagggcacatactgagaaaaaaaataaaattgtttatgagcaaaaaaaaaa

SEQ ID NO: 424861 - DNA, 2156 bp, Homo sapiens
tttctactaagttggagttgtctttataaaatcaaaatacagaggggcaaaaattaagtttggtaagaatgttaacattgaagaatgccttaaccccttatttcatgttgatcaatcttaaatctagcaaaggactcatttattcttacttctccacctatctttactcagagatgatctttagttccattgcataatgacgagattttaattagatcatagatgggggaaatgttaaagactacaggaatgactagcacctccaaatacaccaatccaggtgaagtaatcaccagggcataaggccctttgggttctcttcctttgcaattgtgtggattcatggcatactttccttccaggaaaaaaacgtgactaccagcgtctgggatggcccagcccggacgaatgcctcaaactccgctgggtagagctgactgccatcgtgagtacctggcttgcagtttcttcaaaaaacattgacatcacagaacacatagattttgccacccctatacagcagccagcaatggagcctctttgcaatggcaatctccccacgagtatgcataccctggaccacttgcatggggtttccaaccgagccagcctgcactacacaggggagagtcagttaacagaggtattacaaaatctcggcaaagaccaatatccacaacagtcgcttgaacagattggcacccgaattgccaaagttttggaaaagaaccagacgtcctgggtcctctccagcatggcagccctctactggagggtgaaaggccaaggaaagaaggcaatcgactgcctccgccaggctctgcactatgcgccacaccagatgaaggatgtgcccctgattagcctggccaacatcttgcacaatgccaagctctggaatgacgccgtcatagtagccaccatggcagtagagatcgcaccacactttgctgtgaaccacttcactctgggcaatgtctacgtggcaatggaagaatttgaaaaagcactggtgtggtatgaatccacattgaagcttcagcccgagtttgtcccagccaagaaccgaatccagaccatccagtgtcacttaatgctgaagaagggacggcgctctccttagtgcacttcttccttctctctttctctttactcatgctctaaaaaaaaagaataagaaaagaaaccaatcattgtcagtatctactattaatgatgtgtgtgaaaataactaagacttataacaggacttttacatatgtgggaattggtttgtttttgtttttacgtttctcctttcccccaaccaacctcagaagaggcaccttcagaaacacacatttcttaaaaggaaagtgcagcttcaagatattgtgtaaatactgagccaagacatttctggagctgtgctctgtctccaaaaacctcaatgcctttagggcttttctcagtggtccagctagccttctctttggaggaggatgaagccgcattgcacattctctgcttcctgtcgtagcctctgttgtcaatggaaatgcggaagcccatctggtgcccgtcagtgagaagcaacgttctgcgctctctccgttagacctccatgctgtccccagtcttgtccattccatgctgctgtgttacaaactctcagaggtagtttgcaggggaggaaggggaatatgattttaaaaacaaaatatttacaacaacaaaaattcttaggatcacctgacctttgtaatgttatttatgttggggagggaggggggctgagaaggggaaatcagcagtgtgcaacatctttataatttgtactttaattacaaatcacaaggaaaccaataagttgaaatcctatataacaggtttatatatatagaatatgtatatttgaagccctctacagactgagtctatgttttactaattctttgttcactgtgttacccatcttggaataagttgtgaatgtcagctccctctctctgaggcctccagacttagctcctcaggagggtaatgagccaaggttgagtgtttccatacaatgcttttacctttgatcccaggagaatcagaaactccaacattttggaatcttcaagggcacatactgagaaaaaaaataaaattgtttatgagcaaaaaaaaaa

SEQ ID NO: 424862 - DNA, 2353 bp, Homo sapiens
aaggaaatgcagattaaaaccacatttctcacccatcagattgtcaggggcctaagagtttagtaacaaactctgtgatggggctataaggaaatggtgatacttagatatttctggcaggagattaaattgttataatccgggtgggcatggtggcttatgcctgtaatcccagcactttgggaggccgaagtgtgcagatcacctgaggtcatgagttcgagaccagcctggccaacatggtgaaactctatctctactaaaaatacaaaaattagacaggcgtggtggtgcactcctctaatcccagctactcgggaggctgagacagaagaatcgcttgaacctgggagatgaaggttgcagtgagctgagatcattccactgcactccagcctgggcgacagcgagactctgtctcaaaaaaaaaaggacaaaggaaaggaggggggaggggggaggtgaggggaggaaattctagaaggaaacgtaaaaaattaaaaataatgtttacttgtctaccatagagacgaggatgggagagagacttcatggtataactttgtatacttcctggtttttgaaacgtgtgactgtgttacctattcagaaagttaaataaaatagaacatagatatgagatatagttctgctattcagtagttgagtgaacttgggcaagacacttaagctctctgagtcatagttttctcatttatagaagggctgtaatagtagtatcaagctcacaggattgttctaaggattaatgaaggacaggtggaacagaaagtgctgagcagagtgccagcacttagtaaatactcagttgaatggtcatgacttgtgttactgaacttaatcttggtaataaatgagtatgttcttgaaaggacaccagccttggctaacattcctttgcagaaccagacgtcctgggtcctctccagcatggcagccctctactggagggtgaaaggccaaggaaagaaggcaatcgactgcctccgccaggctctgcactatgcgccacaccagatgaaggatgtgcccctgattagcctggccaacatcttgcacaatgccaagctctggaatgacgccgtcatagtagccaccatggcagtagagatcgcaccacactttgctgtgaaccacttcactctgggcaatgtctacgtggcaatggaagaatttgaaaaagcactggtgtggtatgaatccacattgaagcttcagcccgagtttgtcccagccaagaaccgaatccagaccatccagtgtcacttaatgctgaagaagggacggcgctctccttagtgcacttcttccttctctctttctctttactcatgctctaaaaaaaaagaataagaaaagaaaccaatcattgtcagtatctactattaatgatgtgtgtgaaaataactaagacttataacaggacttttacatatgtgggaattggtttgtttttgtttttacgtttctcctttcccccaaccaacctcagaagaggcaccttcagaaacacacatttcttaaaaggaaagtgcagcttcaagatattgtgtaaatactgagccaagacatttctggagctgtgctctgtctccaaaaacctcaatgcctttagggcttttctcagtggtccagctagccttctctttggaggaggatgaagccgcattgcacattctctgcttcctgtcgtagcctctgttgtcaatggaaatgcggaagcccatctggtgcccgtcagtgagaagcaacgttctgcgctctctccgttagacctccatgctgtccccagtcttgtccattccatgctgctgtgttacaaactctcagaggtagtttgcaggggaggaaggggaatatgattttaaaaacaaaatatttacaacaacaaaaattcttaggatcacctgacctttgtaatgttatttatgttggggagggaggggggctgagaaggggaaatcagcagtgtgcaacatctttataatttgtactttaattacaaatcacaaggaaaccaataagttgaaatcctatataacaggtttatatatatagaatatgtatatttgaagccctctacagactgagtctatgttttactaattctttgttcactgtgttacccatcttggaataagttgtgaatgtcagctccctctctctgaggcctccagacttagctcctcaggagggtaatgagccaaggttgagtgtttccatacaatgcttttacctttgatcccaggagaatcagaaactccaacattttggaatcttcaagggcacatactgagaaaaaaaataaaattgtttatgagcaaaaaaaaaa

SEQ ID NO: 424863 - DNA, 4562 bp, Homo sapiens
agcggcccggccgggggggcaagatggcggcggcagtaggggttcgtggccggtacgagctgccgccttgctccggcccaggctggctcctcagcctttccgccttgctgagtgtggcggcacgaggggccttcgccaccacgcactgggtcgtcacggaggacgggaaaatccagcagcaggtggattcaccaatgaacttgaagcatcctcatgacctagtcatattaatgagacaagaagcaacagttaactacctcaaagaattagagaaacaattagttgctcaaaaaattcacatagaagagaatgaggacagagacacaggactggaacagagacataataaagaagacccagactgcatcaaagccaaggtgcccttaggggacctggatctatatgatggcacatacataactttggagagcaaagacatcagtcctgaagattatatagacacagaatctcctgtccctccagacccagagcaacctgattgtactaaaattctagaacttccatatagtatacatgcttttcagcacttgagaggtgtacaggagagagttaatctttctgcacctctgctacctaaagaagacccaatcttcacatatttatctaaacggttaggaaggagtatagatgacataggtcacctcattcatgaaggcctacagaagaacacttcctcgtgggtactgtataacatggcttcattttactggagaattaagaatgagccatatcaggtagtagaatgtgccatgcgagcacttcacttctcttccaggcacaataaagacattgccctggtcaacctggcaaacgttctacacagagcacacttctctgctgatgctgctgtcgtggtccatgcagctctggatgacagtgacttcttcaccagctattacactttggggaatatatatgcaatgcttggggaatataaccactcagtgctctgttatgaccacgctttgcaggccagacctgggtttgagcaagctataaagaggaagcatgctgtcctatgtcagcaaaaactggagcagaaattggaggctcagcatagatctctccagcgaacactgaatgagttaaaagagtatcaaaagcagcatgaccactacctgagacagcaggaaatcctagaaaaacataaactgattcaggaggagcaaatcttaagaaatatcattcatgagactcagatggcaaaagaggcacaattaggaaatcatcagatatgccgactggtcaaccagcagcatagtttacattgccagtgggaccagcctgtacgctatcatcgtggagatatctttgaaaatgtggactatgttcagtttggtgaggattcatcaacctccagtatgatgtctgtgaactttgatgttcaatcaaatcagagtgatatcaatgattcggtcaagtcttctcccgtagcccattctattctctggatttggggcagggactctgatgcatatagggacaaacagcatattctatggcctaaaagagcagattgtacagaaagctaccctagagtccctgttggtggggaattgccaacgtattttctgcctccggaaaacaaaggactcaggatccacgaactcagcagtgatgattattctacagaagaagaggcccaaacccctgactgttccataactgacttcagaaaaagccacactctgtcctacttagtcaaagaattagaggttcgcatggatctgaaagccaaaatgccagatgaccatgcacgaaaaattttgctttcccgtattaataactatactatcccagaagaagaaattgggtctttcttatttcatgctattaataagccaaatgctcctatctggctcatactcaatgaagctggactatactggagagcagtaggaaatagcacttttgctattgcctgtcttcagagggctttgaatttagctccacttcaataccaagatgttcctcttgtcaacttggccaaccttttgattcattacggccttcatcttgatgccactaagctgctacttcaagctttggccatcaatagctctgagcctctgacctttttgagcctgggaaatgcttaccttgctctgaagaatatcagtggggcacttgaggcctttagacaggccttgaaattaaccaccaaatgtccagagtgtgaaaacagcctgaagttgatccgctgtatgcagttttatccttttctgtacaacatcacttcttctgtttgcagtggtaattgtcatgagaaaaccctggacaacagccatgacaaacagaaatattttgacaactcacagtcactggatgctgctgaagaagagccctctgagagaggaacagaggaggaccctgtattctctgttgagaattcagggagggactcagatgcccttagacttgaaagtacggtggttgaggagagcaatggttctgatgagatggagaattcagatgaaaccaaaatgtcagaagaaatactggctttggtggatgaatttcaacaggcatggcctttggaaggctttgggggtgcactagagatgaaagggcggcgtctagacttacaaggaatacgggtgctgaagaaaggtccccaggatggagtggccagaagctcttgctatggagactgcagaagtgaagatgatgaagcaacagaatggattacattccaggtcaaacgtgtaaagaaacccaaaggagatcataagaaaactcctgggaaaaaagtagaaacaggtcagatagaaaatggacatcgttaccaagcaaacctagagatcactggccccaaggtggcatctcctgggccacaagggctactagactggaagaccaggaaagtgccatagacataatgtaactggatttcagcaaggcatttaacagagcctcttatgatatccttgtgaaccagatggagagatgtgggcttgaagccttcccattgcctacaggataaaattcaaacttcctagtgtggtgtacaagaccctttacagcccgcctctgtgtacccttcaacaccattctctgaaccaaccatgctcatgtttttacctcagtgcctttgcacatgctattccctctgcctggaatgccctgtgccccctctgccctctgccgtgctaaaatatcactcatccttaaacttcaaaatcaagtgccatctcttccttgttaccttcaggcagaattagttactctttcctctgtgcaattgttctatatcttcgctctagctcttttcctgttgtattgtaatgatttgtttatgtttaccttccttactagactgtgagctcaagagcaggccgtcttaattattcctttctgtacccctagtgtcttttatggttctcagccccttataacaggtgctcaataaatatttttcaaatgaaattattaaatgtaaaagaaaattaagattttttgtgaaaattatggcttatttaagttattaatttaaacagagttaatttgaaactcttccaaaactgttcctttctgttttgttaaaatctcaatctaaacccctgcctgtacctcaaacagttttctactgttcgtaaattcctataatataaaaagcgctatacagaactaaagttctccttcctgcctattccattataactccttcagaaaacccttcccagacaagacagttctgctcttttcttggggatttgatgtaagtaaagggcccacacccaaaaggtggtacttacgaaggatattaataaacagagctttaaatttttttgtagctttaaatagcttgttgattgggaacatacacgttagagtcaaacagactcctagctctgccagttgctagccaggtgacctggacaagtcacttagtctctctgagtctctgttttctcatctgagaaatgagggttaaaacctacttcaggccagatgcagtggctcacatctgtaatcccagcactttgggaggccagggtgggaggatcacttgagtccaggaggttaaggctccagaaagctagtatcatgccacggcactctagcctgggcaagaaagcaaggtgctgtctctaacttaaaaaaagaaaaatggaaaaaacttaaccacatgaggttaaaaaaagaaaaatggaaaaaacttaaccacatgaggttaaggatgtaaagcacttagcatgggatctgaatacacaggaagtgctcttcaaatagttgataaccaggctggttcttggactgtggtggtgtggtgggggctgggaggagatgataatctttcattaacatcattactccctgctgctcttctttatagtagtggttctctctactgggtgtggacatttggcaatatctggagacatttttgttgttatatctggggaacagtgctaccaccatccagtgggtgaaggccaaagatgatgctaaacaccctccaatgcacaggacaggtccctcaaaaaattatccagcccaaaatgccaataataccaggttgagaaaccctgctttagaga

SEQ ID NO: 424864 - DNA, 2224 bp, Homo sapiens
gagttttaaacacagctctacctcttactagctttgtgaatttgggcaccttattgaacttcaatgagctcatctagagtcatgcattctatggctgtcacaaagatgggtcctttctgtttcttctgtgtctgctacagaacccaatatggcatgatacaggtaacagttgctcaagttagacatttaaagggaatgatatttgtgatgatagcaatcttgctacttgttccatccatcattttgtactctatactgttaggcaatagggaagggctgaggctctacctctgggagtcagcaaacttcccgaaaagggcaagagaataaaacacttggactctggaggccagacagcctctggtgcacctacttaattctagcattgtagtatgaaaacagccacagaaatacgtagaggactgggaatgattgtgtcctaataaaacttttttcaaaataggcaggagactaggtttggcctatgggccaaagtttgccaacccgtaatgatataatggttcttgcagaaattattttggctttctgacagcatgactctaagtgtggtctgtggacagtacacagactttttattagcagtctgcaatgagacaaggagcttcaccagaagaaaccaactacattattcagcagattgtttacttcagctgacattttgttgtgtttgttttcgaagcaagacttcgccaatgaaagaagtaattgatttatattctggtacaagcaccttatctatcacagaccagtagcaaacagcacaaaagcactttgagtggcactgttctaatcattcaccaggaaacacagactgtattctttatgatcaccaaaaacaagaatgaaagctcaaaacccaattttcccttctcaccattctccttcttctcccaggatgtgcccctgattagcctggccaacatcttgcacaatgccaagctctggaatgacgccgtcatagtagccaccatggcagtagagatcgcaccacactttgctgtgaaccacttcactctgggcaatgtctacgtggcaatggaagaatttgaaaaagcactggtgtggtatgaatccacattgaagcttcagcccgagtttgtcccagccaagaaccgaatccagaccatccagtgtcacttaatgctgaagaagggacggcgctctccttagtgcacttcttccttctctctttctctttactcatgctctaaaaaaaaagaataagaaaagaaaccaatcattgtcagtatctactattaatgatgtgtgtgaaaataactaagacttataacaggacttttacatatgtgggaattggtttgtttttgtttttacgtttctcctttcccccaaccaacctcagaagaggcaccttcagaaacacacatttcttaaaaggaaagtgcagcttcaagatattgtgtaaatactgagccaagacatttctggagctgtgctctgtctccaaaaacctcaatgcctttagggcttttctcagtggtccagctagccttctctttggaggaggatgaagccgcattgcacattctctgcttcctgtcgtagcctctgttgtcaatggaaatgcggaagcccatctggtgcccgtcagtgagaagcaacgttctgcgctctctccgttagacctccatgctgtccccagtcttgtccattccatgctgctgtgttacaaactctcagaggtagtttgcaggggaggaaggggaatatgattttaaaaacaaaatatttacaacaacaaaaattcttaggatcacctgacctttgtaatgttatttatgttggggagggaggggggctgagaaggggaaatcagcagtgtgcaacatctttataatttgtactttaattacaaatcacaaggaaaccaataagttgaaatcctatataacaggtttatatatatagaatatgtatatttgaagccctctacagactgagtctatgttttactaattctttgttcactgtgttacccatcttggaataagttgtgaatgtcagctccctctctctgaggcctccagacttagctcctcaggagggtaatgagccaaggttgagtgtttccatacaatgcttttacctttgatcccaggagaatcagaaactccaacattttggaatcttcaagggcacatactgagaaaaaaaataaaattgtttatgagcaaaaaaaaaa

SEQ ID NO: 424865 - DNA, 4512 bp, Homo sapiens
agcggcccggccgggggggcaagatggcggcggcagtaggggttcgtggccggtacgagctgccgccttgctccggcccaggctggctcctcagcctttccgccttgctgagtgtggcggcacgaggggccttcgccaccacgcactgggtcgtcacggaggacgggaaaatccagcagcaggtggattcaccaatgaacttgaagcatcctcatgacctagtcatattaatgagacaagaagcaacagttaactacctcaaagaattagagaaacaattagttgctcaaaaaattcacatagaagagaatgaggacagagacacaggactggaacagagacataataaagaagacccagactgcatcaaagccaaggtgcccttaggggacctggatctatatgatggcacatacataactttggagagcaaagacatcagtcctgaagattatatagacacagaatctcctgtccctccagacccagagcaacctgattgtactaaaattctagaacttccatatagtatacatgcttttcagcacttgagaggtgtacaggagagagttaatctttctgcacctctgctacctaaagaagacccaatcttcacatatttatctaaacggttaggaaggagtatagatgacataggtcacctcattcatgaaggcctacagaagaacacttcctcgtgggtactgtataacatggcttcattttactggagaattaagaatgagccatatcaggtagtagaatgtgccatgcgagcacttcacttctcttccaggcacaataaagacattgccctggtcaacctggcaaacgttctacacagagcacacttctctgctgatgctgctgtcgtggtccatgcagctctggatgacagtgacttcttcaccagctattacactttggggaatatatatgcaatgcttggggaatataaccactcagtgctctgttatgaccacgctttgcaggccagacctgggtttgagcaagctataaagaggaagcatgctgtcctatgtcagcaaaaactggagcagaaattggaggctcagcatagatctctccagcgaacactgaatgagttaaaagagtatcaaaagcagcatgaccactacctgagacagcaggaaatcctagaaaaacataaactgattcaggaggagcaaatcttaagaaatatcattcatgagactcagatggcaaaagaggcacaattaggaaatcatcagatatgccgactggtcaaccagcagcatagtttacattgccagtgggaccagcctgtacgctatcatcgtggagatatctttgaaaatgtggactatgttcagtttggtgaggattcatcaacctccagtatgatgtctgtgaactttgatgttcaatcaaatcagagtgatatcaatgattcggtcaagtcttctcccgtagcccattctattctctggatttggggcagggactctgatgcatatagggacaaacagcatattctatggcctaaaagagcagattgtacagaaagctaccctagagtccctgttggtggggaattgccaacgtattttctgcctccggaaaacaaaggactcaggatccacgaactcagcagtgatgattattctacagaagaagaggcccaaacccctgactgttccataactgacttcagaaaaagccacactctgtcctacttagtcaaagaattagaggttcgcatggatctgaaagccaaaatgccagatgaccatgcacgaaaaattttgctttcccgtattaataactatactatcccagaagaagaaattgggtctttcttatttcatgctattaataagccaaatgctcctatctggctcatactcaatgaagctggactatactggagagcagtaggaaatagcacttttgctattgcctgtcttcagagggctttgaatttagctccacttcaataccaagatgttcctcttgtcaacttggccaaccttttgattcattacggccttcatcttgatgccactaagctgctacttcaagctttggccatcaatagctctgagcctctgacctttttgagcctgggaaatgcttaccttgctctgaagaatatcagtggggcacttgaggcctttagacaggccttgaaattaaccaccaaatgtccagagtgtgaaaacagcctgaagttgatccgctgtatgcagttttatccttttctgtacaacatcacttcttctgtttgcagtggtaattgtcatgagaaaaccctggacaacagccatgacaaacagaaatattttgacaactcacagtcactggatgctgctgaagaagagccctctgagagaggaacagaggaggaccctgtattctctgttgagaattcagggagggactcagatgcccttagacttgaaagtacggtggttgaggagagcaatggttctgatgagatggagaattcagatgaaaccaaaatgtcagaagaaatactggctttggtggatgaatttcaacaggcatggcctttggaaggctttgggggtgcactagagatgaaagggcggcgtctagacttacaaggaatacgggtgctgaagaaaggtccccaggatggagtggccagaagctcttgctatggagactgcagaagtgaagatgatgaagcaacagaatggattacattccaggtcaaacgtgtaaagaaacccaaaggagatcataagaaaactcctgggaaaaaagtagaaacaggtcagatagaaaatggacatcgttaccaggctactagactggaagaccaggaaagtgccatagacataatgtaactggatttcagcaaggcatttaacagagcctcttatgatatccttgtgaaccagatggagagatgtgggcttgaagccttcccattgcctacaggataaaattcaaacttcctagtgtggtgtacaagaccctttacagcccgcctctgtgtacccttcaacaccattctctgaaccaaccatgctcatgtttttacctcagtgcctttgcacatgctattccctctgcctggaatgccctgtgccccctctgccctctgccgtgctaaaatatcactcatccttaaacttcaaaatcaagtgccatctcttccttgttaccttcaggcagaattagttactctttcctctgtgcaattgttctatatcttcgctctagctcttttcctgttgtattgtaatgatttgtttatgtttaccttccttactagactgtgagctcaagagcaggccgtcttaattattcctttctgtacccctagtgtcttttatggttctcagccccttataacaggtgctcaataaatatttttcaaatgaaattattaaatgtaaaagaaaattaagattttttgtgaaaattatggcttatttaagttattaatttaaacagagttaatttgaaactcttccaaaactgttcctttctgttttgttaaaatctcaatctaaacccctgcctgtacctcaaacagttttctactgttcgtaaattcctataatataaaaagcgctatacagaactaaagttctccttcctgcctattccattataactccttcagaaaacccttcccagacaagacagttctgctcttttcttggggatttgatgtaagtaaagggcccacacccaaaaggtggtacttacgaaggatattaataaacagagctttaaatttttttgtagctttaaatagcttgttgattgggaacatacacgttagagtcaaacagactcctagctctgccagttgctagccaggtgacctggacaagtcacttagtctctctgagtctctgttttctcatctgagaaatgagggttaaaacctacttcaggccagatgcagtggctcacatctgtaatcccagcactttgggaggccagggtgggaggatcacttgagtccaggaggttaaggctccagaaagctagtatcatgccacggcactctagcctgggcaagaaagcaaggtgctgtctctaacttaaaaaaagaaaaatggaaaaaacttaaccacatgaggttaaaaaaagaaaaatggaaaaaacttaaccacatgaggttaaggatgtaaagcacttagcatgggatctgaatacacaggaagtgctcttcaaatagttgataaccaggctggttcttggactgtggtggtgtggtgggggctgggaggagatgataatctttcattaacatcattactccctgctgctcttctttatagtagtggttctctctactgggtgtggacatttggcaatatctggagacatttttgttgttatatctggggaacagtgctaccaccatccagtgggtgaaggccaaagatgatgctaaacaccctccaatgcacaggacaggtccctcaaaaaattatccagcccaaaatgccaataataccaggttgagaaaccctgctttagaga

SEQ ID NO: 424866 - DNA, 3321 bp, Homo sapiens
agcggcccggccgggggggcaagatggcggcggcagtaggggttcgtggccggtacgagctgccgccttgctccggcccaggctggctcctcagcctttccgccttgctgagtgtggcggcacgaggggccttcgccaccacgcactgggtcgtcacggaggacgggaaaatccagcagcaggtggattcaccaatgaacttgaagcatcctcatgacctagtcatattaatgagacaagaagcaacagttaactacctcaaagaattagagaaacaattagttgctcaaaaaattcacatagaagagaatgaggacagagacacaggactggaacagagacataataaagaagacccagactgcatcaaagccaaggtgcccttaggggacctggatctatatgatggcacatacataactttggagagcaaagacatcagtcctgaagattatatagacacagaatctcctgtccctccagacccagagcaacctgattgtactaaaattctagaacttccatatagtatacatgcttttcagcacttgagaggtgtacaggagagagttaatctttctgcacctctgctacctaaagaagacccaatcttcacatatttatctaaacggttaggaaggagtatagatgacataggtcacctcattcatgaaggcctacagaagaacacttcctcgtgggtactgtataacatggcttcattttactggagaattaagaatgagccatatcaggtagtagaatgtgccatgcgagcacttcacttctcttccaggcacaataaagacattgccctggtcaacctggcaaacgttctacacagagcacacttctctgctgatgctgctgtcgtggtccatgcagctctggatgacagtgacttcttcaccagctattacactttggggaatatatatgcaatgcttggggaatataaccactcagtgctctgttatgaccacgctttgcaggccagacctgggtttgagcaagctataaagaggaagcatgctgtcctatgtcagcaaaaactggagcagaaattggaggctcagcatagatctctccagcgaacactgaatgagttaaaagagtatcaaaagcagcatgaccactacctgagacagcaggaaatcctagaaaaacataaactgattcaggaggagcaaatcttaagaaatatcattcatgagactcagatggcaaaagaggcacaattaggaaatcatcagatatgccgactggtcaaccagcagcatagtttacattgccagtgggaccagcctgtacgctatcatcgtggagatatctttgaaaatgtggactatgttcagtttggtgaggattcatcaacctccagtatgatgtctgtgaactttgatgttcaatcaaatcagagtgatatcaatgattcggtcaagtcttctcccgtagcccattctattctctggatttggggcagggactctgatgcatatagggacaaacagcatattctatggcctaaaagagcagattgtacagaaagctaccctagagtccctgttggtggggaattgccaacgtattttctgcctccggaaaacaaaggactcaggatccacgaactcagcagtgatgattattctacagaagaagaggcccaaacccctgactgttccataactgacttcagaaaaagccacactctgtcctacttagtcaaagaattagaggttcgcatggatctgaaagccaaaatgccagatgaccatgcacgaaaaattttgctttcccgtattaataactatactatcccagaagaagaaattgggtctttcttatttcatgctattaataagccaaatgctcctatctggctcatactcaatgaagctggactatactggagagcagtaggaaatagcacttttgctattgcctgtcttcagagggctttgaatttagctccacttcaataccaagatgttcctcttgtcaacttggccaaccttttgattcattacggccttcatcttgatgccactaagctgctacttcaagctttggccatcaatagctctgagcctctgacctttttgagcctgggaaatgcttaccttgctctgaagaatatcagtggggcacttgaggcctttagacaggccttgaaattaaccaccaaatgtccagagtgtgaaaacagcctgaagttgatccgctgtatgcagttttatccttttctgtacaacatcacttcttctgtttgcagtggtaattgtcatgagaaaaccctggacaacagccatgacaaacagaaatattttgacaactcacagtcactggatgctgctgaagaagagccctctgagagaggaacagaggaggaccctgtattctctgttgagaattcagggagggactcagatgcccttagacttgaaagtacggtggttgaggagagcaatggttctgatgagatggagaattcagatgaaaccaaaatgtcagaagaaatactggctttggtggatgaatttcaacaggcatggcctttggaaggctttgggggtgcactagagatgaaagggcggcgtctagacttacaaggaatacgggtgctgaagaaaggtccccaggatggagtggccagaagctcttgctatggagactgcagaagtgaagatgatgaagcaacagaatggattacattccaggtcaaacgtgtaaagaaacccaaaggagatcataagaaaactcctgggaaaaaagtagaaacaggtcagatagaaaatggacatcgttaccaagcaaacctagagatcactggccccaaggtggcatctcctgggccacaagggctactagactggaagaccaggaaagtgccatagacataatgtaactggatttcagcaaggcatttaacagagcctcttatgatatccttgtgaaccagatggagagatgtgggcttgaagccttcccattgcctacaggataaaattcaaacttcctagtgtggtgtacaagaccctttacagcccgcctctgtgtacccttcaacaccattctctgaaccaaccatgctcatgtttttacctcagtgcctttgcacatgctattccctctgcctggaatgccctgtgccccctctgccctctgccgtgctaaaatatcactcatccttaaacttcaaaatcaagtgccatctcttccttgttaccttcagccgtcttaattattcctttctgtacccctagtgtcttttatggttctcagccccttataacaggtgctcaataaatatttttcaaatga

SEQ ID NO: 424867 - DNA, 4926 bp, Homo sapiens
  misc_feature (4902)..(4902): n is a, c, g, or t
agcggcccggccgggggggcaagatggcggcggcagtaggggttcgtggccggtacgagctgccgccttgctccggcccaggctggctcctcagcctttccgccttgctgagtgtggcggcacgaggggccttcgccaccacgcactgggtcgtcacggaggacgggaaaatccagcagcaggtggattcaccaatgaacttgaagcatcctcatgacctagtcatattaatgagacaagaagcaacagttaactacctcaaagaattagagaaacaattagttgctcaaaaaattcacatagaagagaatgaggacagagacacaggactggaacagagacataataaagaagacccagactgcatcaaagccaaggtgcccttaggggacctggatctatatgatggcacatacataactttggagagcaaagacatcagtcctgaagattatatagacacagaatctcctgtccctccagacccagagcaacctgattgtactaaaattctagaacttccatatagtatacatgcttttcagcacttgagaggtgtacaggagagagttaatctttctgcacctctgctacctaaagaagacccaatcttcacatatttatctaaacggttaggaaggagtatagatgacataggtcacctcattcatgaaggcctacagaagaacacttcctcgtgggtactgtataacatggcttcattttactggagaattaagaatgagccatatcaggtagtagaatgtgccatgcgagcacttcacttctcttccaggcacaataaagacattgccctggtcaacctggcaaacgttctacacagagcacacttctctgctgatgctgctgtcgtggtccatgcagctctggatgacagtgacttcttcaccagctattacactttggggaatatatatgcaatgcttggggaatataaccactcagtgctctgttatgaccacgctttgcaggccagacctgggtttgagcaagctataaagaggaagcatgctgtcctatgtcagcaaaaactggagcagaaattggaggctcagcatagatctctccagcgaacactgaatgagttaaaagagtatcaaaagcagcatgaccactacctgagacagcaggaaatcctagaaaaacataaactgattcaggaggagcaaatcttaagaaatatcattcatgagactcagatggcaaaagaggcacaattaggaaatcatcagatatgccgactggtcaaccagcagcatagtttacattgccagtgggaccagcctgtacgctatcatcgtggagatatctttgaaaatgtggactatgttcagtttggtgaggattcatcaacctccagtatgatgtctgtgaactttgatgttcaatcaaatcagagtgatatcaatgattcggtcaagtcttctcccgtagcccattctattctctggatttggggcagggactctgatgcatatagggacaaacagcatattctatggcctaaaagagcagattgtacagaaagctaccctagagtccctgttggtggggaattgccaacgtattttctgcctccggaaaacaaaggactcaggatccacgaactcagcagtgatgattattctacagaagaagaggcccaaacccctgactgttccataactgacttcagaaaaagccacactctgtcctacttagtcaaagaattagaggttcgcatggatctgaaagccaaaatgccagatgaccatgcacgaaaaattttgctttcccgtattaataactatactatcccagaagaagaaattgggtctttcttatttcatgctattaataagccaaatgctcctatctggctcatactcaatgaagctggactatactggagagcagtaggaaatagcacttttgctattgcctgtcttcagagggctttgaatttagctccacttcaataccaagatgttcctcttgtcaacttggccaaccttttgattcattacggccttcatcttgatgccactaagctgctacttcaagctttggccatcaatagctctgagcctctgacctttttgagcctgggaaatgcttaccttgctctgaagaatatcagtggggcacttgaggcctttagacaggccttgaaattaaccaccaaatgtccagagtgtgaaaacagcctgaagttgatccgctgtatgcagttttatccttttctgtacaacatcacttcttctgtttgcagtggtaattgtcatgagaaaaccctggacaacagccatgacaaacagaaatattttgacaactcacagtcactggatgctgctgaagaagagccctctgagagaggaacagaggaggaccctgtattctctgttgagaattcagggagggactcagatgcccttagacttgaaagtacggtggttgaggagagcaatggttctgatgagatggagaattcagatgaaaccaaaatgtcagaagaaatactggctttggtggatgaatttcaacaggcatggcctttggaaggctttgggggtgcactagagatgaaagggcggcgtctagacttacaaggaatacgggtgctgaagaaaggtccccaggatggagtggccagaagctcttgctatggagactgcagaagtgaagatgatgaagcaacagaatggattacattccaggtcaaacgtgtaaagaaacccaaaggagatcataagaaaactcctgggaaaaaagtagaaacaggtcagatagaaaatggacatcgttaccaagcaaacctagagatcactggccccaaggtggcatctcctgggccacaaggaaaaaaacgtgactaccagcgtctgggatggcccagcccggacgaatgcctcaaactccgctgggtagagctgactgccatcgtgagtacctggcttgcagtttcttcaaaaaacattgacatcacagaacacatagattttgccacccctatacagcagccagcaatggagcctctttgcaatggcaatctccccacgagtatgcataccctggaccacttgcatggggtttccaaccgagccagcctgcactacacaggggagagtcagttaacagaggtattacaaaatctcggcaaagaccaatatccacaacagtcgcttgaacagattggcacccgaattgccaaagttttggaaaagaaccagacgtcctgggtcctctccagcatggcagccctctactggagggtgaaaggccaaggaaagaaggcaatcgactgcctccgccaggctctgcactatgcgccacaccagatgaaggtgagtgggactcagaaggtgggaacttctgcccctttgtcctttccattccccatggtttattctgccctttgaaccagcctccctcatgctcagccagtgaggacatattccaaggagagaatggggcaggagaccttctgactgggcttgtgccccagcaagcctatgaactatccctgctgccttcccagcttcagcaggttggaacgtggggaaggccttccagatcactgtaagacagtactgcatttagtcccctttctgctgtgttcagagccacccaacatacagcaaatgcactggcctaagtgggctgacacatagaagtcaatctgaatttagcttgtcatcaggggcctggtgacctcttagacttgttttgcttatcctcttggcttgagcttgcttccaagcacagagatagaagcaaatttccatttattcatgtacattggccagttcctggtccttgtctgacttctactttttccacaaaaaaaaaaaaaaaaaaaaaaaaaaaccgggttacccctgtgtgcccccaggattttcccaaaaaaccgggttttggtaatgaggggggaaaaaattacaggggtttcattcaggcaactttgggtgtttccatggtggtcccgaggttcctgggttaaatcccagagattactatatggctctttaaaaaaagccatggggcggggagtctaacttgggtgccgcacaagggcaaatgcgtctggagaactggattgggacagggaaccaccgaggggattcttatgtggggtcagaggccatgtgcgcagtgaaagtcttttatacaaacccacgaggcctctatacctctctttatacatagcctctggggggaaattgtggggggccaccccttttattggggaccttccgaagggggagcctcccattctatagggagttcagtgccaatctcctataggggggggtggttcccaaagacagagatgtggcggtcccccatcatccgggggtggaatcatccatcgcgggggggtctccggggcacccaaacaggaaaaaccccacaaatatagtggcggccgtgtgatataacacgggggggtgcaaacccagagtctggcgccccccaaatgcttttcgagagaacccactttttaggaggggcggcaacagtgaacaacaattcacgaaggagcaaagagaaatagaaccaactctcgtgaggcaccatacacttgtggttccacaactcccgaaatcaaaattggtggggaacaccacaaaaaaaccgtgcgtgaacaggagcacaaatcggggaggaacaggggcccctagcgaggggccccctacaccatctgtgggaggacgactccaggcagaaaaagttttccgcagggaaaaagggagggcaccaggaaaacattaacaacccccgtctgggtgaccctcgagggagaggcagcacacgaaaaaagcagctcgctgggtggtgccacccatcacatataataatgttcgtaggcgcaactgtgaggacagctttatgtagaaaaancgaggcgccacagaacaaatagcc

SEQ ID NO: 424868 - DNA, 3395 bp, Homo sapiens
agcggcccggccgggggggcaagatggcggcggcagtaggggttcgtggccggtacgagctgccgccttgctccggcccaggctggctcctcagcctttccgccttgctgagtgtggcggcacgaggggccttcgccaccacgcactgggtcgtcacggaggacgggaaaatccagcagcaggtggattcaccaatgaacttgaagcatcctcatgacctagtcatattaatgagacaagaagcaacagttaactacctcaaagaattagagaaacaattagttgctcaaaaaattcacatagaagagaatgaggacagagacacaggactggaacagagacataataaagaagacccagactgcatcaaagccaaggtgcccttaggggacctggatctatatgatggcacatacataactttggagagcaaagacatcagtcctgaagattatatagacacagaatctcctgtccctccagacccagagcaacctgattgtactaaaattctagaacttccatatagtatacatgcttttcagcacttgagaggtgtacaggagagagttaatctttctgcacctctgctacctaaagaagacccaatcttcacatatttatctaaacggttaggaaggagtatagatgacataggtcacctcattcatgaaggcctacagaagaacacttcctcgtgggtactgtataacatggcttcattttactggagaattaagaatgagccatatcaggtagtagaatgtgccatgcgagcacttcacttctcttccaggcacaataaagacattgccctggtcaacctggcaaacgttctacacagagcacacttctctgctgatgctgctgtcgtggtccatgcagctctggatgacagtgacttcttcaccagctattacactttggggaatatatatgcaatgcttggggaatataaccactcagtgctctgttatgaccacgctttgcaggccagacctgggtttgagcaagctataaagaggaagcatgctgtcctatgtcagcaaaaactggagcagaaattggaggctcagcatagatctctccagcgaacactgaatgagttaaaagagtatcaaaagcagcatgaccactacctgagacagcaggaaatcctagaaaaacataaactgattcaggaggagcaaatcttaagaaatatcattcatgagactcagatggcaaaagaggcacaattaggaaatcatcagatatgccgactggtcaaccagcagcatagtttacattgccagtgggaccagcctgtacgctatcatcgtggagatatctttgaaaatgtggactatgttcagtttggtgaggattcatcaacctccagtatgatgtctgtgaactttgatgttcaatcaaatcagagtgatatcaatgattcggtcaagtcttctcccgtagcccattctattctctggatttggggcagggactctgatgcatatagggacaaacagcatattctatggcctaaaagagcagattgtacagaaagctaccctagagtccctgttggtggggaattgccaacgtattttctgcctccggaaaacaaaggactcaggatccacgaactcagcagtgatgattattctacagaagaagaggcccaaacccctgactgttccataactgacttcagaaaaagccacactctgtcctacttagtcaaagaattagaggttcgcatggatctgaaagccaaaatgccagatgaccatgcacgaaaaattttgctttcccgtattaataactatactatcccagaagaagaaattgggtctttcttatttcatgctattaataagccaaatgctcctatctggctcatactcaatgaagctggactatactggagagcagtaggaaatagcacttttgctattgcctgtcttcagagggctttgaatttagctccacttcaataccaagatgttcctcttgtcaacttggccaaccttttgattcattacggccttcatcttgatgccactaagctgctacttcaagctttggccatcaatagctctgagcctctgacctttttgagcctgggaaatgcttaccttgctctgaagaatatcagtggggcacttgaggcctttagacaggccttgaaattaaccaccaaatgtccagagtgtgaaaacagcctgaagttgatccgctgtatgcagttttatccttttctgtacaacatcacttcttctgtttgcagtggtaattgtcatgagaaaaccctggacaacagccatgacaaacagaaatattttgacaactcacagtcactggatgctgctgaagaagagccctctgagagaggaacagaggaggaccctgtattctctgttgagaattcagggagggactcagatgcccttagacttgaaagtacggtggttgaggagagcaatggttctgatgagatggagaattcagatgaaaccaaaatgtcagaagaaatactggctttggtggatgaatttcaacaggcatggcctttggaaggctttgggggtgcactagagatgaaagggcggcgtctagacttacaaggaatacgggtgctgaagaaaggtccccaggatggagtggccagaagctcttgctatggagactgcagaagtgaagatgatgaagcaacagaatggattacattccaggtcaaacgtgtaaagaaacccaaaggagatcataagaaaactcctgggaaaaaagtagaaacaggtcagatagaaaatggacatcgttaccaggctactagactggaagaccaggaaagtgccatagacataatgtaactggatttcagcaaggcatttaacagagcctcttatgatatccttgtgaaccagatggagagatgtgggcttgaagccttcccattgcctacaggataaaattcaaacttcctagtgtggtgtacaagaccctttacagcccgcctctgtgtacccttcaacaccattctctgaaccaaccatgctcatgtttttacctcagtgcctttgcacatgctattccctctgcctggaatgccctgtgccccctctgccctctgccgtgctaaaatatcactcatccttaaacttcaaaatcaagtgccatctcttccttgttaccttcaggcagaattagttactctttcctctgtgcaattgttctatatcttcgctctagctcttttcctgttgtattgtaatgatttgtttatgtttaccttccttactagactgtgagctcaagagcaggccgtcttaattattcctttctgtacccctagtgtcttttatggttctcagccccttataacaggtgctcaataaatatttttcaaatga

SEQ ID NO: 424869 - DNA, 2993 bp, Homo sapiens
  misc_feature (2973)..(2973): n is a, c, g, or t
agcggcccggccgggggggcaagatggcggcggcagtaggggttcgtggccggtacgagctgccgccttgctccggcccaggctggctcctcagcctttccgccttgctgagtgtggcggcacgaggggccttcgccaccacgcactgggtcgtcacggaggacgggaaaatccagcagcaggtggattcaccaatgaacttgaagcatcctcatgacctagtcatattaatgagacaagaagcaacagttaactacctcaaagaattagagaaacaattagttgctcaaaaaattcacatagaagagaatgaggacagagacacaggactggaacagagacataataaagaagacccagactgcatcaaagccaaggtgcccttaggggacctggatctatatgatggcacatacataactttggagagcaaagacatcagtcctgaagattatatagacacagaatctcctgtccctccagacccagagcaacctgattgtactaaaattctagaacttccatatagtatacatgcttttcagcacttgagaggtgtacaggagagagttaatctttctgcacctctgctacctaaagaagacccaatcttcacatatttatctaaacggttaggaaggagtatagatgacataggtcacctcattcatgaaggcctacagaagaacacttcctcgtgggtactgtataacatggcttcattttactggagaattaagaatgagccatatcaggtagtagaatgtgccatgcgagcacttcacttctcttccaggcacaataaagacattgccctggtcaacctggcaaacgttctacacagagcacacttctctgctgatgctgctgtcgtggtccatgcagctctggatgacagtgacttcttcaccagctattacactttggggaatatatatgcaatgcttggggaatataaccactcagtgctctgttatgaccacgctttgcaggccagacctgggtttgagcaagctataaagaggaagcatgctgtcctatgtcagcaaaaactggagcagaaattggaggctcagcatagatctctccagcgaacactgaatgagttaaaagagtatcaaaagcagcatgaccactacctgagacagcaggaaatcctagaaaaacataaactgattcaggaggagcaaatcttaagaaatatcattcatgagactcagatggcaaaagaggcacaattaggaaatcatcagatatgccgactggtcaaccagcagcatagtttacattgccagtgggaccagcctgtacgctatcatcgtggagatatctttgaaaatgtggactatgttcagtttggtgaggattcatcaacctccagtatgatgtctgtgaactttgatgttcaatcaaatcagagtgatatcaatgattcggtcaagtcttctcccgtagcccattctattctctggatttggggcagggactctgatgcatatagggacaaacagcatattctatggcctaaaagagcagattgtacagaaagctaccctagagtccctgttggtggggaattgccaacgtattttctgcctccggaaaacaaaggactcaggatccacgaactcagcagtgatgattattctacagaagaagaggcccaaacccctgactgttccataactgacttcagaaaaagccacactctgtcctacttagtcaaagaattagaggttcgcatggatctgaaagccaaaatgccagatgaccatgcacgaaaaattttgctttcccgtattaataactatactatcccagaagaagaaattgggtctttcttatttcatgctattaataagccaaatgctcctatctggctcatactcaatgaagctggactatactggagagcagtaggaaatagcacttttgctattgcctgtcttcagagggctttgaatttagctccacttcaataccaagatgttcctcttgtcaacttggccaaccttttgattcattacggccttcatcttgatgccactaagctgctacttcaagctttggccatcaatagctctgagcctctgacctttttgagcctgggaaatgcttaccttgctctgaagaatatcagtggggcacttgaggcctttagacaggccttgaaattaaccaccaaatgtccagagtgtgaaaacagcctgaagttgatccgctgtatgcagttttatccttttctgtacaacatcacttcttctgtttgcagtggtaattgtcatgagaaaaccctggacaacagccatgacaaacagaaatattttgacaactcacagtcactggatgctgctgaagaagagccctctgagagaggaacagaggaggaccctgtattctctgttgagaattcagggagggactcagatgcccttagacttgaaagtacggtggttgaggagagcaatggttctgatgagatggagaattcagatgaaaccaaaatgtcagaagaaatactggctttggtggatgaatttcaacaggcatggcctttggaaggctttgggggtgcactagagatgaaagggcggcgtctagacttacaaggaatacgggtgctgaagaaaggtccccaggatggagtggccagaagctcttgctatggagactgcagaagtgaagatgatgaagcaacagaatggattacattccaggtcaaacgtgtaaagaaacccaaaggagatcataagaaaactcctgggaaaaaagtagaaacaggtcagatagaaaatggacatcgttaccaagcaaacctagagatcactggccccaaggtggcatctcctgggccacaagggctactagactggaagaccaggaaagtgccatagacataatgtaactggatttcagcaaggcatttaacagagcctcttatgatatccttgtgaaccagatggagagatcagngaaaggggatccaaagagtc

SEQ ID NO: 424870 - DNA, 4124 bp, Homo sapiens
agcggcccggccgggggggcaagatggcggcggcagtaggggttcgtggccggtacgagctgccgccttgctccggcccaggctggctcctcagcctttccgccttgctgagtgtggcggcacgaggggccttcgccaccacgcactgggtcgtcacggaggacgggaaaatccagcagcaggtggattcaccaatgaacttgaagcatcctcatgacctagtcatattaatgagacaagaagcaacagttaactacctcaaagaattagagaaacaattagttgctcaaaaaattcacatagaagagaatgaggacagagacacaggactggaacagagacataataaagaagacccagactgcatcaaagccaaggtgcccttaggggacctggatctatatgatggcacatacataactttggagagcaaagacatcagtcctgaagattatatagacacagaatctcctgtccctccagacccagagcaacctgattgtactaaaattctagaacttccatatagtatacatgcttttcagcacttgagaggtgtacaggagagagttaatctttctgcacctctgctacctaaagaagacccaatcttcacatatttatctaaacggttaggaaggagtatagatgacataggtcacctcattcatgaaggcctacagaagaacacttcctcgtgggtactgtataacatggcttcattttactggagaattaagaatgagccatatcaggtagtagaatgtgccatgcgagcacttcacttctcttccaggcacaataaagacattgccctggtcaacctggcaaacgttctacacagagcacacttctctgctgatgctgctgtcgtggtccatgcagctctggatgacagtgacttcttcaccagctattacactttggggaatatatatgcaatgcttggggaatataaccactcagtgctctgttatgaccacgctttgcaggccagacctgggtttgagcaagctataaagaggaagcatgctgtcctatgtcagcaaaaactggagcagaaattggaggctcagcatagatctctccagcgaacactgaatgagttaaaagagtatcaaaagcagcatgaccactacctgagacagcaggaaatcctagaaaaacataaactgattcaggaggagcaaatcttaagaaatatcattcatgagactcagatggcaaaagaggcacaattaggaaatcatcagatatgccgactggtcaaccagcagcatagtttacattgccagtgggaccagcctgtacgctatcatcgtggagatatctttgaaaatgtggactatgttcagtttggtgaggattcatcaacctccagtatgatgtctgtgaactttgatgttcaatcaaatcagagtgatatcaatgattcggtcaagtcttctcccgtagcccattctattctctggatttggggcagggactctgatgcatatagggacaaacagcatattctatggcctaaaagagcagattgtacagaaagctaccctagagtccctgttggtggggaattgccaacgtattttctgcctccggaaaacaaaggactcaggatccacgaactcagcagtgatgattattctacagaagaagaggcccaaacccctgactgttccataactgacttcagaaaaagccacactctgtcctacttagtcaaagaattagaggttcgcatggatctgaaagccaaaatgccagatgaccatgcacgaaaaattttgctttcccgtattaataactatactatcccagaagaagaaattgggtctttcttatttcatgctattaataagccaaatgctcctatctggctcatactcaatgaagctggactatactggagagcagtaggaaatagcacttttgctattgcctgtcttcagagggctttgaatttagctccacttcaataccaagatgttcctcttgtcaacttggccaaccttttgattcattacggccttcatcttgatgccactaagctgctacttcaagctttggccatcaatagctctgagcctctgacctttttgagcctgggaaatgcttaccttgctctgaagaatatcagtggggcacttgaggcctttagacaggccttgaaattaaccaccaaatgtccagagtgtgaaaacagcctgaagttgatccgctgtatgcagttttatccttttctgtacaacatcacttcttctgtttgcagtggtaattgtcatgagaaaaccctggacaacagccatgacaaacagaaatattttgacaactcacagtcactggatgctgctgaagaagagccctctgagagaggaacagaggaggaccctgtattctctgttgagaattcagggagggactcagatgcccttagacttgaaagtacggtggttgaggagagcaatggttctgatgagatggagaattcagatgaaaccaaaatgtcagaagaaatactggctttggtggatgaatttcaacaggcatggcctttggaaggctttgggggtgcactagagatgaaagggcggcgtctagacttacaaggaatacgggtgctgaagaaaggtccccaggatggagtggccagaagctcttgctatggagactgcagaagtgaagatgatgaagcaacagaatggcctgtgccccctctgccctctgccgtgctaaaatatcactcatccttaaacttcaaaatcaagtgccatctcttccttgttaccttcaggcagaattagttactctttcctctgtgcaattgttctatatcttcgctctagctcttttcctgttgtattgtaatgatttgtttatgtttaccttccttactagactgtgagctcaagagcaggccgtcttaattattcctttctgtacccctagtgtcttttatggttctcagccccttataacaggtgctcaataaatatttttcaaatgaaattattaaatgtaaaagaaaattaagattttttgtgaaaattatggcttatttaagttattaatttaaacagagttaatttgaaactcttccaaaactgttcctttctgttttgttaaaatctcaatctaaacccctgcctgtacctcaaacagttttctactgttcgtaaattcctataatataaaaagcgctatacagaactaaagttctccttcctgcctattccattataactccttcagaaaacccttcccagacaagacagttctgctcttttcttggggatttgatgtaagtaaagggcccacacccaaaaggtggtacttacgaaggatattaataaacagagctttaaatttttttgtagctttaaatagcttgttgattgggaacatacacgttagagtcaaacagactcctagctctgccagttgctagccaggtgacctggacaagtcacttagtctctctgagtctctgttttctcatctgagaaatgagggttaaaacctacttcaggccagatgcagtggctcacatctgtaatcccagcactttgggaggccagggtgggaggatcacttgagtccaggaggttaaggctccagaaagctagtatcatgccacggcactctagcctgggcaagaaagcaaggtgctgtctctaacttaaaaaaagaaaaatggaaaaaacttaaccacatgaggttaaaaaaagaaaaatggaaaaaacttaaccacatgaggttaaggatgtaaagcacttagcatgggatctgaatacacaggaagtgctcttcaaatagttgataaccaggctggttcttggactgtggtggtgtggtgggggctgggaggagatgataatctttcattaacatcattactccctgctgctcttctttatagtagtggttctctctactgggtgtggacatttggcaatatctggagacatttttgttgttatatctggggaacagtgctaccaccatccagtgggtgaaggccaaagatgatgctaaacaccctccaatgcacaggacaggtccctcaaaaaattatccagcccaaaatgccaataataccaggttgagaaaccctgctttagaga

SEQ ID NO: 424871 - DNA, 3090 bp, Homo sapiens
agcggcccggccgggggggcaagatggcggcggcagtaggggttcgtggccggtacgagctgccgccttgctccggcccaggctggctcctcagcctttccgccttgctgagtgtggcggcacgaggggccttcgccaccacgcactgggtcgtcacggaggacgggaaaatccagcagcaggtggattcaccaatgaacttgaagcatcctcatgacctagtcatattaatgagacaagaagcaacagttaactacctcaaagaattagagaaacaattagttgctcaaaaaattcacatagaagagaatgaggacagagacacaggactggaacagagacataataaagaagacccagactgcatcaaagccaaggtgcccttaggggacctggatctatatgatggcacatacataactttggagagcaaagacatcagtcctgaagattatatagacacagaatctcctgtccctccagacccagagcaacctgattgtactaaaattctagaacttccatatagtatacatgcttttcagcacttgagaggtgtacaggagagagttaatctttctgcacctctgctacctaaagaagacccaatcttcacatatttatctaaacggttaggaaggagtatagatgacataggtcacctcattcatgaaggcctacagaagaacacttcctcgtgggtactgtataacatggcttcattttactggagaattaagaatgagccatatcaggtagtagaatgtgccatgcgagcacttcacttctcttccaggcacaataaagacattgccctggtcaacctggcaaacgttctacacagagcacacttctctgctgatgctgctgtcgtggtccatgcagctctggatgacagtgacttcttcaccagctattacactttggggaatatatatgcaatgcttggggaatataaccactcagtgctctgttatgaccacgctttgcaggccagacctgggtttgagcaagctataaagaggaagcatgctgtcctatgtcagcaaaaactggagcagaaattggaggctcagcatagatctctccagcgaacactgaatgagttaaaagagtatcaaaagcagcatgaccactacctgagacagcaggaaatcctagaaaaacataaactgattcaggaggagcaaatcttaagaaatatcattcatgagactcagatggcaaaagaggcacaattaggaaatcatcagatatgccgactggtcaaccagcagcatagtttacattgccagtgggaccagcctgtacgctatcatcgtggagatatctttgaaaatgtggactatgttcagtttggtgaggattcatcaacctccagtatgatgtctgtgaactttgatgttcaatcaaatcagagtgatatcaatgattcggtcaagtcttctcccgtagcccattctattctctggatttggggcagggactctgatgcatatagggacaaacagcatattctatggcctaaaagagcagattgtacagaaagctaccctagagtccctgttggtggggaattgccaacgtattttctgcctccggaaaacaaaggactcaggatccacgaactcagcagtgatgattattctacagaagaagaggcccaaacccctgactgttccataactgacttcagaaaaagccacactctgtcctacttagtcaaagaattagaggttcgcatggatctgaaagccaaaatgccagatgaccatgcacgaaaaattttgctttcccgtattaataactatactatcccagaagaagaaattgggtctttcttatttcatgctattaataagccaaatgctcctatctggctcatactcaatgaagctggactatactggagagcagtaggaaatagcacttttgctattgcctgtcttcagagggctttgaatttagctccacttcaataccaagatgttcctcttgtcaacttggccaaccttttgattcattacggccttcatcttgatgccactaagctgctacttcaagctttggccatcaatagctctgagcctctgacctttttgagcctgggaaatgcttaccttgctctgaagaatatcagtggggcacttgaggcctttagacaggccttgaaattaaccaccaaatgtccagagtgtgaaaacagcctgaagttgatccgctgtatgcagttttatccttttctgtacaacatcacttcttctgtttgcagtggtaattgtcatgagaaaaccctggacaacagccatgacaaacagaaatattttgacaactcacagtcactggatgctgctgaagaagagccctctgagagaggaacagaggaggaccctgtattctctgttgagaattcagggagggactcagatgcccttagacttgaaagtacggtggttgaggagagcaatggttctgatgagatggagaattcagatgaaaccaaaatgtcagaagaaatactggctttggtggatgaatttcaacaggcatggcctttggaaggctttgggggtgcactagagatgaaagggcggcgtctagacttacaaggaatacgggtgctgaagaaaggtccccaggatggagtggccagaagctcttgctatggagactgcagaagtgaagatgatgaagcaacagaatggattacattccaggtcaaacgtgtaaagaaacccaaaggagatcataagaaaactcctgggaaaaaagtagaaacaggtcagatagaaaatggacatcgttaccaagcaaacctagagatcactggccccaaggtggcatctcctgggccacaaggtaaatttgaatgtttaatatgccagtttcttgttttagatgtcactatctcatttctcacaaaggttgtatttgtaacttgaaatagttcagatgagatgataaaggggcaaagtgtggtcaagaaaccagtctatcttctgtatcaatgaaaaaaatgttcaaactctaaaacattatggaaatgcaaattccagtggatttaacattatgtgtaataaatcataaagg

SEQ ID NO: 424872 - DNA, 2826 bp, Homo sapiens
agcggcccggccgggggggcaagatggcggcggcagtaggggttcgtggccggtacgagctgccgccttgctccggcccaggctggctcctcagcctttccgccttgctgagtgtggcggcacgaggggccttcgccaccacgcactgggtcgtcacggaggacgggaaaatccagcagcaggtggattcaccaatgaacttgaagcatcctcatgacctagtcatattaatgagacaagaagcaacagttaactacctcaaagaattagagaaacaattagttgctcaaaaaattcacatagaagagaatgaggacagagacacaggactggaacagagacataataaagaagacccagactgcatcaaagccaaggtgcccttaggggacctggatctatatgatggcacatacataactttggagagcaaagacatcagtcctgaagattatatagacacagaatctcctgtccctccagacccagagcaacctgattgtactaaaattctagaacttccatatagtatacatgcttttcagcacttgagaggtgtacaggagagagttaatctttctgcacctctgctacctaaagaagacccaatcttcacatatttatctaaacggttaggaaggagtatagatgacataggtcacctcattcatgaaggcctacagaagaacacttcctcgtgggtactgtataacatggcttcattttactggagaattaagaatgagccatatcaggtagtagaatgtgccatgcgagcacttcacttctcttccaggcacaataaagacattgccctggtcaacctggcaaacgttctacacagagcacacttctctgctgatgctgctgtcgtggtccatgcagctctggatgacagtgacttcttcaccagctattacactttggggaatatatatgcaatgcttggggaatataaccactcagtgctctgttatgaccacgctttgcaggccagacctgggtttgagcaagctataaagaggaagcatgctgtcctatgtcagcaaaaactggagcagaaattggaggctcagcatagatctctccagcgaacactgaatgagttaaaagagtatcaaaagcagcatgaccactacctgagacagcaggaaatcctagaaaaacataaactgattcaggaggagcaaatcttaagaaatatcattcatgagactcagatggcaaaagaggcacaattaggaaatcatcagatatgccgactggtcaaccagcagcatagtttacattgccagtgggaccagcctgtacgctatcatcgtggagatatctttgaaaatgtggactatgttcagtttggtgaggattcatcaacctccagtatgatgtctgtgaactttgatgttcaatcaaatcagagtgatatcaatgattcggtcaagtcttctcccgtagcccattctattctctggatttggggcagggactctgatgcatatagggacaaacagcatattctatggcctaaaagagcagattgtacagaaagctaccctagagtccctgttggtggggaattgccaacgtattttctgcctccggaaaacaaaggactcaggatccacgaactcagcagtgatgattattctacagaagaagaggcccaaacccctgactgttccataactgacttcagaaaaagccacactctgtcctacttagtcaaagaattagaggttcgcatggatctgaaagccaaaatgccagatgaccatgcacgaaaaattttgctttcccgtattaataactatactatcccagaagaagaaattgggtctttcttatttcatgctattaataagccaaatgctcctatctggctcatactcaatgaagctggactatactggagagcagtaggaaatagcacttttgctattgcctgtcttcagagggctttgaatttagctccacttcaataccaagatgttcctcttgtcaacttggccaaccttttgattcattacggccttcatcttgatgccactaagctgctacttcaagctttggccatcaatagctctgagcctctgacctttttgagcctgggaaatgcttaccttgctctgaagaatatcagtggggcacttgaggcctttagacaggccttgaaattaaccaccaaatgtccagagtgtgaaaacagcctgaagttgatccgctgtatgcagttttatccttttctgtacaacatcacttcttctgtttgcagtggtaattgtcatgagaaaaccctggacaacagccatgacaaacagaaatattttgacaactcacagtcactggatgctgctgaagaagagccctctgagagaggaacagaggaggaccctgtattctctgttgagaattcagggagggactcagatgcccttagacttgaaagtacggtggttgaggagagcaatggttctgatgagatggagaattcagatgaaaccaaaatgtcagaagaaatactggctttggtggatgaatttcaacaggcatggcctttggaaggctttgggggtgcactagagatgaaagggcggcgtctagacttacaaggaatacgggtgctgaagaaaggtccccaggatggagtggccagaagctcttgctatggagactgcagaagtgaagatgatgaagcaacagaatggattacattccaggtcaaacgtgtaaagaaacccaaaggagaatcagaaactccaacattttggaatcttcaagggcacatactgagaaaaaaaataaaattgtttatgagcaaaaaaaaaa

SEQ ID NO: 424873 - DNA, 2684 bp, Homo sapiens
agcggcccggccgggggggcaagatggcggcggcagtaggggttcgtggccggtacgagctgccgccttgctccggcccaggctggctcctcagcctttccgccttgctgagtgtggcggcacgaggggccttcgccaccacgcactgggtcgtcacggaggacgggaaaatccagcagcaggtggattcaccaatgaacttgaagcatcctcatgacctagtcatattaatgagacaagaagcaacagttaactacctcaaagaattagagaaacaattagttgctcaaaaaattcacatagaagagaatgaggacagagacacaggactggaacagagacataataaagaagacccagactgcatcaaagccaaggtgcccttaggggacctggatctatatgatggcacatacataactttggagagcaaagacatcagtcctgaagattatatagacacagaatctcctgtccctccagacccagagcaacctgattgtactaaaattctagaacttccatatagtatacatgcttttcagcacttgagaggtgtacaggagagagttaatctttctgcacctctgctacctaaagaagacccaatcttcacatatttatctaaacggttaggaaggagtatagatgacataggtcacctcattcatgaaggcctacagaagaacacttcctcgtgggtactgtataacatggcttcattttactggagaattaagaatgagccatatcaggtagtagaatgtgccatgcgagcacttcacttctcttccaggcacaataaagacattgccctggtcaacctggcaaacgttctacacagagcacacttctctgctgatgctgctgtcgtggtccatgcagctctggatgacagtgacttcttcaccagctattacactttggggaatatatatgcaatgcttggggaatataaccactcagtgctctgttatgaccacgctttgcaggccagacctgggtttgagcaagctataaagaggaagcatgctgtcctatgtcagcaaaaactggagcagaaattggaggctcagcatagatctctccagcgaacactgaatgagttaaaagagtatcaaaagcagcatgaccactacctgagacagcaggaaatcctagaaaaacataaactgattcaggaggagcaaatcttaagaaatatcattcatgagactcagatggcaaaagaggcacaattaggaaatcatcagatatgccgactggtcaaccagcagcatagtttacattgccagtgggaccagcctgtacgctatcatcgtggagatatctttgaaaatgtggactatgttcagtttggtgaggattcatcaacctccagtatgatgtctgtgaactttgatgttcaatcaaatcagagtgatatcaatgattcggtcaagtcttctcccgtagcccattctattctctggatttggggcagggactctgatgcatatagggacaaacagcatattctatggcctaaaagagcagattgtacagaaagctaccctagagtccctgttggtggggaattgccaacgtattttctgcctccggaaaacaaaggactcaggatccacgaactcagcagtgatgattattctacagaagaagaggcccaaacccctgactgttccataactgacttcagaaaaagccacactctgtcctacttagtcaaagaattagaggttcgcatggatctgaaagccaaaatgccagatgaccatgcacgaaaaattttgctttcccgtattaataactatactatcccagaagaagaaattgggtctttcttatttcatgctattaataagccaaatgctcctatctggctcatactcaatgaagctggactatactggagagcagtaggaaatagcacttttgctattgcctgtcttcagagggctttgaatttagctccacttcaataccaagatgttcctcttgtcaacttggccaaccttttgattcattacggccttcatcttgatgccactaagctgctacttcaagctttggccatcaatagctctgagcctctgacctttttgagcctgggaaatgcttaccttgctctgaagaatatcagtggggcacttgaggcctttagacaggccttgaaattaaccaccaaatgtccagagtgtgaaaacagcctgaagttgatccgctgtatgcagttttatccttttctgtacaacatcacttcttctgtttgcagtggtaattgtcatgagaaaaccctggacaacagccatgacaaacagaaatattttgacaactcacagtcactggatgctgctgaagaagagccctctgagagaggaacagaggaggaccctgtattctctgttgagaattcagggagggactcagatgcccttagacttgaaagtacggtggttgaggagagcaatggttctgatgagatggagaattcagatgaaaccaaaatgtcagaagaaatactggctttggtggatgaatttcaacaggcatggcctttggaaggctttgggggtgcactagagatgaaagggcggcccgtcttaattattcctttctgtacccctagtgtcttttatggttctcagccccttataacaggtgctcaataaatatttttcaaatga

SEQ ID NO: 424874 - DNA, 1780 bp, Homo sapiens
agcggccgctcgcgatctagaactagtagcaaacctagagatcactggccccaaggtggcatctcctgggccacaagggctactagactggaagaccaggaaagtgccatagacataatgtaactggatttcagcaaggcatttaacagagcctcttatgatatccttgtgaaccagatggagagatgtgggcttgaagccttcccattgcctacaggataaaattcaaacttcctagtgtggtgtacaagaccctttacagcccgcctctgtgtacccttcaacaccattctctgaaccaaccatgctcatgtttttacctcagtgcctttgcacatgctattccctctgcctggaatgccctgtgccccctctgccctctgccgtgctaaaatatcactcatccttaaacttcaaaatcaagtgccatctcttccttgttaccttcaggcagaattagttactctttcctctgtgcaattgttctatatcttcgctctagctcttttcctgttgtattgtaatgatttgtttatgtttaccttccttactagactgtgagctcaagagcaggccgtcttaattattcctttctgtacccctagtgtcttttatggttctcagccccttataacaggtgctcaataaatatttttcaaatgaaattattaaatgtaaaagaaaattaagattttttgtgaaaattatggcttatttaagttattaatttaaacagagttaatttgaaactcttccaaaactgttcctttctgttttgttaaaatctcaatctaaacccctgcctgtacctcaaacagttttctactgttcgtaaattcctataatataaaaagcgctatacagaactaaagttctccttcctgcctattccattataactccttcagaaaacccttcccagacaagacagttctgctcttttcttggggatttgatgtaagtaaagggcccacacccaaaaggtggtacttacgaaggatattaataaacagagctttaaatttttttgtagctttaaatagcttgttgattgggaacatacacgttagagtcaaacagactcctagctctgccagttgctagccaggtgacctggacaagtcacttagtctctctgagtctctgttttctcatctgagaaatgagggttaaaacctacttcaggccagatgcagtggctcacatctgtaatcccagcactttgggaggccagggtgggaggatcacttgagtccaggaggttaaggctccagaaagctagtatcatgccacggcactctagcctgggcaagaaagcaaggtgctgtctctaacttaaaaaaagaaaaatggaaaaaacttaaccacatgaggttaaaaaaagaaaaatggaaaaaacttaaccacatgaggttaaggatgtaaagcacttagcatgggatctgaatacacaggaagtgctcttcaaatagttgataaccaggctggttcttggactgtggtggtgtggtgggggctgggaggagatgataatctttcattaacatcattactccctgctgctcttctttatagtagtggttctctctactgggtgtggacatttggcaatatctggagacatttttgttgttatatctggggaacagtgctaccaccatccagtgggtgaaggccaaagatgatgctaaacaccctccaatgcacaggacaggtccctcaaaaaattatccagcccaaaatgccaataataccaggttgagaaaccctgctttagaga

SEQ ID NO: 424875 - DNA, 1802 bp, Homo sapiens
agcggcccggccgggggggcaagatggcggcggcagtaggggttcgtggccggtacgagctgccgccttgctccggcccaggctggctcctcagcctttccgccttgctgagtgtggcggcacgaggggccttcgccaccacgcactgggtcgtcacggaggacgggaaaatccagcagcaggtggattcaccaatgaacttgaagcatcctcatgacctagtcatattaatgagacaagaagcaacagttaactacctcaaagaattagagaaacaattagttgctcaaaaaattcacatagaagagaatgaggacagagacacaggactggaacagagacataataaagaagacccagactgcatcaaagccaaggtgcccttaggggacctggatctatatgatggcacatacataactttggagagcaaagacatcagtcctgaagattatatagacacagaatctcctgtccctccagacccagagcaacctgattgtactaaaattctagaacttccatatagtatacatgcttttcagcacttgagaggtgtacaggagagagttaatctttctgcacctctgctacctaaagaagacccaatcttcacatatttatctaaacggttaggaaggagtatagatgacataggtcacctcattcatgaaggcctacagaagaacacttcctcgtgggtactgtataacatggcttcattttactggagaattaagaatgagccatatcaggtagtagaatgtgccatgcgagcacttcacttctcttccaggcacaataaagacattgccctggtcaacctggcaaacgttctacacagagcacacttctctgctgatgctgctgtcgtggtccatgcagctctggatgacagtgacttcttcaccagctattacactttggggaatatatatgcaatgcttggggaatataaccactcagtgctctgttatgaccacgctttgcaggccagacctgggtttgagcaagctataaagaggaagcatgctgtcctatgtcagcaaaaactggagcagaaattggaggctcagcatagatctctccagcgaacactgaatgagttaaaagagtatcaaaagcagcatgaccactacctgagacagcaggaaatcctagaaaaacataaactgattcaggaggagcaaatcttaagaaatatcattcatgagactcagatggcaaaagaggcacaattaggaaatcatcagatatgccgactggtcaaccagcagcatagtttacattgccagtgggaccagcctgtacgctatcatcgtggagatatctttgaaaatgtggactatgttcaggtctttttcttggtccagtctaattcttataaacgtttgctttataaagattttttaaaacttttgtttttcctcttgattctttgtatatttgatccctaaaatttgtgattgtcatttagatctttaagattttgaggctgggcacagtggctcacgcctgtaatctcagcacttagggaggcagaggcagaaggatcacgagcccaggagttcaagaccagcctgggtaacatggtgaaaccccatctctacaaaaacatatataaattggccaggtatggtggcatgcacctgtagtcccagctactcgggaggctgaggcgggagaatcatctgagctctggaggtcaaagctgtagtgaacccagatcatgccattgcactccagcctgggcaacagagcaagactgtgtctcaaaaaataaataaataaataaataaata

SEQ ID NO: 424876 - DNA, 2626 bp, Homo sapiens
  misc_feature (2602)..(2602): n is a, c, g, or t
aaggaaatgcagattaaaaccacatttctcacccatcagattgtcaggggcctaagagtttagtaacaaactctgtgatggggctataaggaaatggtgatacttagatatttctggcaggagattaaattgttataatccgggtgggcatggtggcttatgcctgtaatcccagcactttgggaggccgaagtgtgcagatcacctgaggtcatgagttcgagaccagcctggccaacatggtgaaactctatctctactaaaaatacaaaaattagacaggcgtggtggtgcactcctctaatcccagctactcgggaggctgagacagaagaatcgcttgaacctgggagatgaaggttgcagtgagctgagatcattccactgcactccagcctgggcgacagcgagactctgtctcaaaaaaaaaaggacaaaggaaaggaggggggaggggggaggtgaggggaggaaattctagaaggaaacgtaaaaaattaaaaataatgtttacttgtctaccatagagacgaggatgggagagagacttcatggtataactttgtatacttcctggtttttgaaacgtgtgactgtgttacctattcagaaagttaaataaaatagaacatagatatgagatatagttctgctattcagtagttgagtgaacttgggcaagacacttaagctctctgagtcatagttttctcatttatagaagggctgtaatagtagtatcaagctcacaggattgttctaaggattaatgaaggacaggtggaacagaaagtgctgagcagagtgccagcacttagtaaatactcagttgaatggtcatgacttgtgttactgaacttaatcttggtaataaatgagtatgttcttgaaaggacaccagccttggctaacattcctttgcagaaccagacgtcctgggtcctctccagcatggcagccctctactggagggtgaaaggccaaggaaagaaggcaatcgactgcctccgccaggctctgcactatgcgccacaccagatgaaggtgagtgggactcagaaggtgggaacttctgcccctttgtcctttccattccccatggtttattctgccctttgaaccagcctccctcatgctcagccagtgaggacatattccaaggagagaatggggcaggagaccttctgactgggcttgtgccccagcaagcctatgaactatccctgctgccttcccagcttcagcaggttggaacgtggggaaggccttccagatcactgtaagacagtactgcatttagtcccctttctgctgtgttcagagccacccaacatacagcaaatgcactggcctaagtgggctgacacatagaagtcaatctgaatttagcttgtcatcaggggcctggtgacctcttagacttgttttgcttatcctcttggcttgagcttgcttccaagcacagagatagaagcaaatttccatttattcatgtacattggccagttcctggtccttgtctgacttctactttttccacaaaaaaaaaaaaaaaaaaaaaaaaaaaccgggttacccctgtgtgcccccaggattttcccaaaaaaccgggttttggtaatgaggggggaaaaaattacaggggtttcattcaggcaactttgggtgtttccatggtggtcccgaggttcctgggttaaatcccagagattactatatggctctttaaaaaaagccatggggcggggagtctaacttgggtgccgcacaagggcaaatgcgtctggagaactggattgggacagggaaccaccgaggggattcttatgtggggtcagaggccatgtgcgcagtgaaagtcttttatacaaacccacgaggcctctatacctctctttatacatagcctctggggggaaattgtggggggccaccccttttattggggaccttccgaagggggagcctcccattctatagggagttcagtgccaatctcctataggggggggtggttcccaaagacagagatgtggcggtcccccatcatccgggggtggaatcatccatcgcgggggggtctccggggcacccaaacaggaaaaaccccacaaatatagtggcggccgtgtgatataacacgggggggtgcaaacccagagtctggcgccccccaaatgcttttcgagagaacccactttttaggaggggcggcaacagtgaacaacaattcacgaaggagcaaagagaaatagaaccaactctcgtgaggcaccatacacttgtggttccacaactcccgaaatcaaaattggtggggaacaccacaaaaaaaccgtgcgtgaacaggagcacaaatcggggaggaacaggggcccctagcgaggggccccctacaccatctgtgggaggacgactccaggcagaaaaagttttccgcagggaaaaagggagggcaccaggaaaacattaacaacccccgtctgggtgaccctcgagggagaggcagcacacgaaaaaagcagctcgctgggtggtgccacccatcacatataataatgttcgtaggcgcaactgtgaggacagctttatgtagaaaaancgaggcgccacagaacaaatagcc

SEQ ID NO: 424877 - DNA, 1775 bp, Homo sapiens
agcggcccggccgggggggcaagatggcggcggcagtaggggttcgtggccggtacgagctgccgccttgctccggcccaggctggctcctcagcctttccgccttgctgagtgtggcggcacgaggggccttcgccaccacgcactgggtcgtcacggaggacgggaaaatccagcagcaggtggattcaccaatgaacttgaagcatcctcatgacctagtcatattaatgagacaagaagcaacagttaactacctcaaagaattagagaaacaattagttgctcaaaaaattcacatagaagagaatgaggacagagacacaggactggaacagagacataataaagaagacccagactgcatcaaagccaaggtgcccttaggggacctggatctatatgatggcacatacataactttggagagcaaagacatcagtcctgaagattatatagacacagaatctcctgtccctccagacccagagcaacctgattgtactaaaattctagaacttccatatagtatacatgcttttcagcacttgagaggtgtacaggagagagttaatctttctgcacctctgctacctaaagaagacccaatcttcacatatttatctaaacggttaggaaggagtatagatgacataggtcacctcattcatgaaggcctacagaagaacacttcctcgtgggtactgtataacatggcttcattttactggagaattaagaatgagccatatcaggtagtagaatgtgccatgcgagcacttcacttctcttccaggcacaataaagacattgccctggtcaacctggcaaacgttctacacagagcacacttctctgctgatgctgctgtcgtggtccatgcagcttattacactttggggaatatatatgcaatgcttggggaatataaccactcagtgctctgttatgaccacgctttgcaggccagacctgggtttgagcaagctataaagaggaagcatgctgtcctatgtcagcaaaaactggagcagaaattggaggctcagcatagatctctccagcgaacactgaatgagttaaaagagtatcaaaagcagcatgaccactacctgagacagcaggaaatcctagaaaaacataaactgattcaggaggagcaaatcttaagaaatatcattcatgagactcagatggcaaaagaggcacaattaggaaatcatcagatatgccgactggtcaaccagcagcatagtttacattgccagtgggaccagcctgtacgctatcatcgtggagatatctttgaaaatgtggactatgttcaggtctttttcttggtccagtctaattcttataaacgtttgctttataaagattttttaaaacttttgtttttcctcttgattctttgtatatttgatccctaaaatttgtgattgtcatttagatctttaagattttgaggctgggcacagtggctcacgcctgtaatctcagcacttagggaggcagaggcagaaggatcacgagcccaggagttcaagaccagcctgggtaacatggtgaaaccccatctctacaaaaacatatataaattggccaggtatggtggcatgcacctgtagtcccagctactcgggaggctgaggcgggagaatcatctgagctctggaggtcaaagctgtagtgaacccagatcatgccattgcactccagcctgggcaacagagcaagactgtgtctcaaaaaataaataaataaataaataaata

SEQ ID NO: 424878 - DNA, 1908 bp, Homo sapiens
agcggcccggccgggggggcaagatggcggcggcagtaggggttcgtggccggtacgagctgccgccttgctccggcccaggctggctcctcagcctttccgccttgctgagtgtggcggcacgaggggccttcgccaccacgcactgggtcgtcacggaggacgggaaaatccagcagcaggtggattcaccaatgaacttgaagcatcctcatgacctagtcatattaatgagacaagaagcaacagttaactacctcaaagaattagagaaacaattagttgctcaaaaaattcacatagaagagaatgaggacagagacacaggactggaacagagacataataaagaagacccagactgcatcaaagccaaggtgcccttaggggacctggatctatatgatggcacatacataactttggagagcaaagacatcagtcctgaagattatatagacacagaatctcctgtccctccagacccagagcaacctgattgtactaaaattctagaacttccatatagtatacatgcttttcagcacttgagaggtgtacaggagagagttaatctttctgcacctctgctacctaaagaagacccaatcttcacatatttatctaaacggttaggaaggagtatagatgacataggtcacctcattcatgaaggcctacagaaggtaagtcatcagtcacttaaagagccagcgggctgagccagcgggctctgtgtaaacagaagatatttttatcttggaaaatacctgactaatttgtttttatctagaagacgatttaaaattacacttacattgatgcaaattgcatagttcagtgctggggagaaatatggatagactagtctcctttcccaggaagagatgctggaaagttttatctaaactgatgaaaaacgaaatataaactgacataagcaacagcgtttataggctggattatatacattgtgtaagtaagaaagttaatgttttagtgtcgttaatatatctatacacaatacatgtattattactgttttctgagacagaaaaagaatcaccaccagcaacaaaatcttctgtaactttcttttaagagactatctactttaaaaaaaatgaaatagggaattatgtaacaggacccaggaatgtaaatgtatcattcaggattaacgtgggcatttagaaaatgtttttgctattctttgtgcctaaagagtatcataaaatgcagtttagtttctaagcagtattatagtggtataaaataagatgtataattgccacctttgtatacagttttttcaaatacatagctttgtatattgagaggaattttcagataaaagtccgataataacttgactttcagatgctttatatggttatttctgtagctgtgttaccatcttcatcttatttttctgaaggtaatgtaaaacttttacattcccagaacttgatgagtaataagagaaaactggcccaggattttacagtgtccttcagagaatggttagttgagagtagaccatagtggtaagtgttctatagaaaattaaaacagaaagtaactgggtggctactttagatctagcagttggggttatcctatccggaaacgtgaaatttaagctgacacctgaatcataagaagaaaccaaaattcaaagaccacggaagagcattctaagccacagcaaaggctctgaatcctgattgaggttaggtggttgtatttgtctgctcaggcttccataacaaagtaccactttggaccgtttctgctcaaaacacttctgacaccaaatgtatggagttttttctcacacgactaattcggtagttctcccgacatcaactaggtgttctacaactcaatacaattctgacactaact

SEQ ID NO: 424879 - DNA, 1093 bp, Homo sapiens
agcggcccggccgggggggcaagatggcggcggcagtaggggttcgtggccggtacgagctgccgccttgctccggcccaggctggctcctcagcctttccgccttgctgagtgtggcggcacgaggggccttcgccaccacgcactgggtcgtcacggaggacgggaaaatccagcagcaggtggattcaccaatgaacttgaagcatcctcatgacctagtcatattaatgagacaagaagcaacagttaactacctcaaagaattagagaaacaattagttgctcaaaaaattcacatagaagagaatgaggacagagacacaggactggaacagagacataataaagaagacccagactgcatcaaagccaaggtgcccttaggggacctggatctatatgatggcacatacataactttggagagcaaagacatcagtcctgaagattatatagacacagaatctcctgtccctccagacccagagcaacctgattgtactaaaattctagaacttccatatagtatacatgcttttcagcacttgagaggtgtacaggagagagttaatctttctgcacctctgctacctaaagaagacccaatcttcacatatttatctaaacggttaggaaggagtatagatgacataggtcacctcattcatgaaggcctacagaagaacacttcctcgtgggtactgtataacatggcttcattttactggagaattaagaatgagccatatcaggtagtagaatgtgccatgcgagcacttcacttctcttccaggtaagattcctcctcttctggacctgattttccacattcctcaggactgttaaagaaacaatacataagaaagcagtaagaagcaacattgcattatatacttttctccatccctgttcaaagaaataagtcccaccacaaaaaaaaaaaaaaaatcacagatctcaaaaagttcaaagtgataattgtgtaatatactttccatttccattaaggaaaaaatatgtagatgccctatgattcacatgatacttgaatggaattatcataaactaagtttaacttttcttaaagcaa

SEQ ID NO: 424880 - DNA, 1614 bp, Homo sapiens
agcggcccggccgggggggcaagatggcggcggcagtaggggttcgtggccggtacgagctgccgccttgctccggcccaggctggctcctcagcctttccgccttgctgagtgtggcggcacgaggggccttcgccaccacgcactgggtcgtcacggaggacgggaaaatccagcagcaggtggattcaccaatgaacttgaagcatcctcatgacctagtcatattaatgagacaagaagcaacagttaactacctcaaagaattagagaaacaattagttgctcaaaaaattcacatagaagagaatgaggacagagacacaggactggaacagagacataataaagaagacccagactgcatcaaagccaaggtgcccttaggggacctggatctatatgatggcacatacataactttggagagcaaagacatcagtcctgaagattatatagacacagaatctcctgtccctccagacccagagcaacctgattgtactaaaattctagaacttccatatagtatacatgcttttcagcacttgagaggtgtacaggagagagttaatctttctgcacctctgctacctaaagaagacccaatcttcacatatttatctaaacgccctgcctgtacctcaaacagttttctactgttcgtaaattcctataatataaaaagcgctatacagaactaaagttctccttcctgcctattccattataactccttcagaaaacccttcccagacaagacagttctgctcttttcttggggatttgatgtaagtaaagggcccacacccaaaaggtggtacttacgaaggatattaataaacagagctttaaatttttttgtagctttaaatagcttgttgattgggaacatacacgttagagtcaaacagactcctagctctgccagttgctagccaggtgacctggacaagtcacttagtctctctgagtctctgttttctcatctgagaaatgagggttaaaacctacttcaggccagatgcagtggctcacatctgtaatcccagcactttgggaggccagggtgggaggatcacttgagtccaggaggttaaggctccagaaagctagtatcatgccacggcactctagcctgggcaagaaagcaaggtgctgtctctaacttaaaaaaagaaaaatggaaaaaacttaaccacatgaggttaaaaaaagaaaaatggaaaaaacttaaccacatgaggttaaggatgtaaagcacttagcatgggatctgaatacacaggaagtgctcttcaaatagttgataaccaggctggttcttggactgtggtggtgtggtgggggctgggaggagatgataatctttcattaacatcattactccctgctgctcttctttatagtagtggttctctctactgggtgtggacatttggcaatatctggagacatttttgttgttatatctggggaacagtgctaccaccatccagtgggtgaaggccaaagatgatgctaaacaccctccaatgcacaggacaggtccctcaaaaaattatccagcccaaaatgccaataataccaggttgagaaaccctgctttagaga

SEQ ID NO: 424881 - DNA, 662 bp, Homo sapiens
agcggcccggccgggggggcaagatggcggcggcagtaggggttcgtggccggtacgagctgccgccttgctccggcccaggctggctcctcagcctttccgccttgctgagtgtggcggcacgaggggccttcgccaccacgcactgggtcgtcacggaggacgggaaaatccagcagcagttatagccaggagcccatgcgtatctctctcaagagtggaagctgggctgctatttttgcgaacctgtacttctctaaacctcaaagaagatgtaagcccatgatggttagacttgaatcctgaagagataattccatgagaagtggagcaacagactttctgcctgcgtcattccatccctgtgaaactcatcttgcttgctaccatagtagcctggaagggatcgcaaacagaagggtctcttagacaatcatttgattgtttgagctagatttgtgataagggtaaaaatctgagggaagaaaggtaaggagcaagaaaatacaaaagatgtttcatttttgagatgttctaccttggtccttatctgtgagaggaattttttttctctataagtgaatacacgagggaaaaatacaagattcttcctcagacctaagcttatatttgtcattacagtttgtttaaggaaaaaaaaa

SEQ ID NO: 424882 - DNA, 528 bp, Homo sapiens
ctgtaatcccagttattctggagactgaggcagggtggaggggaggaatcacttgatgccaggagttcaaatctagcctgggcaacacagcaagacccagtttctaaaactaaattagccaggcatggtggcgtgtgcctgtagtcccagatactccccaggagactgaggcaagaggaccccttgagcccaggagttgagcccaagagtacaaggctgcagtgagctacaatcaggcctctccatccagccttgacaacagagcaagaccccattttttaaaaaagttgtatttaaaggaagaatttcacatttatctttttgccctagtattcttgaactggtgatacagggttgtatgttaaataaaaggaaaacacacagtaattgttgctgagaaccagaaaaatctgtgcatttaagtgggtttaaaatttatgattttatagctctaactttttcctggtattaaaaaatgttaagatctctccagcgaacactgaatgagttaaaagagtatcaaaagca

SEQ ID NO: 424883 - DNA, 354 bp, Homo sapiens
tgctaacatttacatgtgatcactttgaaatactccttgagttttgctgaggaataacgctgattacaatggcgaatgaacaataatttaaagcatattaatgactttgttaatccaaaccagcattaatgaaatccgagctttatttatttattgcttgcttgcaggtggattcaccaatgaacttgaagcatcctcatgacctagtcatattaatgagacaagaagcaacagttaactacctcaaagaattagaggtgaggcaactgggcatgtgagatgcagctgatgcttgttgcatttcacaggagccattgtgttcaaagaaaagctaaagcatattattttttaagt

SEQ ID NO: 424884 - DNA, 571 bp, Homo sapiens
ctttcagttggtctctcacttataaagaccatttctctttcttctctccttcctgacagctttgtaattttatagacatctcttatttcttaaaattccaaaatattagtatttcaaaataaacactacaagatactgaattatttgtcatcttttatatcctttgatatgtcttttgaatctttttcttctcttcagggtggtgtacaggagagagttaatctttctgcacctctgctacctaaagaagacccaatcttcacatatttatctaaacggttaggaaggagtatagatgacataggtcacctcattcatgaaggcctacagaaggtaagtcatcagtcacttaaagagccagcgggctgagccagcgggctctgtgtaaacagaagatatttttatcttggaaaatacctgactaatttgtttttatctagaagacgatttaaaattacacttacattgatgcaaattgcatagttcagtgctggggagaaatatggatagactagtctcctttcccaggaagagatgctggaaagttttatctaaactgatgaaaaacgaa

SEQ ID NO: 424885 - DNA, 386 bp, Homo sapiens
caattacattagtcagtaaaatttccctgtaactataacgcttgggtccctgctaaaagggagtttagagaacactacctagatctaaggctgaagggcatcctctgacctcccattctaaattagaatttgaaagccacagaggagtgtgtacctcctttgaagagcacacaccgtcccatgaaaaccactctcagggtcttgcccagaagtgcctccagcacagggtttggaagcagatagtcgaagcatagcagccccagatgtgaaagcaaggaaaaagtgctagctgtgcctgagtgcagcagctgaaagaaaggtaaaataggacttgatttttgtgactgtggaacaatagcttttgccactcatgacacgtgactcag

SEQ ID NO: 424886 - DNA, 336 bp, Homo sapiens
caaaggctatatctttagagtaaaggcaaactagaaataaacctaccttcccagggaactgcagtgaaaatttcttgtctcaagtgctgtcactgactagaagaagaaaaatgctgtcctgagaattataactgcagctggctttcatgcaggtttgcagtcttagttcatattatcaagggtgaccgaaggaccccaagctgagaatttcctcaacagagatctggttttgtaatgctccacagcatatggcagaagtgaagacagattcattctggaagcacatactatataggcctcaagtaatttctgcagataaacttaaaagaaatggac

SEQ ID NO: 424887 - DNA, 6696 bp, Homo sapiens
tgggttccctgaaaaatgctggtgacacactgacctcactggttctgccaaccagtgagttctacacatcatgaatgtattgtgaggaccctaacatgtctctttgtactaactgtttcaactttgtgtttgtttagggtggtaccgaggttacacgttacgaaaaaagtctaagaagggtatatttcctgcttcatatattcatcttaaagaagcgatagttgaaggaaaagggcaacatgaaacagtcatcccgggtgacctccccctcatccaggaagtcaccacgacactccgagagtggtccaccatctggaggcagctctacgtgcaagataacagggagatgtttcgaagtgtgcggcacatgatctatgaccttattgaatggcgatcacaaattctttctggaactctgcctcaggatgaactcaaagaactgaagaagaaggtcacagccaaaattgattatggaaacagaattctagatttggacctggtggttagagatgaagatgggaatattttggatccagaattaactagcacgattagtctcttcagagctcatgaaatagcttctaaacaagtggaggaaaggttacaagaggaaaaatctcaaaagcagaacatagatattaacagacaagccaagtttgctgcaaccccttctctggccttgtttgtgaacctcaaaaatgtggtttgtaaaataggagaagatgctgaagtcctcatgtctctatatgaccctgtggagtccaaattcatcagtgagaactacctggttcgctggtccagttcaggattacctaaagacatagacagattacataatttgcgagccgtgtttactgacctcggaagcaaagacctgaaaagggagaaaatcagttttgtctgtcagattgttcgcgtgggtcgcatggagctgagggacaacaacaccaggaaactgacctcggggttgcggcgaccttttggagtggctgtgatggatgtaacagacataataaatggaaaagtagatgatgaagataagcagcatttcattccctttcagccggtggcaggggagaatgacttccttcagactgttataaacaaagtcatcgctgccaaagaagtcaaccacaaggggcagggtttgtgggtaacattgaaattacttcctggagatatccatcagatccgaaaagagtttccgcatttagtggacaggaccacagctgtggctcgaaaaacagggtttccggagataatcatgcctggtgatgttcgaaatgatatctatgtaacattagttcaaggagattttgataaaggaagcaaaacaacagcgaagaacgtggaggtcacggtgtctgtgtacgatgaggatgggaaacgattagagcatgtgattttcccgggtgctggtgatgaagcgatttcagagtacaaatctgtgatttactaccaagtaaagcagccacgctggtttgagactgttaaggtggccattcccatcgaggacgttaaccgcagtcaccttcggtttaccttccgccacaggtcatcacaggactctaaggataaatctgagaaaatatttgcactagcatttgtcaagctgatgagatacgatggtaccaccctgcgagacggagagcacgatcttatcgtctataaggccgaagcgaagaagctggaagatgctgccacgtacttgagtctgccctccacgaaggcagagttggaagaaaagggccactcggccaccggcaagagcatgcagagccttgggagctgcaccattagcaaggactccttccagatctccacgctcgtgtgctccaccaaactgactcagaacgtggaccttctggggctcttgaaatggcgctccaacaccagcctgctgcagcagaacttgaggcagctgatgaaagtcgatggtggtgaagtagtgaagtttcttcaggacacgttggatgccctcttcaacatcatgatggagaactcagagagtgagacttttgacacgttagtctttgatgctctggtatttatcattggactgattgctgatagaaaatttcagcattttaatcctgttttggaaacttacattaagaaacactttagtgcaacgttagcctacacgaagttgacaaaagtgttgaagaactacgtggacggtgctgagaagccgggagtaaatgagcagctgtacaaagccatgaaagcgctagaatccatcttcaagttcatcgtgcgctccaggatcctgttcaatcaactgtatgaaaacaagggagaggctgacttcgtggaatctttgctgcagctcttcaggtccatcaatgacatgatgagcagcatgtcagaccagaccgtccgggtgaagggggcagcactgaaatacttaccaacgatcgtcaacgatgtgaaattggtgtttgatcccaaagagctcagcaaaatgtttactgaattcatcctcaatgttcccatgggcttgctgaccatccagaaactctactgcttgatcgaaatcgtccacagtgacctcttcacacagcatgactgcagagagatcctgcttcccatgatgaccgatcagctcaagtaccatctggagagacaggaggacctggaggcctgctgtcagctgctcagccacatcctggaggtgctgtacaggaaggacgtggggccaacccagaggcacgtccagattatcatggagaaacttctccggaccgtgaaccgaaccgtcatttccatgggacgagattctgaactcattggaaacttcgtggcttgcatgacagctattttacgacaaatggaagattaccattatgcccacttgatcaagacttttgggaaaatgaggactgatgtggtagatttcctaatggaaacattcatcatgtttaagaacctcattggaaagaacgtttaccccttcgactgggtgatcatgaacatggtgcaaaataaagtcttcctgcgagcaattaatcagtatgcagatatgctgaacaaaaaatttctggatcaagccaactttgagctacagctgtggaacaactactttcacctggctgttgctttccttactcaagagtccctgcaactggagaatttttcaagtgccaagagagccaaaatccttaacaagtacggagatatgaggagacagattggctttgaaatcagagacatgtggtacaaccttggtcaacacaagataaagttcattccagaaatggtgggcccaatattagaaatgacattaattcccgagacggagctgcgcaaagccaccatccccatcttctttgatatgatgcagtgtgaattccattcgacccgaagcttccaaatgtttgaaaatgagatcatcaccaagctggatcatgaagtcgaaggaggcagaggagacgaacagtacaaagtgttatttgataaaatccttctggaacactgcaggaagcacaaatacctcgccaaaacaggagaaacttttgtaaaactcgttgtgcgcttaatggaaaggcttttggattatagaaccatcatgcacgacgagaacaaagaaaaccgcatgagctgcaccgtcaatgtgctgaatttctacaaagaaattgaaagagaagaaatgtatataaggtatttgtacaagctctgtgacctgcacaaggagtgtgataactacaccgaagcggcttacaccttgcttctccatgcaaagcttcttaagtggtcggaggatgtgtgtgtggcccacctcacccagcgggacgggtaccaggccaccacgcagggacagctgaaggagcagctctaccaggaaatcatccactacttcgacaaaggcaagatgtgggaggaggccattgccttgggcaaggagctagccgagcagtatgagaacgaaatgtttgattatgagcaactcagcgaattgctgaaaaaacaggctcagttttatgaaaacatcgtcaaagtgatcaggcccaagcctgactattttgctgttggctactacggacaagggttccccacattcctgcggggaaaagttttcatttaccgagggaaagagtatgagcgccgggaagattttgaggctcggctcttaactcagtttccaaacgccgagaaaatgaagacaacatctccaccaggcgacgatattaaaaactctcctggccagtatattcagtgcttcacagtgaagcccaaactcgatctgcctcctaagtttcacaggccagtgtcagagcagattgtaagtttttacagggtgaacgaggtccagcgatttgaatattctcggccaatccggaagggagagaaaaacccagacaatgaatttgcgaatatgtggatcgagagaaccatatatacaactgcatataaattacctggaattttaaggtggtttgaggtcaagtctgttttcatggtggaaatcagccccctggagaatgccatcgagaccatgcagctgacgaacgacaagatcaacagcatggtgcagcagcacctggatgaccccagcctgcccatcaacccgctctccatgctcctgaacggcatcgtggacccagctgtcatggggggcttcgcaaactacgaaaaggccttctttacagaccggtacctgcaggagcaccctgaggcccatgaaaagatcgagaagctcaaggacctgattgcttggcagattccttttctggccgaagggatcagaatccatggagacaaagtcacggaggcactgaggccgttccacgagaggatggaggcctgtttcaaacagctgaaggaaaaggtggagaaagagtacggcgtccgaatcatgccctcaagtctggatgatagaagaggcagccgcccccggtccatggtgcggtccttcacgatgccttcctcatcccgccctctgtctgtggcctctgtctcttccctctcatcggacagcaccccttccagaccaggctccgacgggtttgccctggagcctctcctgccaaagaaaatgcactccaggtcccaggacaagctggacaaggatgacctggagaaggagaagaaggacaagaagaaggaaaaaaggaacagcaaacatcaagagatatttgagaaagaatttaaacccaccgacatttccctgcagcagtctgaggctgtgatcctttcggaaacgataagtcccctgcggccccagagaccgaagagccaggtgatgaacgtcattggaagcgaaaggcgcttctcggtgtccccctcgtcaccgtcctcccagcaaacaccccctccagttacaccaagagccaagctcagcttcagcatgcagtcgagcttggagctgaacggcatgacgggggcggacgtggccgatgtcccaccccctctgcctctcaaaggcagcgtggcagattacgggaatttgatggaaaaccaggacttgctgggctcgccaacacctccacctccccctccacaccagaggcatctgccacctccactgcccagcaaaactccgcctcctccccctccaaagacaactcgcaagcagacatcggtggactctgggatcgtgcagtgacatcgcaaggctctctggaaagagtgtgctgcccctccccatctccatgccctctccttctgtgtcccctgagtctgctgtttacctcattgggcctgtgatgttaacatttcgtgcgactgctttttcttcaaaggagttcagttctcaccatggagtgagtggcctttagcgtcatggagcaaggtgggtctgggaggtagatatgggtccgggatgtgccatcgtagttaccagagttgggggcctctgagtgtgtctggctctgagagagtctgagtcttgcccaaacattctttctttttgtgccaaatgacttgcatttgcaaagagctcaattgctctgagctcagccaagtaggagaggctaggccatcactcttgggaagctgtgtagtgatgatgtataagaatcctcctcactgtcatgggatgttgtatccagcccctccttgttccagccggtggtgtgacttcgttggttgaggtgtgtctccaacctacatcagaccatgaagttcaacccctccagggaagctcctgatttcccctgcataattgaaaataggatatttctcagctattgaacagttactaatttatggggtggaaacagcattaagaatactgaatcaaatggaaaaacaaatgaatacaggaagataagtgttcgttcttttctgaaaaagagtatgtgtaccacaagagctggttttaattgggtgaattgtttttgtcctcattctgtacagaaatttgtatatatgatggttcttagaacttgttttaatttttgtggtccttctgtttattataataggcgtccaccaatgattatccatatgtgttcttaatttttaactgctggaagtgttaaaacacacacacacacacacacacacattttttttttcagaactccaaagtcctgaaaattttggtggacaatgatttttaaaaaactaactttgtataacctaatatttgtattctctcatctatatttttttattcactataatcatgatactcttctaatagacttaaaagttaatcattgacaacgaaaaataaaatgttattttaaaaga

SEQ ID NO: 424888 - DNA, 6666 bp, Homo sapiens
tgggttccctgaaaaatgctggtgacacactgacctcactggttctgccaaccagtgagttctacacatcatgaatgtattgtgaggaccctaacatgtctctttgtactaactgtttcaactttgtgtttgtttagggtggtaccgaggttacacgttacgaaaaaagtctaagaagggtatatttcctgcttcatatattcatcttaaagaagcgatagttgaaggaaaagggcaacatgaaacagtcatcccgggtgacctccccctcatccaggaagtcaccacgacactccgagagtggtccaccatctggaggcagctctacgtgcaagataacagggagatgtttcgaagtgtgcggcacatgatctatgaccttattgaatggcgatcacaaattctttctggaactctgcctcaggatgaactcaaagaactgaagaagaaggtcacagccaaaattgattatggaaacagaattctagatttggacctggtggttagagatgaagatgggaatattttggatccagaattaactagcacgattagtctcttcagagctcatgaaatagcttctaaacaagtggaggaaaggttacaagaggaaaaatctcaaaagcagaacatagatattaacagacaagccaagtttgctgcaaccccttctctggccttgtttgtgaacctcaaaaatgtggtttgtaaaataggagaagatgctgaagtcctcatgtctctatatgaccctgtggagtccaaattcatcagtgagaactacctggttcgctggtccagttcaggattacctaaagacatagacagattacataatttgcgagccgtgtttactgacctcggaagcaaagacctgaaaagggagaaaatcagttttgtctgtcagattgttcgcgtgggtcgcatggagctgagggacaacaacaccaggaaactgacctcggggttgcggcgaccttttggagtggctgtgatggatgtaacagacataataaatggaaaagtagatgatgaagataagcagcatttcattccctttcagccggtggcaggggagaatgacttccttcagactgttataaacaaagtcatcgctgccaaagaagtcaaccacaaggggcagggtttgtgggtaacattgaaattacttcctggagatatccatcagatccgaaaagagtttccgcatttagtggacaggaccacagctgtggctcgaaaaacagggtttccggagataatcatgcctggtgatgttcgaaatgatatctatgtaacattagttcaaggagattttgataaaggaagcaaaacaacagcgaagaacgtggaggtcacggtgtctgtgtacgatgaggatgggaaacgattagagcatgtgattttcccgggtgctggtgatgaagcgatttcagagtacaaatctgtgatttactaccaagtaaagcagccacgctggtttgagactgttaaggtggccattcccatcgaggacgttaaccgcagtcaccttcggtttaccttccgccacaggtcatcacaggactctaaggataaatctgagaaaatatttgcactagcatttgtcaagctgatgagatacgatggtaccaccctgcgagacggagagcacgatcttatcgtctataaggccgaagcgaagaagctggaagatgctgccacgtacttgagtctgccctccacgaaggcagagttggaagaaaagggccactcggccaccggcaagagcatgcagagccttgggagctgcaccattagcaaggactccttccagatctccacgctcgtgtgctccaccaaactgactcagaacgtggaccttctggggctcttgaaatggcgctccaacaccagcctgctgcagcagaacttgaggcagctgatgaaagtcgatggtggtgaagtagtgaagtttcttcaggacacgttggatgccctcttcaacatcatgatggagaactcagagagtgagacttttgacacgttagtctttgatgctctggtatttatcattggactgattgctgatagaaaatttcagcattttaatcctgttttggaaacttacattaagaaacactttagtgcaacgttagcctacacgaagttgacaaaagtgttgaagaactacgtggacggtgctgagaagccgggagtaaatgagcagctgtacaaagccatgaaagcgctagaatccatcttcaagttcatcgtgcgctccaggatcctgttcaatcaactgtatgaaaacaagggagaggctgacttcgtggaatctttgctgcagctcttcaggtccatcaatgacatgatgagcagcatgtcagaccagaccgtccgggtgaagggggcagcactgaaatacttaccaacgatcgtcaacgatgtgaaattggtgtttgatcccaaagagctcagcaaaatgtttactgaattcatcctcaatgttcccatgggcttgctgaccatccagaaactctactgcttgatcgaaatcgtccacagtgacctcttcacacagcatgactgcagagagatcctgcttcccatgatgaccgatcagctcaagtaccatctggagagacaggaggacctggaggcctgctgtcagctgctcagccacatcctggaggtgctgtacaggaaggacgtggggccaacccagaggcacgtccagattatcatggagaaacttctccggaccgtgaaccgaaccgtcatttccatgggacgagattctgaactcattggaaacttcgtggcttgcatgacagctattttacgacaaatggaagattaccattatgcccacttgatcaagacttttgggaaaatgaggactgatgtggtagatttcctaatggaaacattcatcatgtttaagaacctcattggaaagaacgtttaccccttcgactgggtgatcatgaacatggtgcaaaataaagtcttcctgcgagcaattaatcagtatgcagatatgctgaacaaaaaatttctggatcaagccaactttgagctacagctgtggaacaactactttcacctggctgttgctttccttactcaagagtccctgcaactggagaatttttcaagtgccaagagagccaaaatccttaacaagtacggagatatgaggagacagattggctttgaaatcagagacatgtggtacaaccttggtcaacacaagataaagttcattccagaaatggtgggcccaatattagaaatgacattaattcccgagacggagctgcgcaaagccaccatccccatcttctttgatatgatgcagtgtgaattccattcgacccgaagcttccaaatgtttgaaaatgagatcatcaccaagctggatcatgaagtcgaaggaggcagaggagacgaacagtacaaagtgttatttgataaaatccttctggaacactgcaggaagcacaaatacctcgccaaaacaggagaaacttttgtaaaactcgttgtgcgcttaatggaaaggcttttggattatagaaccatcatgcacgacgagaacaaagaaaaccgcatgagctgcaccgtcaatgtgctgaatttctacaaagaaattgaaagagaagaaatgtatataaggtatttgtacaagctctgtgacctgcacaaggagtgtgataactacaccgaagcggcttacaccttgcttctccatgcaaagcttcttaagtggtcggaggatgtgtgtgtggcccacctcacccagcgggacgggtaccaggccaccacgcagggacagctgaaggagcagctctaccaggaaatcatccactacttcgacaaaggcaagatgtgggaggaggccattgccttgggcaaggagctagccgagcagtatgagaacgaaatgtttgattatgagcaactcagcgaattgctgaaaaaacaggctcagttttatgaaaacatcgtcaaagtgatcaggcccaagcctgactattttgctgttggctactacggacaagggttccccacattcctgcggggaaaagttttcatttaccgagggaaagagtatgagcgccgggaagattttgaggctcggctcttaactcagtttccaaacgccgagaaaatgaagacaacatctccaccaggcgacgatattaaaaactctcctggccagtatattcagtgcttcacagtgaagcccaaactcgatctgcctcctaagtttcacaggccagtgtcagagcagattgtaagtttttacagggtgaacgaggtccagcgatttgaatattctcggccaatccggaagggagagaaaaacccagacaatgaatttgcgaatatgtggatcgagagaaccatatatacaactgcatataaattacctggaattttaaggtggtttgaggtcaagtctgttttcatggtggaaatcagccccctggagaatgccatcgagaccatgcagctgacgaacgacaagatcaacagcatggtgcagcagcacctggatgaccccagcctgcccatcaacccgctctccatgctcctgaacggcatcgtggacccagctgtcatggggggcttcgcaaactacgaaaaggccttctttacagaccggtacctgcaggagcaccctgaggcccatgaaaagatcgagaagctcaaggacctgattgcttggcagattccttttctggccgaagggatcagaatccatggagacaaagtcacggaggcactgaggccgttccacgagaggatggaggcctgtttcaaacagctgaaggaaaagccctcaagtctggatgatagaagaggcagccgcccccggtccatggtgcggtccttcacgatgccttcctcatcccgccctctgtctgtggcctctgtctcttccctctcatcggacagcaccccttccagaccaggctccgacgggtttgccctggagcctctcctgccaaagaaaatgcactccaggtcccaggacaagctggacaaggatgacctggagaaggagaagaaggacaagaagaaggaaaaaaggaacagcaaacatcaagagatatttgagaaagaatttaaacccaccgacatttccctgcagcagtctgaggctgtgatcctttcggaaacgataagtcccctgcggccccagagaccgaagagccaggtgatgaacgtcattggaagcgaaaggcgcttctcggtgtccccctcgtcaccgtcctcccagcaaacaccccctccagttacaccaagagccaagctcagcttcagcatgcagtcgagcttggagctgaacggcatgacgggggcggacgtggccgatgtcccaccccctctgcctctcaaaggcagcgtggcagattacgggaatttgatggaaaaccaggacttgctgggctcgccaacacctccacctccccctccacaccagaggcatctgccacctccactgcccagcaaaactccgcctcctccccctccaaagacaactcgcaagcagacatcggtggactctgggatcgtgcagtgacatcgcaaggctctctggaaagagtgtgctgcccctccccatctccatgccctctccttctgtgtcccctgagtctgctgtttacctcattgggcctgtgatgttaacatttcgtgcgactgctttttcttcaaaggagttcagttctcaccatggagtgagtggcctttagcgtcatggagcaaggtgggtctgggaggtagatatgggtccgggatgtgccatcgtagttaccagagttgggggcctctgagtgtgtctggctctgagagagtctgagtcttgcccaaacattctttctttttgtgccaaatgacttgcatttgcaaagagctcaattgctctgagctcagccaagtaggagaggctaggccatcactcttgggaagctgtgtagtgatgatgtataagaatcctcctcactgtcatgggatgttgtatccagcccctccttgttccagccggtggtgtgacttcgttggttgaggtgtgtctccaacctacatcagaccatgaagttcaacccctccagggaagctcctgatttcccctgcataattgaaaataggatatttctcagctattgaacagttactaatttatggggtggaaacagcattaagaatactgaatcaaatggaaaaacaaatgaatacaggaagataagtgttcgttcttttctgaaaaagagtatgtgtaccacaagagctggttttaattgggtgaattgtttttgtcctcattctgtacagaaatttgtatatatgatggttcttagaacttgttttaatttttgtggtccttctgtttattataataggcgtccaccaatgattatccatatgtgttcttaatttttaactgctggaagtgttaaaacacacacacacacacacacacacattttttttttcagaactccaaagtcctgaaaattttggtggacaatgatttttaaaaaactaactttgtataacctaatatttgtattctctcatctatatttttttattcactataatcatgatactcttctaatagacttaaaagttaatcattgacaacgaaaaataaaatgttattttaaaaga

SEQ ID NO: 424889 - DNA, 6642 bp, Homo sapiens
tgggttccctgaaaaatgctggtgacacactgacctcactggttctgccaaccagtgagttctacacatcatgaatgtattgtgaggaccctaacatgtctctttgtactaactgtttcaactttgtgtttgtttagggtggtaccgaggttacacgttacgaaaaaagtctaagaagggtatatttcctgcttcatatattcatcttaaagaagcgatagttgaaggaaaagggcaacatgaaacagtcatcccgggtgacctccccctcatccaggaagtcaccacgacactccgagagtggtccaccatctggaggcagctctacgtgcaagataacagggagatgtttcgaagtgtgcggcacatgatctatgaccttattgaatggcgatcacaaattctttctggaactctgcctcaggatgaactcaaagaactgaagaagaaggtcacagccaaaattgattatggaaacagaattctagatttggacctggtggttagagatgaagatgggaatattttggatccagaattaactagcacgattagtctcttcagagctcatgaaatagcttctaaacaagtggaggaaaggttacaagaggaaaaatctcaaaagcagaacatagatattaacagacaagccaagtttgctgcaaccccttctctggccttgtttgtgaacctcaaaaatgtggtttgtaaaataggagaagatgctgaagtcctcatgtctctatatgaccctgtggagtccaaattcatcagtgagaactacctggttcgctggtccagttcaggattacctaaagacatagacagattacataatttgcgagccgtgtttactgacctcggaagcaaagacctgaaaagggagaaaatcagttttgtctgtcagattgttcgcgtgggtcgcatggagctgagggacaacaacaccaggaaactgacctcggggttgcggcgaccttttggagtggctgtgatggatgtaacagacataataaatggaaaagtagatgatgaagataagcagcatttcattccctttcagccggtggcaggggagaatgacttccttcagactgttataaacaaagtcatcgctgccaaagaagtcaaccacaaggggcagggtttgtgggtaacattgaaattacttcctggagatatccatcagatccgaaaagagtttccgcatttagtggacaggaccacagctgtggctcgaaaaacagggtttccggagataatcatgcctggtgatgttcgaaatgatatctatgtaacattagttcaaggagattttgataaaggaagcaaaacaacagcgaagaacgtggaggtcacggtgtctgtgtacgatgaggatgggaaacgattagagcatgtgattttcccgggtgctggtgatgaagcgatttcagagtacaaatctgtgatttactaccaagtaaagcagccacgctggtttgagactgttaaggtggccattcccatcgaggacgttaaccgcagtcaccttcggtttaccttccgccacaggtcatcacaggactctaaggataaatctgagaaaatatttgcactagcatttgtcaagctgatgagatacgatggtaccaccctgcgagacggagagcacgatcttatcgtctataaggccgaagcgaagaagctggaagatgctgccacgtacttgagtctgccctccacgaaggcagagttggaagaaaagggccactcggccaccggcaagagcatgcagagccttgggagctgcaccattagcaaggactccttccagatctccacgctcgtgtgctccaccaaactgactcagaacgtggaccttctggggctcttgaaatggcgctccaacaccagcctgctgcagcagaacttgaggcagctgatgaaagtcgatggtggtgaagtagtgaagtttcttcaggacacgttggatgccctcttcaacatcatgatggagaactcagagagtgagacttttgacacgttagtctttgatgctctggtatttatcattggactgattgctgatagaaaatttcagcattttaatcctgttttggaaacttacattaagaaacactttagtgcaacgttagcctacacgaagttgacaaaagtgttgaagaactacgtggacggtgctgagaagccgggagtaaatgagcagctgtacaaagccatgaaagcgctagaatccatcttcaagttcatcgtgcgctccaggatcctgttcaatcaactgtatgaaaacaagggagaggctgacttcgtggaatctttgctgcagctcttcaggtccatcaatgacatgatgagcagcatgtcagaccagaccgtccgggtgaagggggcagcactgaaatacttaccaacgatcgtcaacgatgtgaaattggtgtttgatcccaaagagctcagcaaaatgtttactgaattcatcctcaatgttcccatgggcttgctgaccatccagaaactctactgcttgatcgaaatcgtccacagtgacctcttcacacagcatgactgcagagagatcctgcttcccatgatgaccgatcagctcaagtaccatctggagagacaggaggacctggaggcctgctgtcagctgctcagccacatcctggaggtgctgtacaggaaggacgtggggccaacccagaggcacgtccagattatcatggagaaacttctccggaccgtgaaccgaaccgtcatttccatgggacgagattctgaactcattggaaacttcgtggcttgcatgacagctattttacgacaaatggaagattaccattatgcccacttgatcaagacttttgggaaaatgaggactgatgtggtagatttcctaatggaaacattcatcatgtttaagaacctcattggaaagaacgtttaccccttcgactgggtgatcatgaacatggtgcaaaataaagtcttcctgcgagcaattaatcagtatgcagatatgctgaacaaaaaatttctggatcaagccaactttgagctacagctgtggaacaactactttcacctggctgttgctttccttactcaagagtccctgcaactggagaatttttcaagtgccaagagagccaaaatccttaacaagtacggagatatgaggagacagattggctttgaaatcagagacatgtggtacaaccttggtcaacacaagataaagttcattccagaaatggtgggcccaatattagaaatgacattaattcccgagacggagctgcgcaaagccaccatccccatcttctttgatatgatgcagtgtgaattccattcgacccgaagcttccaaatgtttgaaaatgagatcatcaccaagctggatcatgaagtcgaaggaggcagaggagacgaacagtacaaagtgttatttgataaaatccttctggaacactgcaggaagcacaaatacctcgccaaaacaggagaaacttttgtaaaactcgttgtgcgcttaatggaaaggcttttggattatagaaccatcatgcacgacgagaacaaagaaaaccgcatgagctgcaccgtcaatgtgctgaatttctacaaagaaattgaaagagaagaaatgtatataaggtatttgtacaagctctgtgacctgcacaaggagtgtgataactacaccgaagcggcttacaccttgcttctccatgcaaagcttcttaagtggtcggaggatgtgtgtgtggcccacctcacccagcgggacgggtaccaggccaccacgcagggacagctgaaggagcagctctaccaggaaatcatccactacttcgacaaaggcaagatgtgggaggaggccattgccttgggcaaggagctagccgagcagtatgagaacgaaatgtttgattatgagcaactcagcgaattgctgaaaaaacaggctcagttttatgaaaacatcgtcaaagtgatcaggcccaagcctgactattttgctgttggctactacggacaagggttccccacattcctgcggggaaaagttttcatttaccgagggaaagagtatgagcgccgggaagattttgaggctcggctcttaactcagtttccaaacgccgagaaaatgaagacaacatctccaccaggcgacgatattaaaaactctcctggccagtatattcagtgcttcacagtgaagcccaaactcgatctgcctcctaagtttcacaggccagtgtcagagcagattgtaagtttttacagggtgaacgaggtccagcgatttgaatattctcggccaatccggaagggagagaaaaacccagacaatgaatttgcgaatatgtggatcgagagaaccatatatacaactgcatataaattacctggaattttaaggtggtttgaggtcaagtctgttttcatggtggaaatcagccccctggagaatgccatcgagaccatgcagctgacgaacgacaagatcaacagcatggtgcagcagcacctggatgaccccagcctgcccatcaacccgctctccatgctcctgaacggcatcgtggacccagctgtcatggggggcttcgcaaactacgaaaaggccttctttacagaccggtacctgcaggagcaccctgaggcccatgaaaagatcgagaagctcaaggacctgattgcttggcagattccttttctggccgaagggatcagaatccatggagacaaagtcacggaggcactgaggccgttccacgagaggatggaggcctgtttcaaacagctgaaggaaaaggtggagaaagagtacggcgtccgaatcatgccctcaagtctggatgatagaagaggcagccgcccccggtccatggtgcggtccttcacgatgccttcctcatcccgccctctgtctgtggcctctgtctcttccctctcatcggacagcaccccttccagaccaggctccgacgggtttgccctggagcctctcctgccaaagaaaatgcactccaggtcccaggacaagctggacaaggatgacctggagaaggagaagaaggacaagaagaaggaaaaaaggaacagcaaacatcaagagatatttgagaaagaatttaaacccaccgacatttccctgcagcagtctgaggctgtgatcctttcggaaacgataagtcccctgcggccccagagaccgaagagccaggtgatgaacgtcattggaagcgaaaggcgcttctcggtgtccccctcgtcaccgtcctcccagcaaacaccccctccagttacaccaagagccaagctcagcttcagcatgcagtcgagcttggagctgaacggcatgacgggggcggacgtggccgatgtcccaccccctctgcctctcaaaggcagcgtggcagattacgggaatttgatggaaaaccaggacttgctgggctcgccaacacctccacctccccctccacaccagaggcatctgccacctccactgcccagctctgggatcgtgcagtgacatcgcaaggctctctggaaagagtgtgctgcccctccccatctccatgccctctccttctgtgtcccctgagtctgctgtttacctcattgggcctgtgatgttaacatttcgtgcgactgctttttcttcaaaggagttcagttctcaccatggagtgagtggcctttagcgtcatggagcaaggtgggtctgggaggtagatatgggtccgggatgtgccatcgtagttaccagagttgggggcctctgagtgtgtctggctctgagagagtctgagtcttgcccaaacattctttctttttgtgccaaatgacttgcatttgcaaagagctcaattgctctgagctcagccaagtaggagaggctaggccatcactcttgggaagctgtgtagtgatgatgtataagaatcctcctcactgtcatgggatgttgtatccagcccctccttgttccagccggtggtgtgacttcgttggttgaggtgtgtctccaacctacatcagaccatgaagttcaacccctccagggaagctcctgatttcccctgcataattgaaaataggatatttctcagctattgaacagttactaatttatggggtggaaacagcattaagaatactgaatcaaatggaaaaacaaatgaatacaggaagataagtgttcgttcttttctgaaaaagagtatgtgtaccacaagagctggttttaattgggtgaattgtttttgtcctcattctgtacagaaatttgtatatatgatggttcttagaacttgttttaatttttgtggtccttctgtttattataataggcgtccaccaatgattatccatatgtgttcttaatttttaactgctggaagtgttaaaacacacacacacacacacacacacattttttttttcagaactccaaagtcctgaaaattttggtggacaatgatttttaaaaaactaactttgtataacctaatatttgtattctctcatctatatttttttattcactataatcatgatactcttctaatagacttaaaagttaatcattgacaacgaaaaataaaatgttattttaaaaga

SEQ ID NO: 424890 - DNA, 1176 bp, Homo sapiens
tcatagccgactcctgagggtaaaccgaatgctcggacccaccctagcatgcagacagcgttgttcttctgggatcgtgcagtgacatcgcaaggctctctggaaagagtgtgctgcccctccccatctccatgccctctccttctgtgtcccctgagtctgctgtttacctcattgggcctgtgatgttaacatttcgtgcgactgctttttcttcaaaggagttcagttctcaccatggagtgagtggcctttagcgtcatggagcaaggtgggtctgggaggtagatatgggtccgggatgtgccatcgtagttaccagagttgggggcctctgagtgtgtctggctctgagagagtctgagtcttgcccaaacattctttctttttgtgccaaatgacttgcatttgcaaagagctcaattgctctgagctcagccaagtaggagaggctaggccatcactcttgggaagctgtgtagtgatgatgtataagaatcctcctcactgtcatgggatgttgtatccagcccctccttgttccagccggtggtgtgacttcgttggttgaggtgtgtctccaacctacatcagaccatgaagttcaacccctccagggaagctcctgatttcccctgcataattgaaaataggatatttctcagctattgaacagttactaatttatggggtggaaacagcattaagaatactgaatcaaatggaaaaacaaatgaatacaggaagataagtgttcgttcttttctgaaaaagagtatgtgtaccacaagagctggttttaattgggtgaattgtttttgtcctcattctgtacagaaatttgtatatatgatggttcttagaacttgttttaatttttgtggtccttctgtttattataataggcgtccaccaatgattatccatatgtgttcttaatttttaactgctggaagtgttaaaacacacacacacacacacacacacattttttttttcagaactccaaagtcctgaaaattttggtggacaatgatttttaaaaaactaactttgtataacctaatatttgtattctctcatctatatttttttattcactataatcatgatactcttctaatagacttaaaagttaatcattgacaacgaaaaataaaatgttattttaaaaga

SEQ ID NO: 424891 - DNA, 5976 bp, Homo sapiens
tgggttccctgaaaaatgctggtgacacactgacctcactggttctgccaaccagtgagttctacacatcatgaatgtattgtgaggaccctaacatgtctctttgtactaactgtttcaactttgtgtttgtttagggtggtaccgaggttacacgttacgaaaaaagtctaagaagggtatatttcctgcttcatatattcatcttaaagaagcgatagttgaaggaaaagggcaacatgaaacagtcatcccgggtgacctccccctcatccaggaagtcaccacgacactccgagagtggtccaccatctggaggcagctctacgtgcaagataacagggagatgtttcgaagtgtgcggcacatgatctatgaccttattgaatggcgatcacaaattctttctggaactctgcctcaggatgaactcaaagaactgaagaagaaggtcacagccaaaattgattatggaaacagaattctagatttggacctggtggttagagatgaagatgggaatattttggatccagaattaactagcacgattagtctcttcagagctcatgaaatagcttctaaacaagtggaggaaaggttacaagaggaaaaatctcaaaagcagaacatagatattaacagacaagccaagtttgctgcaaccccttctctggccttgtttgtgaacctcaaaaatgtggtttgtaaaataggagaagatgctgaagtcctcatgtctctatatgaccctgtggagtccaaattcatcagtgagaactacctggttcgctggtccagttcaggattacctaaagacatagacagattacataatttgcgagccgtgtttactgacctcggaagcaaagacctgaaaagggagaaaatcagttttgtctgtcagattgttcgcgtgggtcgcatggagctgagggacaacaacaccaggaaactgacctcggggttgcggcgaccttttggagtggctgtgatggatgtaacagacataataaatggaaaagtagatgatgaagataagcagcatttcattccctttcagccggtggcaggggagaatgacttccttcagactgttataaacaaagtcatcgctgccaaagaagtcaaccacaaggggcagggtttgtgggtaacattgaaattacttcctggagatatccatcagatccgaaaagagtttccgcatttagtggacaggaccacagctgtggctcgaaaaacagggtttccggagataatcatgcctggtgatgttcgaaatgatatctatgtaacattagttcaaggagattttgataaaggaagcaaaacaacagcgaagaacgtggaggtcacggtgtctgtgtacgatgaggatgggaaacgattagagcatgtgattttcccgggtgctggtgatgaagcgatttcagagtacaaatctgtgatttactaccaagtaaagcagccacgctggtttgagactgttaaggtggccattcccatcgaggacgttaaccgcagtcaccttcggtttaccttccgccacaggtcatcacaggactctaaggataaatctgagaaaatatttgcactagcatttgtcaagctgatgagatacgatggtaccaccctgcgagacggagagcacgatcttatcgtctataaggccgaagcgaagaagctggaagatgctgccacgtacttgagtctgccctccacgaaggcagagttggaagaaaagggccactcggccaccggcaagagcatgcagagccttgggagctgcaccattagcaaggactccttccagatctccacgctcgtgtgctccaccaaactgactcagaacgtggaccttctggggctcttgaaatggcgctccaacaccagcctgctgcagcagaacttgaggcagctgatgaaagtcgatggtggtgaagtagtgaagtttcttcaggacacgttggatgccctcttcaacatcatgatggagaactcagagagtgagacttttgacacgttagtctttgatgctctggtatttatcattggactgattgctgatagaaaatttcagcattttaatcctgttttggaaacttacattaagaaacactttagtgcaacgttagcctacacgaagttgacaaaagtgttgaagaactacgtggacggtgctgagaagccgggagtaaatgagcagctgtacaaagccatgaaagcgctagaatccatcttcaagttcatcgtgcgctccaggatcctgttcaatcaactgtatgaaaacaagggagaggctgacttcgtggaatctttgctgcagctcttcaggtccatcaatgacatgatgagcagcatgtcagaccagaccgtccgggtgaagggggcagcactgaaatacttaccaacgatcgtcaacgatgtgaaattggtgtttgatcccaaagagctcagcaaaatgtttactgaattcatcctcaatgttcccatgggcttgctgaccatccagaaactctactgcttgatcgaaatcgtccacagtgacctcttcacacagcatgactgcagagagatcctgcttcccatgatgaccgatcagctcaagtaccatctggagagacaggaggacctggaggcctgctgtcagctgctcagccacatcctggaggtgctgtacaggaaggacgtggggccaacccagaggcacgtccagattatcatggagaaacttctccggaccgtgaaccgaaccgtcatttccatgggacgagattctgaactcattggaaacttcgtggcttgcatgacagctattttacgacaaatggaagattaccattatgcccacttgatcaagacttttgggaaaatgaggactgatgtggtagatttcctaatggaaacattcatcatgtttaagaacctcattggaaagaacgtttaccccttcgactgggtgatcatgaacatggtgcaaaataaagtcttcctgcgagcaattaatcagtatgcagatatgctgaacaaaaaatttctggatcaagccaactttgagctacagctgtggaacaactactttcacctggctgttgctttccttactcaagagtccctgcaactggagaatttttcaagtgccaagagagccaaaatccttaacaagtacggagatatgaggagacagattggctttgaaatcagagacatgtggtacaaccttggtcaacacaagataaagttcattccagaaatggtgggcccaatattagaaatgacattaattcccgagacggagctgcgcaaagccaccatccccatcttctttgatatgatgcagtgtgaattccattcgacccgaagcttccaaatgtttgaaaatgagatcatcaccaagctggatcatgaagtcgaaggaggcagaggagacgaacagtacaaagtgttatttgataaaatccttctggaacactgcaggaagcacaaatacctcgccaaaacaggagaaacttttgtaaaactcgttgtgcgcttaatggaaaggcttttggattatagaaccatcatgcacgacgagaacaaagaaaaccgcatgagctgcaccgtcaatgtgctgaatttctacaaagaaattgaaagagaagaaatgtatataaggtatttgtacaagctctgtgacctgcacaaggagtgtgataactacaccgaagcggcttacaccttgcttctccatgcaaagcttcttaagtggtcggaggatgtgtgtgtggcccacctcacccagcgggacgggtaccaggccaccacgcagggacagctgaaggagcagctctaccaggaaatcatccactacttcgacaaaggcaagatgtgggaggaggccattgccttgggcaaggagctagccgagcagtatgagaacgaaatgtttgattatgagcaactcagcgaattgctgaaaaaacaggctcagttttatgaaaacatcgtcaaagtgatcaggcccaagcctgactattttgctgttggctactacggacaagggttccccacattcctgcggggaaaagttttcatttaccgagggaaagagtatgagcgccgggaagattttgaggctcggctcttaactcagtttccaaacgccgagaaaatgaagacaacatctccaccaggcgacgatattaaaaactctcctggccagtatattcagtgcttcacagtgaagcccaaactcgatctgcctcctaagtttcacaggccagtgtcagagcagattgtaagtttttacagggtgaacgaggtccagcgatttgaatattctcggccaatccggaagggagagaaaaacccagacaatgaatttgcgaatatgtggatcgagagaaccatatatacaactgcatataaattacctggaattttaaggtggtttgaggtcaagtctgttttcatggtggaaatcagccccctggagaatgccatcgagaccatgcagctgacgaacgacaagatcaacagcatggtgcagcagcacctggatgaccccagcctgcccatcaacccgctctccatgctcctgaacggcatcgtggacccagctgtcatggggggcttcgcaaactacgaaaaggccttctttacagaccggtacctgcaggagcaccctgaggcccatgaaaagatcgagaagctcaaggacctgattgcttggcagattccttttctggccgaagggatcagaatccatggagacaaagtcacggaggcactgaggccgttccacgagaggatggaggcctgtttcaaacagctgaaggaaaaggtggagaaagagtacggcgtccgaatcatgccctcaagtctggatgatagaagaggcagccgcccccggtccatggtgcggtccttcacgatgccttcctcatcccgccctctgtctgtggcctctgtctcttccctctcatcggacagcaccccttccagaccaggctccgacgggtttgccctggagcctctcctgccaaagaaaatgcactccaggtcccaggacaagctggacaaggatgacctggagaaggagaagaaggacaagaagaaggaaaaaaggaacagcaaacatcaagagatatttgagaaagaatttaaacccaccgacatttccctgcagcagtctgaggctgtgatcctttcggaaacgataagtcccctgcggccccagagaccgaagagccaggtgatgaacgtcattggaagcgaaaggcgcttctcggtgtccccctcgtcaccgtcctcccagcaaacaccccctccagttacaccaagagccaagctcagcttcagcatgcagtcgagcttggagctgaacggcatgacgggggcggacgtggccgatgtcccaccccctctgcctctcaaaggcagcgtggcagattacgggaatttgatggaaaaccaggacttgctgggctcgccaacacctccacctccccctccacaccagaggcatctgccacctccactgcccagcaaaactccgcctcctccccctccaaagacaactcgcaagcagacatcggtggactctgggatcgtgcagtgacatcgcaaggctctctggaaagagtgtgctgcccctccccatctccatgccctctccttctgtgtcccctgagtctgctgtttacctcattgggcctgtgatgttaacatttcgtgcgactgctttttcttcaaaggagttcagttctcaccatggagtgagtggcctttagcgtcatggagcaaggtgggtctgggaggtagatatgggtccgggatgtgccatcgtagttaccagagttgggggcctctgagtgtgtctggctctgagagagtctgagtcttgcccaaacattctttcttatgttttagattgtgtgtccccacccaccccaaccagtcctgatttccacctgccaaggactcctctag

SEQ ID NO: 424892 - DNA, 4819 bp, Homo sapiens
tgggttccctgaaaaatgctggtgacacactgacctcactggttctgccaaccagtgagttctacacatcatgaatgtattgtgaggaccctaacatgtctctttgtactaactgtttcaactttgtgtttgtttagggtggtaccgaggttacacgttacgaaaaaagtctaagaagggtatatttcctgcttcatatattcatcttaaagaagcgatagttgaaggaaaagggcaacatgaaacagtcatcccgggtgacctccccctcatccaggaagtcaccacgacactccgagagtggtccaccatctggaggcagctctacgtgcaagataacagggagatgtttcgaagtgtgcggcacatgatctatgaccttattgaatggcgatcacaaattctttctggaactctgcctcaggatgaactcaaagaactgaagaagaaggtcacagccaaaattgattatggaaacagaattctagatttggacctggtggttagagatgaagatgggaatattttggatccagaattaactagcacgattagtctcttcagagctcatgaaatagcttctaaacaagtggaggaaaggttacaagaggaaaaatctcaaaagcagaacatagatattaacagacaagccaagtttgctgcaaccccttctctggccttgtttgtgaacctcaaaaatgtggtttgtaaaataggagaagatgctgaagtcctcatgtctctatatgaccctgtggagtccaaattcatcagtgagaactacctggttcgctggtccagttcaggattacctaaagacatagacagattacataatttgcgagccgtgtttactgacctcggaagcaaagacctgaaaagggagaaaatcagttttgtctgtcagattgttcgcgtgggtcgcatggagctgagggacaacaacaccaggaaactgacctcggggttgcggcgaccttttggagtggctgtgatggatgtaacagacataataaatggaaaagtagatgatgaagataagcagcatttcattccctttcagccggtggcaggggagaatgacttccttcagactgttataaacaaagtcatcgctgccaaagaagtcaaccacaaggggcagggtttgtgggtaacattgaaattacttcctggagatatccatcagatccgaaaagagtttccgcatttagtggacaggaccacagctgtggctcgaaaaacagggtttccggagataatcatgcctggtgatgttcgaaatgatatctatgtaacattagttcaaggagattttgataaaggaagcaaaacaacagcgaagaacgtggaggtcacggtgtctgtgtacgatgaggatgggaaacgattagagcatgtgattttcccgggtgctggtgatgaagcgatttcagagtacaaatctgtgatttactaccaagtaaagcagccacgctggtttgagactgttaaggtggccattcccatcgaggacgttaaccgcagtcaccttcggtttaccttccgccacaggtcatcacaggactctaaggataaatctgagaaaatatttgcactagcatttgtcaagctgatgagatacgatggtaccaccctgcgagacggagagcacgatcttatcgtctataaggccgaagcgaagaagctggaagatgctgccacgtacttgagtctgccctccacgaaggcagagttggaagaaaagggccactcggccaccggcaagagcatgcagagccttgggagctgcaccattagcaaggactccttccagatctccacgctcgtgtgctccaccaaactgactcagaacgtggaccttctggggctcttgaaatggcgctccaacaccagcctgctgcagcagaacttgaggcagctgatgaaagtcgatggtggtgaagtagtgaagtttcttcaggacacgttggatgccctcttcaacatcatgatggagaactcagagagtgagacttttgacacgttagtctttgatgctctggtatttatcattggactgattgctgatagaaaatttcagcattttaatcctgttttggaaacttacattaagaaacactttagtgcaacgttagcctacacgaagttgacaaaagtgttgaagaactacgtggacggtgctgagaagccgggagtaaatgagcagctgtacaaagccatgaaagcgctagaatccatcttcaagttcatcgtgcgctccaggatcctgttcaatcaactgtatgaaaacaagggagaggctgacttcgtggaatctttgctgcagctcttcaggtccatcaatgacatgatgagcagcatgtcagaccagaccgtccgggtgaagggggcagcactgaaatacttaccaacgatcgtcaacgatgtgaaattggtgtttgatcccaaagagctcagcaaaatgtttactgaattcatcctcaatgttcccatgggcttgctgaccatccagaaactctactgcttgatcgaaatcgtccacagtgacctcttcacacagcatgactgcagagagatcctgcttcccatgatgaccgatcagctcaagtaccatctggagagacaggaggacctggaggcctgctgtcagctgctcagccacatcctggaggtgctgtacaggaaggacgtggggccaacccagaggcacgtccagattatcatggagaaacttctccggaccgtgaaccgaaccgtcatttccatgggacgagattctgaactcattggaaacttcgtggcttgcatgacagctattttacgacaaatggaagattaccattatgcccacttgatcaagacttttgggaaaatgaggactgatgtggtagatttcctaatggaaacattcatcatgtttaagaacctcattggaaagaacgtttaccccttcgactgggtgatcatgaacatggtgcaaaataaagtcttcctgcgagcaattaatcagtatgcagatatgctgaacaaaaaatttctggatcaagccaactttgagctacagctgtggaacaactactttcacctggctgttgctttccttactcaagagtccctgcaactggagaatttttcaagtgccaagagagccaaaatccttaacaagtacggagatatgaggagacagattggctttgaaatcagagacatgtggtacaaccttggtcaacacaagataaagttcattccagaaatggtgggcccaatattagaaatgacattaattcccgagacggagctgcgcaaagccaccatccccatcttctttgatatgatgcagtgtgaattccattcgacccgaagcttccaaatgtttgaaaatgagatcatcaccaagctggatcatgaagtcgaaggaggcagaggagacgaacagtacaaagtgttatttgataaaatccttctggaacactgcaggaagcacaaatacctcgccaaaacaggagaaacttttgtaaaactcgttgtgcgcttaatggaaaggcttttggattatagaaccatcatgcacgacgagaacaaagaaaaccgcatgagctgcaccgtcaatgtgctgaatttctacaaagaaattgaaagagaagaaatgtatataaggtatttgtacaagctctgtgacctgcacaaggagtgtgataactacaccgaagcggcttacaccttgcttctccatgcaaagcttcttaagtggtcggaggatgtgtgtgtggcccacctcacccagcgggacgggtaccaggccaccacgcagggacagctgaaggagcagctctaccaggaaatcatccactacttcgacaaaggcaagatgtgggaggaggccattgccttgggcaaggagctagccgagcagtatgagaacgaaatgtttgattatgagcaactcagcgaattgctgaaaaaacaggctcagttttatgaaaacatcgtcaaagtgatcaggcccaagcctgactattttgctgttggctactacggacaagggttccccacattcctgcggggaaaagttttcatttaccgagggaaagagtatgagcgccgggaagattttgaggctcggctcttaactcagtttccaaacgccgagaaaatgaagacaacatctccaccaggcgacgatattaaaaactctcctggccagtatattcagtgcttcacagtgaagcccaaactcgatctgcctcctaagtttcacaggccagtgtcagagcagattgtaagtttttacagggtgaacgaggtccagcgatttgaatattctcggccaatccggaagggagagaaaaacccagacaatgaatttgcgaatatgtggatcgagagaaccatatatacaactgcatataaattacctggaattttaaggtggtttgaggtcaagtctgttttcatggtaaggatggccccaccccagaaggaattgtccgttcccttcctcaatacagtctgccacgccttcttcacctgctcatgccccgtggtcactgtggcagcgtgcacacagcagactctacagttcccgtaaccaccccacctgttcttgagagcatcgatatctcctcgcctagccatattttagtggaaatgctgtgtaatcacgaccaactctagcttatcaaaaaaccagaatgaagatttcatttcttcttacaatgtatttaaattcagtcatagctgtgctgttttgacaatgctttgtgttaaccaagtgaaaagttgaagacaaattccagtctacataaacttttttaaa

SEQ ID NO: 424893 - DNA, 3604 bp, Homo sapiens
tgggttccctgaaaaatgctggtgacacactgacctcactggttctgccaaccagtgagttctacacatcatgaatgtattgtgaggaccctaacatgtctctttgtactaactgtttcaactttgtgtttgtttagggtggtaccgaggttacacgttacgaaaaaagtctaagaagggtatatttcctgcttcatatattcatcttaaagaagcgatagttgaaggaaaagggcaacatgaaacagtcatcccgggtgacctccccctcatccaggaagtcaccacgacactccgagagtggtccaccatctggaggcagctctacgtgcaagataacagggagatgtttcgaagtgtgcggcacatgatctatgaccttattgaatggcgatcacaaattctttctggaactctgcctcaggatgaactcaaagaactgaagaagaaggtcacagccaaaattgattatggaaacagaattctagatttggacctggtggttagagatgaagatgggaatattttggatccagaattaactagcacgattagtctcttcagagctcatgaaatagcttctaaacaagtggaggaaaggttacaagaggaaaaatctcaaaagcagaacatagatattaacagacaagccaagtttgctgcaaccccttctctggccttgtttgtgaacctcaaaaatgtggtttgtaaaataggagaagatgctgaagtcctcatgtctctatatgaccctgtggagtccaaattcatcagtgagaactacctggttcgctggtccagttcaggattacctaaagacatagacagattacataatttgcgagccgtgtttactgacctcggaagcaaagacctgaaaagggagaaaatcagttttgtctgtcagattgttcgcgtgggtcgcatggagctgagggacaacaacaccaggaaactgacctcggggttgcggcgaccttttggagtggctgtgatggatgtaacagacataataaatggaaaagtagatgatgaagataagcagcatttcattccctttcagccggtggcaggggagaatgacttccttcagactgttataaacaaagtcatcgctgccaaagaagtcaaccacaaggggcagggtttgtgggtaacattgaaattacttcctggagatatccatcagatccgaaaagagtttccgcatttagtggacaggaccacagctgtggctcgaaaaacagggtttccggagataatcatgcctggtgatgttcgaaatgatatctatgtaacattagttcaaggagattttgataaaggaagcaaaacaacagcgaagaacgtggaggtcacggtgtctgtgtacgatgaggatgggaaacgattagagcatgtgattttcccgggtgctggtgatgaagcgatttcagagtacaaatctgtgatttactaccaagtaaagcagccacgctggtttgagactgttaaggtggccattcccatcgaggacgttaaccgcagtcaccttcggtttaccttccgccacaggtcatcacaggactctaaggataaatctgagaaaatatttgcactagcatttgtcaagctgatgagatacgatggtaccaccctgcgagacggagagcacgatcttatcgtctataaggccgaagcgaagaagctggaagatgctgccacgtacttgagtctgccctccacgaaggcagagttggaagaaaagggccactcggccaccggcaagagcatgcagagccttgggagctgcaccattagcaaggactccttccagatctccacgctcgtgtgctccaccaaactgactcagaacgtggaccttctggggctcttgaaatggcgctccaacaccagcctgctgcagcagaacttgaggcagctgatgaaagtcgatggtggtgaagtagtgaagtttcttcaggacacgttggatgccctcttcaacatcatgatggagaactcagagagtgagacttttgacacgttagtctttgatgctctggtatttatcattggactgattgctgatagaaaatttcagcattttaatcctgttttggaaacttacattaagaaacactttagtgcaacgttagcctacacgaagttgacaaaagtgttgaagaactacgtggacggtgctgagaagccgggagtaaatgagcagctgtacaaagccatgaaagcgctagaatccatcttcaagttcatcgtgcgctccaggatcctgttcaatcaactgtatgaaaacaagggagaggctgacttcgtggaatctttgctgcagctcttcaggtccatcaatgacatgatgagcagcatgtcagaccagaccgtccgggtgaagggggcagcactgaaatacttaccaacgatcgtcaacgatgtgaaattggtgtttgatcccaaagagctcagcaaaatgtttactgaattcatcctcaatgttcccatgggcttgctgaccatccagaaactctactgcttgatcgaaatcgtccacagtgacctcttcacacagcatgactgcagagagatcctgcttcccatgatgaccgatcagctcaagtaccatctggagagacaggaggacctggaggcctgctgtcagctgctcagccacatcctggaggtgctgtacaggaaggacgtggggccaacccagaggcacgtccagattatcatggagaaacttctccggaccgtgaaccgaaccgtcatttccatgggacgagattctgaactcattggaaacttcgtggcttgcatgacagctattttacgacaaatggaagattaccattatgcccacttgatcaagacttttgggaaaatgaggactgatgtggtagatttcctaatggaaacattcatcatgtttaagaacctcattggaaagaacgtttaccccttcgactgggtgatcatgaacatggtgcaaaataaagtcttcctgcgagcaattaatcagtatgcagatatgctgaacaaaaaatttctggatcaagccaactttgagctacagctgtggaacaactactttcacctggctgttgctttccttactcaagagtccctgcaactggagaatttttcaagtgccaagagagccaaaatccttaacaagagctttgaatggactgaagcggcaccttctatcattgtaaataaacctctccaaagctccatgaaagccgagatccttgccggcccctccagctctgtaaccccagtttgcatcatgcaccgctcatgactcagtatcaagaagcaccattgttgcatgggtttccttcccctgtttggacacccggagggtcttgcttcgtctctttctgcctccgtttcactaatttctcactgctgtcggtgttcctttcataagtccttttgagaagagttctgaaattgcattggtgttgccacgtcatcagtctctgtttgtcattttataaatacctctgcaatatctcgactgttctaaggcttggccaactccatgctgctagctgaggttagagattccagaaagagtttcagaaggtggcagctgctcttatat

SEQ ID NO: 424894 - DNA, 3174 bp, Homo sapiens
tgggttccctgaaaaatgctggtgacacactgacctcactggttctgccaaccagtgagttctacacatcatgaatgtattgtgaggaccctaacatgtctctttgtactaactgtttcaactttgtgtttgtttagggtggtaccgaggttacacgttacgaaaaaagtctaagaagggtatatttcctgcttcatatattcatcttaaagaagcgatagttgaaggaaaagggcaacatgaaacagtcatcccgggtgacctccccctcatccaggaagtcaccacgacactccgagagtggtccaccatctggaggcagctctacgtgcaagataacagggagatgtttcgaagtgtgcggcacatgatctatgaccttattgaatggcgatcacaaattctttctggaactctgcctcaggatgaactcaaagaactgaagaagaaggtcacagccaaaattgattatggaaacagaattctagatttggacctggtggttagagatgaagatgggaatattttggatccagaattaactagcacgattagtctcttcagagctcatgaaatagcttctaaacaagtggaggaaaggttacaagaggaaaaatctcaaaagcagaacatagatattaacagacaagccaagtttgctgcaaccccttctctggccttgtttgtgaacctcaaaaatgtggtttgtaaaataggagaagatgctgaagtcctcatgtctctatatgaccctgtggagtccaaattcatcagtgagaactacctggttcgctggtccagttcaggattacctaaagacatagacagattacataatttgcgagccgtgtttactgacctcggaagcaaagacctgaaaagggagaaaatcagttttgtctgtcagattgttcgcgtgggtcgcatggagctgagggacaacaacaccaggaaactgacctcggggttgcggcgaccttttggagtggctgtgatggatgtaacagacataataaatggaaaagtagatgatgaagataagcagcatttcattccctttcagccggtggcaggggagaatgacttccttcagactgttataaacaaagtcatcgctgccaaagaagtcaaccacaaggggcagggtttgtgggtaacattgaaattacttcctggagatatccatcagatccgaaaagagtttccgcatttagtggacaggaccacagctgtggctcgaaaaacagggtttccggagataatcatgcctggtgatgttcgaaatgatatctatgtaacattagttcaaggagattttgataaaggaagcaaaacaacagcgaagaacgtggaggtcacggtgtctgtgtacgatgaggatgggaaacgattagagcatgtgattttcccgggtgctggtgatgaagcgatttcagagtacaaatctgtgatttactaccaagtaaagcagccacgctggtttgagactgttaaggtggccattcccatcgaggacgttaaccgcagtcaccttcggtttaccttccgccacaggtcatcacaggactctaaggataaatctgagaaaatatttgcactagcatttgtcaagctgatgagatacgatggtaccaccctgcgagacggagagcacgatcttatcgtctataaggccgaagcgaagaagctggaagatgctgccacgtacttgagtctgccctccacgaaggcagagttggaagaaaagggccactcggccaccggcaagagcatgcagagccttgggagctgcaccattagcaaggactccttccagatctccacgctcgtgtgctccaccaaactgactcagaacgtggaccttctggggctcttgaaatggcgctccaacaccagcctgctgcagcagaacttgaggcagctgatgaaagtcgatggtggtgaagtagtgaagtttcttcaggacacgttggatgccctcttcaacatcatgatggagaactcagagagtgagacttttgacacgttagtctttgatgctctggtatttatcattggactgattgctgatagaaaatttcagcattttaatcctgttttggaaacttacattaagaaacactttagtgcaacgttagcctacacgaagttgacaaaagtgttgaagaactacgtggacggtgctgagaagccgggagtaaatgagcagctgtacaaagccatgaaagcgctagaatccatcttcaagttcatcgtgcgctccaggatcctgttcaatcaactgtatgaaaacaagggagaggctgacttcgtggaatctttgctgcagctcttcaggtccatcaatgacatgatgagcagcatgtcagaccagaccgtccgggtgaagggggcagcactgaaatacttaccaacgatcgtcaacgatgtgaaattggtgtttgatcccaaagagctcagcaaaatgtttactgaattcatcctcaatgttcccatgggcttgctgaccatccagaaactctactgcttgatcgaaatcgtccacagtgacctcttcacacagcatgactgcagagagatcctgcttcccatgatgaccgatcagctcaagtaccatctggagagacaggaggacctggaggcctgctgtcagctgctcagccacatcctggaggtgctgtacaggaaggacgtggggccaacccagaggcacgtccagattatcatggagaaacttctccggaccgtgaaccgaaccgtcatttccatgggacgagattctgaactcattggaaacttcgtggcttgcatgacagctattttacgacaaatggaagattaccattatgcccacttgatcaagacttttgggaaaatgaggactgatgtggtagatttcctaatggaaacattcatcatgtttaagaacctcattggaaagaacgtttaccccttcgactgggtgatcatgaacatggtgcaaaataaccaactgcatgacatcagttccatcacaactgcaggagaatggaggaaggctgctgtgcacgattacttgctgttttgtggtcaacctttcccataagacttcagagaaggtttttacttaatactgtacctgtcaaattcccagagctgcaagtaaattgaagatacaaattatgttgtaaagtg

SEQ ID NO: 424895 - DNA, 1042 bp, Homo sapiens
tgggttccctgaaaaatgctggtgacacactgacctcactggttctgccaaccagtgagttctacacatcatgaatgtattgtgaggaccctaacatgtctctttgtactaactgtttcaactttgtgtttgtttagggtggtaccgaggttacacgttacgaaaaaagtctaagaagggtatatttcctgcttcatatattcatcttaaagaagcgatagttgaaggaaaagggcaacatgaaacagtcatcccgggtgacctccccctcatccaggaagtcaccacgacactccgagagtggtccaccatctggaggcagctctacgtgcaagataacagggagatgtttcgaagtgtgcggcacatgatctatgaccttattgaatggcgatcacaaattctttctggaactctgcctcaggatgaactcaaagaactgaagaagaaggtcacagccaaaattgattatggaaacagaattctagatttggacctggtggttagagatgaagatgggaatattttggatccagaattaactagcacgattagtctcttcagagctcatgaaatagcttctaaacaagtggaggaaaggttacaagaggaaaaatctcaaaagcagaacatagatattaacagacaagccaagtttgctgcaaccccttctctggccttgtttgtgaacctcaaaaatgtggtttgtaaaataggagaagatgctgaagtcctcatgtctctatatgaccctgtggagtccaaattcatcagtgagaactacctggttcgctggtccagttcaggattacctaaagacatagacagattacataatttgcgagccgtgtttactgacctcggaagcaaagacctgaaaagggagaaaatcagttttgtctgtcagattgttcgcgtgggtcgcatggagctgagggacaacaacaccaggaaactgacctcggggttgcggcgaccttttggagtggctgtgatggatgtaacagacataataaatttagggttgatggtcctcgagaca

SEQ ID NO: 424896 - DNA, 757 bp, Homo sapiens
tgggttccctgaaaaatgctggtgacacactgacctcactggttctgccaaccagtgagttctacacatcatgaatgtattgtgaggaccctaacatgtctctttgtactaactgtttcaactttgtgtttgtttagggtggtaccgaggttacacgttacgaaaaaagtctaagaagggtatatttcctgcttcatatattcatcttaaagaagcgatagttgaaggaaaagggcaacatgaaacagtcatcccgggtgacctccccctcatccaggaagtcaccacgacactccgagagtggtccaccatctggaggcagctctacgtgcaagataacagggagatgtttcgaagtgtgcggcacatgatctatgaccttattgaatggcgatcacaaattctttctggaactctgcctcaggatgaactcaaagaactgaagaagaaggtcacagccaaaattgattatggaaacagaattctagatttggacctggtggttagagatgaagatgggaatattttggatccagaattaactagcacgattagtctcttcagagctcatgaaatagcttctaaacaagtggaggaaaggttacaagaggaaaaatctcaaaagcagaacatagatattaacagacaagccaagtttgctgcaaccccttctctggccttgtttgtgaacctcaaaaatgtggtttgtaaaataggagaagaaacgcaactacctgagaagaaacgcaactacctg

SEQ ID NO: 424897 - DNA, 487 bp, Homo sapiens
aacccgtgttgtgtgtgtgtgtttcctttgcagaatatgtggatcgagagaaccatatatacaactgcatataaattacctggaattttaaggtggtttgaggtcaagtctgttttcatggtaaggatggccccaccccagaaggaattgtccgttcccttcctcaatacagtctgccacgccttcttcacctgctcatgccccgtggtcactgtggcagcgtgcacacagcagactctacagttcccgtaaccaccccacctgttcttgagagcatcgatatctcctcgcctagccatattttagtggaaatgctgtgtaatcacgaccaactctagcttatcaaaaaaccagaatgaagatttcatttcttcttacaatgtatttaaattcagtcatagctgtgctgttttgacaatgctttgtgttaaccaagtgaaaagttgaagacaaattccagtctacataaacttttttaaagattttt

SEQ ID NO: 424898 - DNA, 409 bp, Homo sapiens
cggtgtaatgaaagggtggttttaaatcaccaatcaggtattgccttttctaacccatgaatcaagatctaaaattgcaggactcatcctggaaggttccaggtcagtgtaatccaagactattagtgcaacacagaatttcagcttccggagataattccttttgctatgcactattctgatgtcatttcacatgtggttgactttattgcttaattcttcaattcgaaaggagcttctgatgaaagctcttggctctattgggattgttgaacagctcactggggagttagagctatcggggttccttcttggcagcagataacccctgtcttcttccgggcaggagctttgaatggactgaagcggcaccttctatcattgtaaataaacctctccaaagctccat

SEQ ID NO: 424899 - DNA, 403 bp, Homo sapiens
aagtccttttgagaagagttctgaaattgcattggtgttgccacgtcatcagtctctgtttgtcattttataaatacctctgcaatatctcgactgttctaaggcttggccaactccatgctgctagctgaggttagagattccagaaagagtttcagaaggtggcagctgctcttatatcctgtgagtctgtatctcactttcaaggcaaatccaaagcacatcatctctggagagtaagaattatagtcataagctgggctctggtgctcagccagtagtggtaataccagctacttaggaggctgaggcaggaagatcacttgagcccaggaggtcaaggctgcagtgcaccacgatcatacctgtgaattgccatgcactccagcctgggcaacatggc

SEQ ID NO: 424900 - DNA, 741 bp, Homo sapiens
agcctctgtcgtttactgtggcctcttgtttccaggccctgttgatttccgctggtctgggcgtcttaggttgaaagcacacagtctttctcattgtcattttacagttactctcgctttctagtgttgcgggctttcctctgccttcttcaagaccatgctgctcttcttggccctttatcctggaatccgttttcacgttccaggaaaaatctcttctatgagattttgattagaatggctttgaatttatagattaatttgagaacaactgatccctttatgctaggagtcttcttacttgtaaacgtggtccatttttccatatatttattagattagctttaatacctgtttgtataattttgtaattgttttcataaaggtagcctttgtagcttcttataatgttattttgtcatgataattgaaagcaatcatcaatttttttgttttttgttttacagctaaggataaatctgagaaaatatttgcactagcatttgtcaagctgatgagatacgatggtaccaccctgcgagacggagagcacgatcttatcgtctataaggtatctggttgcattggtgcaatattgctgctatagacagtttcagtcttttctgggctccctgacctggaccaacctttcccatcattgtgaggaagctgctatctagctacatttaattatgcaaatgaacatttccaatgaccagcccttttgttgttcctaacggg

SEQ ID NO: 424901 - DNA, 6712 bp, Homo sapiens
gcacgagcggctccggcggcgccatgacgcgctgggtgcccaccaagcgcgaggagaagtacggcgtggctttttataactatgatgccagaggagcggatgaactttctttacagatcggagacactgtgcacatcttagaaacatatgaagggtggtaccgaggttacacgttacgaaaaaagtctaagaagggtatatttcctgcttcatatattcatcttaaagaagcgatagttgaaggaaaagggcaacatgaaacagtcatcccgggtgacctccccctcatccaggaagtcaccacgacactccgagagtggtccaccatctggaggcagctctacgtgcaagataacagggagatgtttcgaagtgtgcggcacatgatctatgaccttattgaatggcgatcacaaattctttctggaactctgcctcaggatgaactcaaagaactgaagaagaaggtcacagccaaaattgattatggaaacagaattctagatttggacctggtggttagagatgaagatgggaatattttggatccagaattaactagcacgattagtctcttcagagctcatgaaatagcttctaaacaagtggaggaaaggttacaagaggaaaaatctcaaaagcagaacatagatattaacagacaagccaagtttgctgcaaccccttctctggccttgtttgtgaacctcaaaaatgtggtttgtaaaataggagaagatgctgaagtcctcatgtctctatatgaccctgtggagtccaaattcatcagtgagaactacctggttcgctggtccagttcaggattacctaaagacatagacagattacataatttgcgagccgtgtttactgacctcggaagcaaagacctgaaaagggagaaaatcagttttgtctgtcagattgttcgcgtgggtcgcatggagctgagggacaacaacaccaggaaactgacctcggggttgcggcgaccttttggagtggctgtgatggatgtaacagacataataaatggaaaagtagatgatgaagataagcagcatttcattccctttcagccggtggcaggggagaatgacttccttcagactgttataaacaaagtcatcgctgccaaagaagtcaaccacaaggggcagggtttgtgggtaacattgaaattacttcctggagatatccatcagatccgaaaagagtttccgcatttagtggacaggaccacagctgtggctcgaaaaacagggtttccggagataatcatgcctggtgatgttcgaaatgatatctatgtaacattagttcaaggagattttgataaaggaagcaaaacaacagcgaagaacgtggaggtcacggtgtctgtgtacgatgaggatgggaaacgattagagcatgtgattttcccgggtgctggtgatgaagcgatttcagagtacaaatctgtgatttactaccaagtaaagcagccacgctggtttgagactgttaaggtggccattcccatcgaggacgttaaccgcagtcaccttcggtttaccttccgccacaggtcatcacaggactctaaggataaatctgagaaaatatttgcactagcatttgtcaagctgatgagatacgatggtaccaccctgcgagacggagagcacgatcttatcgtctataaggccgaagcgaagaagctggaagatgctgccacgtacttgagtctgccctccacgaaggcagagttggaagaaaagggccactcggccaccggcaagagcatgcagagccttgggagctgcaccattagcaaggactccttccagatctccacgctcgtgtgctccaccaaactgactcagaacgtggaccttctggggctcttgaaatggcgctccaacaccagcctgctgcagcagaacttgaggcagctgatgaaagtcgatggtggtgaagtagtgaagtttcttcaggacacgttggatgccctcttcaacatcatgatggagaactcagagagtgagacttttgacacgttagtctttgatgctctggtatttatcattggactgattgctgatagaaaatttcagcattttaatcctgttttggaaacttacattaagaaacactttagtgcaacgttagcctacacgaagttgacaaaagtgttgaagaactacgtggacggtgctgagaagccgggagtaaatgagcagctgtacaaagccatgaaagcgctagaatccatcttcaagttcatcgtgcgctccaggatcctgttcaatcaactgtatgaaaacaagggagaggctgacttcgtggaatctttgctgcagctcttcaggtccatcaatgacatgatgagcagcatgtcagaccagaccgtccgggtgaagggggcagcactgaaatacttaccaacgatcgtcaacgatgtgaaattggtgtttgatcccaaagagctcagcaaaatgtttactgaattcatcctcaatgttcccatgggcttgctgaccatccagaaactctactgcttgatcgaaatcgtccacagtgacctcttcacacagcatgactgcagagagatcctgcttcccatgatgaccgatcagctcaagtaccatctggagagacaggaggacctggaggcctgctgtcagctgctcagccacatcctggaggtgctgtacaggaaggacgtggggccaacccagaggcacgtccagattatcatggagaaacttctccggaccgtgaaccgaaccgtcatttccatgggacgagattctgaactcattggaaacttcgtggcttgcatgacagctattttacgacaaatggaagattaccattatgcccacttgatcaagacttttgggaaaatgaggactgatgtggtagatttcctaatggaaacattcatcatgtttaagaacctcattggaaagaacgtttaccccttcgactgggtgatcatgaacatggtgcaaaataaagtcttcctgcgagcaattaatcagtatgcagatatgctgaacaaaaaatttctggatcaagccaactttgagctacagctgtggaacaactactttcacctggctgttgctttccttactcaagagtccctgcaactggagaatttttcaagtgccaagagagccaaaatccttaacaagtacggagatatgaggagacagattggctttgaaatcagagacatgtggtacaaccttggtcaacacaagataaagttcattccagaaatggtgggcccaatattagaaatgacattaattcccgagacggagctgcgcaaagccaccatccccatcttctttgatatgatgcagtgtgaattccattcgacccgaagcttccaaatgtttgaaaatgagatcatcaccaagctggatcatgaagtcgaaggaggcagaggagacgaacagtacaaagtgttatttgataaaatccttctggaacactgcaggaagcacaaatacctcgccaaaacaggagaaacttttgtaaaactcgttgtgcgcttaatggaaaggcttttggattatagaaccatcatgcacgacgagaacaaagaaaaccgcatgagctgcaccgtcaatgtgctgaatttctacaaagaaattgaaagagaagaaatgtatataaggtatttgtacaagctctgtgacctgcacaaggagtgtgataactacaccgaagcggcttacaccttgcttctccatgcaaagcttcttaagtggtcggaggatgtgtgtgtggcccacctcacccagcgggacgggtaccaggccaccacgcagggacagctgaaggagcagctctaccaggaaatcatccactacttcgacaaaggcaagatgtgggaggaggccattgccttgggcaaggagctagccgagcagtatgagaacgaaatgtttgattatgagcaactcagcgaattgctgaaaaaacaggctcagttttatgaaaacatcgtcaaagtgatcaggcccaagcctgactattttgctgttggctactacggacaagggttccccacattcctgcggggaaaagttttcatttaccgagggaaagagtatgagcgccgggaagattttgaggctcggctcttaactcagtttccaaacgccgagaaaatgaagacaacatctccaccaggcgacgatattaaaaactctcctggccagtatattcagtgcttcacagtgaagcccaaactcgatctgcctcctaagtttcacaggccagtgtcagagcagattgtaagtttttacagggtgaacgaggtccagcgatttgaatattctcggccaatccggaagggagagaaaaacccagacaatgaatttgcgaatatgtggatcgagagaaccatatatacaactgcatataaattacctggaattttaaggtggtttgaggtcaagtctgttttcatggtggaaatcagccccctggagaatgccatcgagaccatgcagctgacgaacgacaagatcaacagcatggtgcagcagcacctggatgaccccagcctgcccatcaacccgctctccatgctcctgaacggcatcgtggacccagctgtcatggggggcttcgcaaactacgaaaaggccttctttacagaccggtacctgcaggagcaccctgaggcccatgaaaagatcgagaagctcaaggacctgattgcttggcagattccttttctggccgaagggatcagaatccatggagacaaagtcacggaggcactgaggccgttccacgagaggatggaggcctgtttcaaacagctgaaggaaaaggtggagaaagagtacggcgtccgaatcatgccctcaagtctggatgatagaagaggcagccgcccccggtccatggtgcggtccttcacgatgccttcctcatcccgccctctgtctgtggcctctgtctcttccctctcatcggacagcaccccttccagaccaggctccgacgggtttgccctggagcctctcctgccaaagaaaatgcactccaggtcccaggacaagctggacaaggatgacctggagaaggagaagaaggacaagaagaaggaaaaaaggaacagcaaacatcaagagatatttgagaaagaatttaaacccaccgacatttccctgcagcagtctgaggctgtgatcctttcggaaacgataagtcccctgcggccccagagaccgaagagccaggtgatgaacgtcattggaagcgaaaggcgcttctcggtgtccccctcgtcaccgtcctcccagcaaacaccccctccagttacaccaagagccaagctcagcttcagcatgcagtcgagcttggagctgaacggcatgacgggggcggacgtggccgatgtcccaccccctctgcctctcaaaggcagcgtggcagattacgggaatttgatggaaaaccaggacttgctgggctcgccaacacctccacctccccctccacaccagaggcatctgccacctccactgcccagcaaaactccgcctcctccccctccaaagacaactcgcaagcagacatcggtggactctgggatcgtgcagtgacatcgcaaggctctctggaaagagtgtgctgcccctccccatctccatgccctctccttctgtgtcccctgagtctgctgtttacctcattgggcctgtgatgttaacatttcgtgcgactgctttttcttcaaaggagttcagttctcaccatggagtgagtggcctttagcgtcatggagcaaggtgggtctgggaggtagatatgggtccgggatgtgccatcgtagttaccagagttgggggcctctgagtgtgtctggctctgagagagtctgagtcttgcccaaacattctttctttttgtgccaaatgacttgcatttgcaaagagctcaattgctctgagctcagccaagtaggagaggctaggccatcactcttgggaagctgtgtagtgatgatgtataagaatcctcctcactgtcatgggatgttgtatccagcccctccttgttccagccggtggtgtgacttcgttggttgaggtgtgtctccaacctacatcagaccatgaagttcaacccctccagggaagctcctgatttcccctgcataattgaaaataggatatttctcagctattgaacagttactaatttatggggtggaaacagcattaagaatactgaatcaaatggaaaaacaaatgaatacaggaagataagtgttcgttcttttctgaaaaagagtatgtgtaccacaagagctggttttaattgggtgaattgtttttgtcctcattctgtacagaaatttgtatatatgatggttcttagaacttgttttaatttttgtggtccttctgtttattataataggcgtccaccaatgattatccatatgtgttcttaatttttaactgctggaagtgttaaaacacacacacacacacacacacacattttttttttcagaactccaaagtcctgaaaattttggtggacaatgatttttaaaaaactaactttgtataacctaatatttgtattctctcatctatatttttttattcactataatcatgatactcttctaatagacttaaaagttaatcattgacaacgaaaaataaaatgttattttaaaaga

SEQ ID NO: 424902 - DNA, 6678 bp, Homo sapiens
tgggttccctgaaaaatgctggtgacacactgacctcactggttctgccaaccagtgagttctacacatcatgaatgtattgtgaggaccctaacatgtctctttgtactaactgtttcaactttgtgtttgtttagggtggtaccgaggttacacgttacgaaaaaagtctaagaagggtatatttcctgcttcatatattcatcttaaagaagcgatagttgaaggaaaagggcaacatgaaacagtcatcccgggtgacctccccctcatccaggaagtcaccacgacactccgagagtggtccaccatctggaggcagctctacgtgcaagataacagggagatgtttcgaagtgtgcggcacatgatctatgaccttattgaatggcgatcacaaattctttctggaactctgcctcaggatgaactcaaagaactgaagaagaaggtcacagccaaaattgattatggaaacagaattctagatttggacctggtggttagagatgaagatgggaatattttggatccagaattaactagcacgattagtctcttcagagctcatgaaatagcttctaaacaagtggaggaaaggttacaagaggaaaaatctcaaaagcagaacatagatattaacagacaagccaagtttgctgcaaccccttctctggccttgtttgtgaacctcaaaaatgtggtttgtaaaataggagaagatgctgaagtcctcatgtctctatatgaccctgtggagtccaaattcatcagtgagaactacctggttcgctggtccagttcaggattacctaaagacatagacagattacataatttgcgagccgtgtttactgacctcggaagcaaagacctgaaaagggagaaaatcagttttgtctgtcagattgttcgcgtgggtcgcatggagctgagggacaacaacaccaggaaactgacctcggggttgcggcgaccttttggagtggctgtgatggatgtaacagacataataaatggaaaagtagatgatgaagataagcagcatttcattccctttcagccggtggcaggggagaatgacttccttcagactgttataaacaaagtcatcgctgccaaagaagtcaaccacaaggggcagggtttgtgggtaacattgaaattacttcctggagatatccatcagatccgaaaagagtttccgcatttagtggacaggaccacagctgtggctcgaaaaacagggtttccggagataatcatgcctggtgatgttcgaaatgatatctatgtaacattagttcaaggagattttgataaaggaagcaaaacaacagcgaagaacgtggaggtcacggtgtctgtgtacgatgaggatgggaaacgattagagcatgtgattttcccgggtgctggtgatgaagcgatttcagagtacaaatctgtgatttactaccaagtaaagcagccacgctggtttgagactgttaaggtggccattcccatcgaggacgttaaccgcagtcaccttcggtttaccttccgccacaggtcatcacaggactctaaggataaatctgagaaaatatttgcactagcatttgtcaagctgatgagatacgatggtaccaccctgcgagacggagagcacgatcttatcgtctataaggccgaagcgaagaagctggaagatgctgccacgtacttgagtctgccctccacgaaggcagagttggaagaaaagggccactcggccaccggcaagagcatgcagagccttgggagctgcaccattagcaaggactccttccagatctccacgctcgtgtgctccaccaaactgactcagaacgtggaccttctggggctcttgaaatggcgctccaacaccagcctgctgcagcagaacttgaggcagctgatgaaagtcgatggtggtgaagtagtgaagtttcttcaggacacgttggatgccctcttcaacatcatgatggagaactcagagagtgagacttttgacacgttagtctttgatgctctggtatttatcattggactgattgctgatagaaaatttcagcattttaatcctgttttggaaacttacattaagaaacactttagtgcaacgttagcctacacgaagttgacaaaagtgttgaagaactacgtggacggtgctgagaagccgggagtaaatgagcagctgtacaaagccatgaaagcgctagaatccatcttcaagttcatcgtgcgctccaggatcctgttcaatcaactgtatgaaaacaagggagaggctgacttcgtggaatctttgctgcagctcttcaggtccatcaatgacatgatgagcagcatgtcagaccagaccgtccgggtgaagggggcagcactgaaatacttaccaacgatcgtcaacgatgtgaaattggtgtttgatcccaaagagctcagcaaaatgtttactgaattcatcctcaatgttcccatgggcttgctgaccatccagaaactctactgcttgatcgaaatcgtccacagtgacctcttcacacagcatgactgcagagagatcctgcttcccatgatgaccgatcagctcaagtaccatctggagagacaggaggacctggaggcctgctgtcagctgctcagccacatcctggaggtgctgtacaggaaggacgtggggccaacccagaggcacgtccagattatcatggagaaacttctccggaccgtgaaccgaaccgtcatttccatgggacgagattctgaactcattggaaacttcgtggcttgcatgacagctattttacgacaaatggaagattaccattatgcccacttgatcaagacttttgggaaaatgaggactgatgtggtagatttcctaatggaaacattcatcatgtttaagaacctcattggaaagaacgtttaccccttcgactgggtgatcatgaacatggtgcaaaataaagtcttcctgcgagcaattaatcagtatgcagatatgctgaacaaaaaatttctggatcaagccaactttgagctacagctgtggaacaactactttcacctggctgttgctttccttactcaagagtccctgcaactggagaatttttcaagtgccaagagagccaaaatccttaacaagtacggagatatgaggagacagattggctttgaaatcagagacatgtggtacaaccttggtcaacacaagataaagttcattccagaaatggtgggcccaatattagaaatgacattaattcccgagacggagctgcgcaaagccaccatccccatcttctttgatatgatgcagtgtgaattccattcgacccgaagcttccaaatgtttgaaaatgagatcatcaccaagctggatcatgaagtcgaaggaggcagaggagacgaacagtacaaagtgttatttgataaaatccttctggaacactgcaggaagcacaaatacctcgccaaaacaggagaaacttttgtaaaactcgttgtgcgcttaatggaaaggcttttggattatagaaccatcatgcacgacgagaacaaagaaaaccgcatgagctgcaccgtcaatgtgctgaatttctacaaagaaattgaaagagaagaaatgtatataaggtatttgtacaagctctgtgacctgcacaaggagtgtgataactacaccgaagcggcttacaccttgcttctccatgcaaagcttcttaagtggtcggaggatgtgtgtgtggcccacctcacccagcgggacgggtaccaggccaccacgcagggacagctgaaggagcagctctaccaggaaatcatccactacttcgacaaaggcaagatgtgggaggaggccattgccttgggcaaggagctagccgagcagtatgagaacgaaatgtttgattatgagcaactcagcgaattgctgaaaaaacaggctcagttttatgaaaacatcgtcaaagtgatcaggcccaagcctgactattttgctgttggctactacggacaagggttccccacattcctgcggggaaaagttttcatttaccgagggaaagagtatgagcgccgggaagattttgaggctcggctcttaactcagtttccaaacgccgagaaaatgaagacaacatctccaccaggcgacgatattaaaaactctcctggccagtatattcagtgcttcacagtgaagcccaaactcgatctgcctcctaagtttcacaggccagttttttacagggtgaacgaggtccagcgatttgaatattctcggccaatccggaagggagagaaaaacccagacaatgaatttgcgaatatgtggatcgagagaaccatatatacaactgcatataaattacctggaattttaaggtggtttgaggtcaagtctgttttcatggtggaaatcagccccctggagaatgccatcgagaccatgcagctgacgaacgacaagatcaacagcatggtgcagcagcacctggatgaccccagcctgcccatcaacccgctctccatgctcctgaacggcatcgtggacccagctgtcatggggggcttcgcaaactacgaaaaggccttctttacagaccggtacctgcaggagcaccctgaggcccatgaaaagatcgagaagctcaaggacctgattgcttggcagattccttttctggccgaagggatcagaatccatggagacaaagtcacggaggcactgaggccgttccacgagaggatggaggcctgtttcaaacagctgaaggaaaaggtggagaaagagtacggcgtccgaatcatgccctcaagtctggatgatagaagaggcagccgcccccggtccatggtgcggtccttcacgatgccttcctcatcccgccctctgtctgtggcctctgtctcttccctctcatcggacagcaccccttccagaccaggctccgacgggtttgccctggagcctctcctgccaaagaaaatgcactccaggtcccaggacaagctggacaaggatgacctggagaaggagaagaaggacaagaagaaggaaaaaaggaacagcaaacatcaagagatatttgagaaagaatttaaacccaccgacatttccctgcagcagtctgaggctgtgatcctttcggaaacgataagtcccctgcggccccagagaccgaagagccaggtgatgaacgtcattggaagcgaaaggcgcttctcggtgtccccctcgtcaccgtcctcccagcaaacaccccctccagttacaccaagagccaagctcagcttcagcatgcagtcgagcttggagctgaacggcatgacgggggcggacgtggccgatgtcccaccccctctgcctctcaaaggcagcgtggcagattacgggaatttgatggaaaaccaggacttgctgggctcgccaacacctccacctccccctccacaccagaggcatctgccacctccactgcccagcaaaactccgcctcctccccctccaaagacaactcgcaagcagacatcggtggactctgggatcgtgcagtgacatcgcaaggctctctggaaagagtgtgctgcccctccccatctccatgccctctccttctgtgtcccctgagtctgctgtttacctcattgggcctgtgatgttaacatttcgtgcgactgctttttcttcaaaggagttcagttctcaccatggagtgagtggcctttagcgtcatggagcaaggtgggtctgggaggtagatatgggtccgggatgtgccatcgtagttaccagagttgggggcctctgagtgtgtctggctctgagagagtctgagtcttgcccaaacattctttctttttgtgccaaatgacttgcatttgcaaagagctcaattgctctgagctcagccaagtaggagaggctaggccatcactcttgggaagctgtgtagtgatgatgtataagaatcctcctcactgtcatgggatgttgtatccagcccctccttgttccagccggtggtgtgacttcgttggttgaggtgtgtctccaacctacatcagaccatgaagttcaacccctccagggaagctcctgatttcccctgcataattgaaaataggatatttctcagctattgaacagttactaatttatggggtggaaacagcattaagaatactgaatcaaatggaaaaacaaatgaatacaggaagataagtgttcgttcttttctgaaaaagagtatgtgtaccacaagagctggttttaattgggtgaattgtttttgtcctcattctgtacagaaatttgtatatatgatggttcttagaacttgttttaatttttgtggtccttctgtttattataataggcgtccaccaatgattatccatatgtgttcttaatttttaactgctggaagtgttaaaacacacacacacacacacacacacattttttttttcagaactccaaagtcctgaaaattttggtggacaatgatttttaaaaaactaactttgtataacctaatatttgtattctctcatctatatttttttattcactataatcatgatactcttctaatagacttaaaagttaatcattgacaacgaaaaataaaatgttattttaaaaga

SEQ ID NO: 424903 - DNA, 3119 bp, Homo sapiens
tgggttccctgaaaaatgctggtgacacactgacctcactggttctgccaaccagtgagttctacacatcatgaatgtattgtgaggaccctaacatgtctctttgtactaactgtttcaactttgtgtttgtttagggtggtaccgaggttacacgttacgaaaaaagtctaagaagggtatatttcctgcttcatatattcatcttaaagaagcgatagttgaaggaaaagggcaacatgaaacagtcatcccgggtgacctccccctcatccaggaagtcaccacgacactccgagagtggtccaccatctggaggcagctctacgtgcaagataacagggagatgtttcgaagtgtgcggcacatgatctatgaccttattgaatggcgatcacaaattctttctggaactctgcctcaggatgaactcaaagaactgaagaagaaggtcacagccaaaattgattatggaaacagaattctagatttggacctggtggttagagatgaagatgggaatattttggatccagaattaactagcacgattagtctcttcagagctcatgaaatagcttctaaacaagtggaggaaaggttacaagaggaaaaatctcaaaagcagaacatagatattaacagacaagccaagtttgctgcaaccccttctctggccttgtttgtgaacctcaaaaatgtggtttgtaaaataggagaagatgctgaagtcctcatgtctctatatgaccctgtggagtccaaattcatcagtgagaactacctggttcgctggtccagttcaggattacctaaagacatagacagattacataatttgcgagccgtgtttactgacctcggaagcaaagacctgaaaagggagaaaatcagttttgtctgtcagattgttcgcgtgggtcgcatggagctgagggacaacaacaccaggaaactgacctcggggttgcggcgaccttttggagtggctgtgatggatgtaacagacataataaatggaaaagtagatgatgaagataagcagcatttcattccctttcagccggtggcaggggagaatgacttccttcagactgttataaacaaagtcatcgctgccaaagaagtcaaccacaaggggcagggtttgtgggtaacattgaaattacttcctggagatatccatcagatccgaaaagagtttccgcatttagtggacaggaccacagctgtggctcgaaaaacagggtttccggagataatcatgcctggtgatgttcgaaatgatatctatgtaacattagttcaaggagattttgataaaggaagcaaaacaacagcgaagaacgtggaggtcacggtgtctgtgtacgatgaggatgggaaacgattagagcatgtgattttcccgggtgctggtgatgaagcgatttcagagtacaaatctgtgatttactaccaagtaaagcagccacgctggtttgagactgttaaggtggccattcccatcgaggacgttaaccgcagtcaccttcggtttaccttccgccacaggtcatcacaggactctaaggataaatctgagaaaatatttgcactagcatttgtcaagctgatgagatacgatggtaccaccctgcgagacggagagcacgatcttatcgtctataaggccgaagcgaagaagctggaagatgctgccacgtacttgagtctgccctccacgaaggcagagttggaagaaaagggccactcggccaccggcaagagcatgcagagccttgggagctgcaccattagcaaggactccttccagatctccacgctcgtgtgctccaccaaactgactcagaacgtggaccttctggggctcttgaaatggcgctccaacaccagcctgctgcagcagaacttgaggcagctgatgaaagtcgatggtggtgaagtagtgaagtttcttcaggacacgttggatgccctcttcaacatcatgatggagaactcagagagtgagacttttgacacgttagtctttgatgctctggtatttatcattggactgattgctgatagaaaatttcagcattttaatcctgttttggaaacttacattaagaaacactttagtgcaacgttagcctacacgaagttgacaaaagtgttgaagaactacgtggacggtgctgagaagccgggagtaaatgagcagctgtacaaagccatgaaagcgctagaatccatcttcaagttcatcgtgcgctccaggatcctgttcaatcaactgtatgaaaacaagggagaggctgacttcgtggaatctttgctgcagctcttcaggtccatcaatgacatgatgagcagcatgtcagaccagaccgtccgggtgaagggggcagcactgaaatacttaccaacgatcgtcaacgatgtgaaattggtgtttgatcccaaagagctcagcaaaatgtttactgaattcatcctcaatgttcccatgggcttgctgaccatccagaaactctactgcttgatcgaaatcgtccacagtgacctcttcacacagcatgactgcagagagatcctgcttcccatgatgaccgatcagctcaagtaccatctggagagacaggaggacctggaggcctgctgtcagctgctcagccacatcctggaggtgctgtacaggaaggacgtggggccaacccagaggcacgtccagattatcatggagaaacttctccggaccgtgaaccgaaccgtcatttccatgggacgagattctgaactcattgtaagtgcttggtgacatatgtttggatatttaactggggctgacagcatccttctccaactgctgtttgaacatagcttattatactgcaatgtagtgagcagttgagatacagcttggtatataaaatgtcctcattttccaaatgaatgtcaaagttgaagggtaagcaaaccaactttaaagatggaaacatttggctcttgttttctcattacttacttatagcaaaagacatgtattttctgctgagtcgtcattcttctggcagtttctccatagtgtttacacttaaggtgccattaataaaattttatgaaggacccta

SEQ ID NO: 424904 - DNA, 3347 bp, Homo sapiens
tgggttccctgaaaaatgctggtgacacactgacctcactggttctgccaaccagtgagttctacacatcatgaatgtattgtgaggaccctaacatgtctctttgtactaactgtttcaactttgtgtttgtttagggtggtaccgaggttacacgttacgaaaaaagtctaagaagggtatatttcctgcttcatatattcatcttaaagaagcgatagttgaaggaaaagggcaacatgaaacagtcatcccgggtgacctccccctcatccaggaagtcaccacgacactccgagagtggtccaccatctggaggcagctctacgtgcaagataacagggagatgtttcgaagtgtgcggcacatgatctatgaccttattgaatggcgatcacaaattctttctggaactctgcctcaggatgaactcaaagaactgaagaagaaggtcacagccaaaattgattatggaaacagaattctagatttggacctggtggttagagatgaagatgggaatattttggatccagaattaactagcacgattagtctcttcagagctcatgaaatagcttctaaacaagtggaggaaaggttacaagaggaaaaatctcaaaagcagaacatagatattaacagacaagccaagtttgctgcaaccccttctctggccttgtttgtgaacctcaaaaatgtggtttgtaaaataggagaagatgctgaagtcctcatgtctctatatgaccctgtggagtccaaattcatcagtgagaactacctggttcgctggtccagttcaggattacctaaagacatagacagattacataatttgcgagccgtgtttactgacctcggaagcaaagacctgaaaagggagaaaatcagttttgtctgtcagattgttcgcgtgggtcgcatggagctgagggacaacaacaccaggaaactgacctcggggttgcggcgaccttttggagtggctgtgatggatgtaacagacataataaatggaaaagtagatgatgaagataagcagcatttcattccctttcagccggtggcaggggagaatgacttccttcagactgttataaacaaagtcatcgctgccaaagaagtcaaccacaaggggcagggtttgtgggtaacattgaaattacttcctggagatatccatcagatccgaaaagagtttccgcatttagtggacaggaccacagctgtggctcgaaaaacagggtttccggagataatcatgcctggtgatgttcgaaatgatatctatgtaacattagttcaaggagattttgataaaggaagcaaaacaacagcgaagaacgtggaggtcacggtgtctgtgtacgatgaggatgggaaacgattagagcatgtgattttcccgggtgctggtgatgaagcgatttcagagtacaaatctgtgatttactaccaagtaaagcagccacgctggtttgagactgttaaggtggccattcccatcgaggacgttaaccgcagtcaccttcggtttaccttccgccacaggtcatcacaggactctaaggataaatctgagaaaatatttgcactagcatttgtcaagctgatgagatacgatggtaccaccctgcgagacggagagcacgatcttatcgtctataaggccgaagcgaagaagctggaagatgctgccacgtacttgagtctgccctccacgaaggcagagttggaagaaaagggccactcggccaccggcaagagcatgcagagccttgggagctgcaccattagcaaggactccttccagatctccacgctcgtgtgctccaccaaactgactcagaacgtggaccttctggggctcttgaaatggcgctccaacaccagcctgctgcagcagaacttgaggcagctgatgaaagtcgatggtggtgaagtagtgaagtttcttcaggacacgttggatgccctcttcaacatcatgatggagaactcagagagtgagacttttgacacgttagtctttgatgctctggtatttatcattggactgattgctgatagaaaatttcagcattttaatcctgttttggaaacttacattaagaaacactttagtgcaacgttagcctacacgaagttgacaaaagtgttgaagaactacgtggacggtgctgagaagccgggagtaaatgagcagctgtacaaagccatgaaagcgctagaatccatcttcaagttcatcgtgcgctccaggatcctgttcaatcaactgtatgaaaacaagggagaggctgacttcgtggaatctttgctgcagctcttcaggtccatcaatgacatgatgagcagcatgtcagaccagaccgtccgggtgaagggggcagcactgaaatacttaccaacgatcgtcaacgatgtgaaattggtgtttgatcccaaagagctcagcaaaatgtttactgaattcatcctcaatgttcccatgggcttgctgaccatccagaaactctactgcttgatcgaaatcgtccacagtgacctcttcacacagcatgactgcagagagatcctgcttcccatgatgaccgatcagctcaagtaccatctggagagacaggaggacctggaggcctgctgtcagctgctcagccacatcctggaggtgctgtacaggaaggacgtggggccaacccagaggcacgtccagattatcatggagaaacttctccggaccgtgaaccgaaccgtcatttccatgggacgagattctgaactcattggaaacttcgtggcttgcatgacagctattttacgacaaatggaagattaccattatgcccacttgatcaagacttttgggaaaatgaggactgatgtggtagatttcctaatggaaacattcatcatgtttaagaacctcattggaaagaacgtttaccccttcgactgggtgatcatgaacatggtgcaaaataagtaagtgtggggaaaacggctctcaccttttctatggctcccaattcatgtctgctgggaacagtggtgttgcctggagaccaagctggcttcaataaaatgctctgcaaacgctgttcctaattctgtgctgcagacagttctagggagacagggactctgagtttgtggtgacttccttatgacaacacagggctctggctctaagaacttgagctccgtcccctggagaaaaacagcctgaagctggatctcccctagctgtcatcatgggcacaggggttctgctcgacgtcgctctgcgctctcatgttacccacatatttgtatcagccctaggcactgtcagctccatgcaa

SEQ ID NO: 424905 - DNA, 2855 bp, Homo sapiens
tgggttccctgaaaaatgctggtgacacactgacctcactggttctgccaaccagtgagttctacacatcatgaatgtattgtgaggaccctaacatgtctctttgtactaactgtttcaactttgtgtttgtttagggtggtaccgaggttacacgttacgaaaaaagtctaagaagggtatatttcctgcttcatatattcatcttaaagaagcgatagttgaaggaaaagggcaacatgaaacagtcatcccgggtgacctccccctcatccaggaagtcaccacgacactccgagagtggtccaccatctggaggcagctctacgtgcaagataacagggagatgtttcgaagtgtgcggcacatgatctatgaccttattgaatggcgatcacaaattctttctggaactctgcctcaggatgaactcaaagaactgaagaagaaggtcacagccaaaattgattatggaaacagaattctagatttggacctggtggttagagatgaagatgggaatattttggatccagaattaactagcacgattagtctcttcagagctcatgaaatagcttctaaacaagtggaggaaaggttacaagaggaaaaatctcaaaagcagaacatagatattaacagacaagccaagtttgctgcaaccccttctctggccttgtttgtgaacctcaaaaatgtggtttgtaaaataggagaagatgctgaagtcctcatgtctctatatgaccctgtggagtccaaattcatcagtgagaactacctggttcgctggtccagttcaggattacctaaagacatagacagattacataatttgcgagccgtgtttactgacctcggaagcaaagacctgaaaagggagaaaatcagttttgtctgtcagattgttcgcgtgggtcgcatggagctgagggacaacaacaccaggaaactgacctcggggttgcggcgaccttttggagtggctgtgatggatgtaacagacataataaatggaaaagtagatgatgaagataagcagcatttcattccctttcagccggtggcaggggagaatgacttccttcagactgttataaacaaagtcatcgctgccaaagaagtcaaccacaaggggcagggtttgtgggtaacattgaaattacttcctggagatatccatcagatccgaaaagagtttccgcatttagtggacaggaccacagctgtggctcgaaaaacagggtttccggagataatcatgcctggtgatgttcgaaatgatatctatgtaacattagttcaaggagattttgataaaggaagcaaaacaacagcgaagaacgtggaggtcacggtgtctgtgtacgatgaggatgggaaacgattagagcatgtgattttcccgggtgctggtgatgaagcgatttcagagtacaaatctgtgatttactaccaagtaaagcagccacgctggtttgagactgttaaggtggccattcccatcgaggacgttaaccgcagtcaccttcggtttaccttccgccacaggtcatcacaggactctaaggataaatctgagaaaatatttgcactagcatttgtcaagctgatgagatacgatggtaccaccctgcgagacggagagcacgatcttatcgtctataaggccgaagcgaagaagctggaagatgctgccacgtacttgagtctgccctccacgaaggcagagttggaagaaaagggccactcggccaccggcaagagcatgcagagccttgggagctgcaccattagcaaggactccttccagatctccacgctcgtgtgctccaccaaactgactcagaacgtggaccttctggggctcttgaaatggcgctccaacaccagcctgctgcagcagaacttgaggcagctgatgaaagtcgatggtggtgaagtagtgaagtttcttcaggacacgttggatgccctcttcaacatcatgatggagaactcagagagtgagacttttgacacgttagtctttgatgctctggtatttatcattggactgattgctgatagaaaatttcagcattttaatcctgttttggaaacttacattaagaaacactttagtgcaacgttagcctacacgaagttgacaaaagtgttgaagaactacgtggacggtgctgagaagccgggagtaaatgagcagctgtacaaagccatgaaagcgctagaatccatcttcaagttcatcgtgcgctccaggatcctgttcaatcaactgtatgaaaacaagggagaggctgacttcgtggaatctttgctgcagctcttcaggtccatcaatgacatgatgagcagcatgtcagaccagaccgtccgggtgaagggggcagcactgaaatacttaccaacgatcgtcaacgatgtgaaattggtgtttgatcccaaagagctcagcaaaatgtttactgaattcatcctcaatgttcccatgggcttgctgaccatccagaaactctactgcttgatcgaaatcgtccacagtgacctcttcacacagcatgactgcagagagatcctgcttcccatgatgaccgatcagctcaagtaccatctggagagacaggaggacctggaggcctgctgtcagctgctcagccacatcctggaggtgctgtacaggaaggacgtggggccaacccagaggcacgtccagattatcatggagaaacttctccggaccgtgaaccgaaccgtcatttccatgggacgagattctgaactcattggatacttcgtggcttgcatgacagctattttacgacattgtgatttaagactcggtagattca

SEQ ID NO: 424906 - DNA, 1187 bp, Homo sapiens
tgggttccctgaaaaatgctggtgacacactgacctcactggttctgccaaccagtgagttctacacatcatgaatgtattgtgaggaccctaacatgtctctttgtactaactgtttcaactttgtgtttgtttagggtggtaccgaggttacacgttacgaaaaaagtctaagaagggtatatttcctgcttcatatattcatcttaaagaagcgatagttgaaggaaaagggcaacatgaaacagtcatcccgggtgacctccccctcatccaggaagtcaccacgacactccgagagtggtccaccatctggaggcagctctacgtgcaagataacagggagatgtttcgaagtgtgcggcacatgatctatgaccttattgaatggcgatcacaaattctttctggaactctgcctcaggatgaactcaaagaactgaagaagaaggtcacagccaaaattgattatggaaacagaattctagatttggacctggtggttagagatgaagatgggaatattttggatccagaattaactagcacgattagtctcttcagagctcatgaaatagcttctaaacaagtggaggaaaggttacaagaggaaaaatctcaaaagcagaacatagatattaacagacaagccaagtttgctgcaaccccttctctggccttgtttgtgaacctcaaaaatgtggtttgtaaaataggagaagatgctgaagtcctcatgtctctatatgaccctgtggagtccaaattcatcagtgagaactacctggttcgctggtccagttcaggattacctaaagacatagacagattacataatttgcgagccgtgtttactgacctcggaagcaaagacctgaaaagggagaaaatcagttttgtctgtcagattgttcgcgtgggtcgcatggagctgagggacaacaacaccaggaaactgacctcggggttgcggcgaccttttggagtggctgtgatggatgtaacagacataataaatggaaaagtagatgatgaagataagcagcatttcattccctttcagccggtggcaggggagaatgacttccttcagactgttataaacaaagtcatcgctgccaaagaagtcaaccacaaggggcagggctgcgtcgacgcggccgcgaatttagtagtagtagtcgacc

SEQ ID NO: 424907 - DNA, 322 bp, Homo sapiens
gtcggacaggatggagcccaactcatgtggggaggatggttccggctgagtggctgtgccaggtcagaccccacctggagacggtgtcttttctgtcaggacatcagttatgtgacatcttccccatcctcatgttttttagcatctgccacctccactgcccagcaaaactccgcctcctccccctccaaagacaactcgcaagcagacatcggtggactctgggatcgtgcagtgacatcgcaaggctctctggaaagagtgtgctgcccctccccatctccatgccctctccttctgtgtcccctgagtctgctgttta

SEQ ID NO: 424908 - DNA, 3051 bp, Homo sapiens
  misc_feature (2240)..(2240): n is a, c, g, or t
tccaggggaaaccggcctgggtggagagacagagaaggggagaccgggtgggtgggtcgtacgcttagggggccgtggttggtacttcgctgttggggaggctttcaggtcgcccagatcctgcttcccaatgggtgactgggaaaattagcgggtggaaaatctcgaggggtggaggctttttttttcctccttggccccgccctcttcctgttcggcgactgggacgcctggccctacgagggggaagggaggcttggccgggctatcggagagcgctgtgcgcacgcgcgagcccgagtgcgtgtgtgtgtgtgcacgcgcacgcgcgctcctgctcttaggaagcctgggaaggaccggtgtgctaggagatgatcggggaaagcatagtcccctgtctgtggcaccagacactcccgactgtgcgctgactctccccgcccagccagcagccttttccagagaggctgtggtccatagcctctgttcgttttcactgcaggaccaggcacgaaagttaaaacaaaatgaagattttttctgaatctcataaaacagtgtttgttgtggatcactgcccttatatggcagaatcttgcaggcagcatgtcgagtttgatatgctggtgaagaatagaacccaaggaatcattcctttggcccccatatctaaatcattgtggacttgctcagtagaatcttccatggaatattgtagaataatgtatgatatatttcctttcaaaaagctggtgaattttattgtgagtgactctggagcacatgttttaaattcttggactcaagaagaccaaaatttacaggagctaatggcagcattagccgctgttgggcctcctaatcctcgggcagatccagagtgctgcagtattctgcatggccttgttgcagcagtggaaactctctgcaaaattactgaataccaacatgaggctcgtactctactcatggagaatgcagaacgtgttggaaatagaggacgaataatctgtattactaatgcaaaaagtgatagtcatgtgcgaatgcttgaagactgtgtccaggaaacgattcatgaacataacaagcttgctgcaaattcagatcatctcatgcagattcaaaaatgtgagttggtcttgatccacacctacccagttggtgaagacagccttgtatctgatcgttctaaaaaagagttgtccccggttttaaccagtgaagttcatagtgttcgtgcaggacggcatcttgctaccaaattgaatattttagtacagcaacattttgacttggcttcaactactattacaaatattccaatgaaggaagaacagcatgctaacacatctgccaattatgatgtggagctacttcatcacaaagatgcacatgtagatttcctgaaaagtggtgattcgcatctaggtggcggcagtcgagaaggctcgtttaaagaaacaataacattaaagtggtgtacaccaaggacaaataacattgaattacactattgtactggagcttatcggatttcacctgtagatgtaaatagtagaccttcctcctgccttactaattttcttctaaatggtcgttctgttttattggaacaaccacgaaagtcaggttctaaagtcattagtcatatgcttagtagccatggaggagagatttttttgcacgtccttagcagttctcgatccattctagaagatccaccttcaattagtgaaggatgtggaggaagagttacagactaccggattacagattttggtgaatttatgagggaaaacagattaactccttttctagaccccagatataaaatcgatggaagtcttgaggtccctttggaacgagcaaaagatcagttagaaaaacatacccgttactggcctatgatcatttcacaaaccaccatttttaacatgcaagcggtagttccattagccagtgttattgtgaaagaatctctgacagaagaagatgtgttaaactgtcaaaaaacaatatacaacttagttgatatggaaagaaaaaatgatcctctacctatttccacagttggtacaagaggaaagggccctaaaagagatgaacaataccgtatcatgtggaatgaattagaaacccttgtcagagcccatatcaacaactcagagaaacatcaaagagtcttggaatgatctttcactgctttctctgacttgtcctctttgtcttccctntttcttcctcgtttctttcgttcttcctcttctgatggcatgcaggagcaaacccccagaagaggaagaacgaaagaaacgaggaagaaagagggaagacaaagaggacaagtcagagaaagcagtgaaagattatgaacaggaaaagtcttggcaagactcagagagattaaaaggaatcttagagcgtggaaaagaagaattggctgaagctgagattataaaagattcgcctgattccccagaacctccaaacaaaaaaccccttgttgaaatggatgaaactccacaagtggaaaaatcaaaagggccagtgtcgttattatccttgtggagtaatagaatcaatactgccaattccagaaaacatcaggaatttgctggacgtttgaactctgttaataacagagctgaactatatcaacatcttaaagaggaaaatgggatggagacaacagaaaatggaaaagccagccggcagtgaagagtgacttgaagaactaaatttagcatattgcaaaaatattttgtgcggaattcgatataagtacttttacagcaagatggtatagttatgttgcctggactggtttttacatttttaaaatatttcagctgtcatttttgtactaattataaaattggcacataattcaaaaatatacatttgagatgatttgtcctcccaaattatacaagtttattttatggtataaagtgttctctctggaaatgtttttaaaaaaattcttaggcttctctttgcgaaataaaactattaaaatatttgaaatgcaaaacaaagaagaat

SEQ ID NO: 424909 - DNA, 2663 bp, Homo sapiens
tccaggggaaaccggcctgggtggagagacagagaaggggagaccgggtgggtgggtcgtacgcttagggggccgtggttggtacttcgctgttggggaggctttcaggtcgcccagatcctgcttcccaatgggtgactgggaaaattagcgggtggaaaatctcgaggggtggaggctttttttttcctccttggccccgccctcttcctgttcggcgactgggacgcctggccctacgagggggaagggaggcttggccgggctatcggagagcgctgtgcgcacgcgcgagcccgagtgcgtgtgtgtgtgtgcacgcgcacgcgcgctcctgctcttaggaagcctgggaaggaccggtgtgctaggagatgatcggggaaagcatagtcccctgtctgtggcaccagacactcccgactgtgcgctgactctccccgcccagccagcagccttttccagagaggctgtggtccatagcctctgttcgttttcactgcaggaccaggcacgaaagttaaaacaaaatgaagattttttctgaatctcataaaacagtgtttgttgtggatcactgcccttatatggcagaatcttgcaggcagcatgtcgagtttgatatgctggtgaagaatagaacccaaggaatcattcctttggcccccatatctaaatcattgtggacttgctcagtagaatcttccatggaatattgtagaataatgtatgatatatttcctttcaaaaagctggtgaattttattgtgagtgactctggagcacatgttttaaattcttggactcaagaagaccaaaatttacaggagctaatggcagcattagccgctgttgggcctcctaatcctcgggcagatccagagtgctgcagtattctgcatggccttgttgcagcagtggaaactctctgcaaaattactgaataccaacatgaggctcgtactctactcatggagaatgcagaacgtgttggaaatagaggacgaataatctgtattactaatgcaaaaagtgatagtcatgtgcgaatgcttgaagactgtgtccaggaaacgattcatgaacataacaagcttgctgcaaattcagatcatctcatgcagattcaaaaatgtgagttggtcttgatccacacctacccagttggtgaagacagccttgtatctgatcgttctaaaaaagagttgtccccggttttaaccagtgaagttcatagtgttcgtgcaggacggcatcttgctaccaaattgaatattttagtacagcaacattttgacttggcttcaactactattacaaatattccaatgaaggaagaacagcatgctaacacatctgccaattatgatgtggagctacttcatcacaaagatgcacatgtagatttcctgaaaagtgaattacactattgtactggagcttatcggatttcacctgtagatgtaaatagtagaccttcctcctgccttactaattttcttctaaatgaccccagatataaaatcgatggaagtcttgaggtccctttggaacgagcaaaagatcagttagaaaaacatacccgttactggcctatgatcatttcacaaaccaccatttttaacatgcaagcggtagttccattagccagtgttattgtgaaagaatctctgacagaagaagatgtgttaaactgtcaaaaaacaatatacaacttagttgatatggaaagaaaaaatgatcctctacctatttccacagttggtacaagaggaaagggccctaaaagagatgaacaataccgtatcatgtggaatgaattagaaacccttgtcagagcccatatcaacaactcagagaaacatcaaagagtcttggaatgtctgatggcatgcaggagcaaacccccagaagaggaagaacgaaagaaacgaggaagaaagagggaagacaaagaggacaagtcagagaaagcagtgaaagattatgaacaggaaaagtcttggcaagactcagagagattaaaaggaatcttagagcgtggaaaagaagaattggctgaagctgagattataaaagattcgcctgattccccagaacctccaaacaaaaaaccccttgttgaaatggatgaaactccacaagtggaaaaatcaaaagggccagtgtcgttattatccttgtggagtaatagaatcaatactgccaattccagaaaacatcaggaatttgctggacgtttgaactctgttaataacagagctgaactatatcaacatcttaaagaggaaaatgggatggagacaacagaaaatggaaaagccagccggcagtgaagagtgacttgaagaactaaatttagcatattgcaaaaatattttgtgcggaattcgatataagtacttttacagcaagatggtatagttatgttgcctggactggtttttacatttttaaaatatttcagctgtcatttttgtactaattataaaattggcacataattcaaaaatatacatttgagatgatttgtcctcccaaattatacaagtttattttatggtataaagtgttctctctggaaatgtttttaaaaaaattcttaggcttctctttgcgaaataaaactattaaaatatttgaaatgcaaaacaaagaagaat

SEQ ID NO: 424910 - DNA, 1247 bp, Homo sapiens
ccatgttcctaggatgcccgtcattcatgccgttcttagagctacatgatgacgtccttgcgttcagcgccctcgctgtcgtattcccctcgcgtatggccctcggtgcgtgatatccatcgcctcggcgtcactgggtctatcccatgcatctcagcaccctatccatgatgtcccgcactgtcccccactgcaggcgtgatgattccgcctccggcctacttccacaattcgctacgaggatcattttctctctccatatccaactagttgcatatcctttctcacacttacacaacttagttgatatggaaagaaaaaatgatcctctacctatttccacagttggtacaagaggaaagggccctaaaagagatgaacaataccgtatcatgtggaatgaattagaaacccttgtcagagcccatatcaacaactcagagaaacatcaaagagtcttggaatgtctgatggcatgcaggagcaaacccccagaagaggaagaacgaaagaaacgaggaagaaagagggaagacaaagaggacaagtcagagaaagcagtgaaagattatgaacaggaaaagtcttggcaagactcagagagattaaaaggaatcttagagcgtggaaaagaagaattggctgaagctgagattataaaagattcgcctgattccccagaacctccaaacaaaaaaccccttgttgaaatggatgaaactccacaagtggaaaaatcaaaagggccagtgtcgttattatccttgtggagtaatagaatcaatactgccaattccagaaaacatcaggaatttgctggacgtttgaactctgttaataacagagctgaactatatcaacatcttaaagaggaaaatgggatggagacaacagaaaatggaaaagccagccggcagtgaagagtgacttgaagaactaaatttagcatattgcaaaaatattttgtgcggaattcgatataagtacttttacagcaagatggtatagttatgttgcctggactggtttttacatttttaaaatatttcagctgtcatttttgtactaattataaaattggcacataattcaaaaatatacatttgagatgatttgtcctcccaaattatacaagtttattttatggtataaagtgttctctctggaaatgtttttaaaaaaattcttaggcttctctttgcgaaataaaactattaaaatatttgaaatgcaaaacaaagaagaat

SEQ ID NO: 424911 - DNA, 2978 bp, Homo sapiens
tccaggggaaaccggcctgggtggagagacagagaaggggagaccgggtgggtgggtcgtacgcttagggggccgtggttggtacttcgctgttggggaggctttcaggtcgcccagatcctgcttcccaatgggtgactgggaaaattagcgggtggaaaatctcgaggggtggaggctttttttttcctccttggccccgccctcttcctgttcggcgactgggacgcctggccctacgagggggaagggaggcttggccgggctatcggagagcgctgtgcgcacgcgcgagcccgagtgcgtgtgtgtgtgtgcacgcgcacgcgcgctcctgctcttaggaagcctgggaaggaccggtgtgctaggagatgatcggggaaagcatagtcccctgtctgtggcaccagacactcccgactgtgcgctgactctccccgcccagccagcagccttttccagagaggctgtggtccatagcctctgttcgttttcactgcaggaccaggcacgaaagttaaaacaaaatgaagattttttctgaatctcataaaacagtgtttgttgtggatcactgcccttatatggcagaatcttgcaggcagcatgtcgagtttgatatgctggtgaagaatagaacccaaggaatcattcctttggcccccatatctaaatcattgtggacttgctcagtagaatcttccatggaatattgtagaataatgtatgatatatttcctttcaaaaagctggtgaattttattgtgagtgactctggagcacatgttttaaattcttggactcaagaagaccaaaatttacaggagctaatggcagcattagccgctgttgggcctcctaatcctcgggcagatccagagtgctgcagtattctgcatggccttgttgcagcagtggaaactctctgcaaaattactgaataccaacatgaggctcgtactctactcatggagaatgcagaacgtgttggaaatagaggacgaataatctgtattactaatgcaaaaagtgatagtcatgtgcgaatgcttgaagactgtgtccaggaaacgattcatgaacataacaagcttgctgcaaattcagatcatctcatgcagattcaaaaatgtgagttggtcttgatccacacctacccagttggtgaagacagccttgtatctgatcgttctaaaaaagagttgtccccggttttaaccagtgaagttcatagtgttcgtgcaggacggcatcttgctaccaaattgaatattttagtacagcaacattttgacttggcttcaactactattacaaatattccaatgaaggaagaacagcatgctaacacatctgccaattatgatgtggagctacttcatcacaaagatgcacatgtagatttcctgaaaagtggtgattcgcatctaggtggcggcagtcgagaaggctcgtttaaagaaacaataacattaaagtggtgtacaccaaggacaaataacattgaattacactattgtactggagcttatcggatttcacctgtagatgtaaatagtagaccttcctcctgccttactaattttcttctaaatggtcgttctgttttattggaacaaccacgaaagtcaggttctaaagtcattagtcatatgcttagtagccatggaggagagatttttttgcacgtccttagcagttctcgatccattctagaagatccaccttcaattagtgaaggatgtggaggaagagttacagactaccggattacagattttggtgaatttatgagggaaaacagattaactccttttctagaccccagatataaaatcgatggaagtcttgaggtccctttggaacgagcaaaagatcagttagaaaaacatacccgttactggcctatgatcatttcacaaaccaccatttttaacatgcaagcggtagttccattagccagtgttattgtgaaagaatctctgacagaagaagatgtgttaaactgtcaaaaaacaatatacaacttagttgatatggaaagaaaaaatgatcctctacctatttccacagttggtacaagaggaaagggccctaaaagagatgaacaataccgtatcatgtggaatgaattagaaacccttgtcagagcccatatcaacaactcagagaaacatcaaagagtcttggaatgtctgatggcatgcaggagcaaacccccagaagaggaagaacgaaagaaacgaggaagaaagagggaagacaaagaggacaagtcagagaaagcagtgaaagattatgaacaggaaaagtcttggcaagactcagagagattaaaaggaatcttagagcgtggaaaagaagaattggctgaagctgagattataaaagattcgcctgattccccagaacctccaaacaaaaaaccccttgttgaaatggatgaaactccacaagtggaaaaatcaaaagggccagtgtcgttattatccttgtggagtaatagaatcaatactgccaattccagaaaacatcaggaatttgctggacgtttgaactctgttaataacagagctgaactatatcaacatcttaaagaggaaaatgggatggagacaacagaaaatggaaaagccagccggcagtgaagagtgacttgaagaactaaatttagcatattgcaaaaatattttgtgcggaattcgatataagtacttttacagcaagatggtatagttatgttgcctggactggtttttacatttttaaaatatttcagctgtcatttttgtactaattataaaattggcacataattcaaaaatatacatttgagatgatttgtcctcccaaattatacaagtttattttatggtataaagtgttctctctggaaatgtttttaaaaaaattcttaggcttctctttgcgaaataaaactattaaaatatttgaaatgcaaaacaaagaagaat

SEQ ID NO: 424912 - DNA, 2722 bp, Homo sapiens
tccaggggaaaccggcctgggtggagagacagagaaggggagaccgggtgggtgggtcgtacgcttagggggccgtggttggtacttcgctgttggggaggctttcaggtcgcccagatcctgcttcccaatgggtgactgggaaaattagcgggtggaaaatctcgaggggtggaggctttttttttcctccttggccccgccctcttcctgttcggcgactgggacgcctggccctacgagggggaagggaggcttggccgggctatcggagagcgctgtgcgcacgcgcgagcccgagtgcgtgtgtgtgtgtgcacgcgcacgcgcgctcctgctcttaggaagcctgggaaggaccggtgtgctaggagatgatcggggaaagcatagtcccctgtctgtggcaccagacactcccgactgtgcgctgactctccccgcccagccagcagccttttccagagaggctgtggtccatagcctctgttcgttttcactgcaggaccaggcacgaaagttaaaacaaaatgaagattttttctgaatctcataaaacagtgtttgttgtggatcactgcccttatatggcagaatcttgcaggcagcatgtcgagtttgatatgctggtgaagaatagaacccaaggaatcattcctttggcccccatatctaaatcattgtggacttgctcagtagaatcttccatggaatattgtagaataatgtatgatatatttcctttcaaaaagctggtgaattttattgtgagtgactctggagcacatgttttaaattcttggactcaagaagaccaaaatttacaggagctaatggcagcattagccgctgttgggcctcctaatcctcgggcagatccagagtgctgcagtattctgcatggccttgttgcagcagtggaaactctctgcaaaattactgaataccaacatgaggctcgtactctactcatggagaatgcagaacgtgttggaaatagaggacgaataatctgtattactaatgcaaaaagtgatagtcatgtgcgaatgcttgaagactgtgtccaggaaacgattcatgaacataacaagcttgctgcaaattcagatcatctcatgcagattcaaaaatgtgagttggtcttgatccacacctacccagttggtgaagacagccttgtatctgatcgttctaaaaaagagttgtccccggttttaaccagtgaagttcatagtgttcgtgcaggacggcatcttgctaccaaattgaatattttagtacagcaacattttgacttggcttcaactactattacaaatattccaatgaaggtgattcgcatctaggtggcggcagtcgagaaggctcgtttaaagaaacaataacattaaagtggtgtacaccaaggacaaataacattgaattacactattgtactggagcttatcggatttcacctgtagatgtaaatagtagaccttcctcctgccttactaattttcttctaaatggtcgttctgttttattggaacaaccacgaaagtcaggttctaaagtcattagtcatatgcttagtagccatggaggagagatttttttgcacgtccttagcagttctcgatccattctagaagatccaccttcaattagtgaaggatgtggaggaagagttacagactaccggattacagtagttccattagccagtgttattgtgaaagaatctctgacagaagaagatgtgttaaactgtcaaaaaacaatatacaacttagttgatatggaaagaaaaaatgatcctctacctatttccacagttggtacaagaggaaagggccctaaaagagatgaacaataccgtatcatgtggaatgaattagaaacccttgtcagagcccatatcaacaactcagagaaacatcaaagagtcttggaatgtctgatggcatgcaggagcaaacccccagaagaggaagaacgaaagaaacgaggaagaaagagggaagacaaagaggacaagtcagagaaagcagtgaaagattatgaacaggaaaagtcttggcaagactcagagagattaaaaggaatcttagagcgtggaaaagaagaattggctgaagctgagattataaaagattcgcctgattccccagaacctccaaacaaaaaaccccttgttgaaatggatgaaactccacaagtggaaaaatcaaaagggccagtgtcgttattatccttgtggagtaatagaatcaatactgccaattccagaaaacatcaggaatttgctggacgtttgaactctgttaataacagagctgaactatatcaacatcttaaagaggaaaatgggatggagacaacagaaaatggaaaagccagccggcagtgaagagtgacttgaagaactaaatttagcatattgcaaaaatattttgtgcggaattcgatataagtacttttacagcaagatggtatagttatgttgcctggactggtttttacatttttaaaatatttcagctgtcatttttgtactaattataaaattggcacataattcaaaaatatacatttgagatgatttgtcctcccaaattatacaagtttattttatggtataaagtgttctctctggaaatgtttttaaaaaaattcttaggcttctctttgcgaaataaaactattaaaatatttgaaatgcaaaacaaagaagaat

SEQ ID NO: 424913 - DNA, 1320 bp, Homo sapiens
  misc_feature (509)..(509): n is a, c, g, or t
ccatgttcctaggatgcccgtcattcatgccgttcttagagctacatgatgacgtccttgcgttcagcgccctcgctgtcgtattcccctcgcgtatggccctcggtgcgtgatatccatcgcctcggcgtcactgggtctatcccatgcatctcagcaccctatccatgatgtcccgcactgtcccccactgcaggcgtgatgattccgcctccggcctacttccacaattcgctacgaggatcattttctctctccatatccaactagttgcatatcctttctcacacttacacaacttagttgatatggaaagaaaaaatgatcctctacctatttccacagttggtacaagaggaaagggccctaaaagagatgaacaataccgtatcatgtggaatgaattagaaacccttgtcagagcccatatcaacaactcagagaaacatcaaagagtcttggaatgatctttcactgctttctctgacttgtcctctttgtcttccctntttcttcctcgtttctttcgttcttcctcttctgatggcatgcaggagcaaacccccagaagaggaagaacgaaagaaacgaggaagaaagagggaagacaaagaggacaagtcagagaaagcagtgaaagattatgaacaggaaaagtcttggcaagactcagagagattaaaaggaatcttagagcgtggaaaagaagaattggctgaagctgagattataaaagattcgcctgattccccagaacctccaaacaaaaaaccccttgttgaaatggatgaaactccacaagtggaaaaatcaaaagggccagtgtcgttattatccttgtggagtaatagaatcaatactgccaattccagaaaacatcaggaatttgctggacgtttgaactctgttaataacagagctgaactatatcaacatcttaaagaggaaaatgggatggagacaacagaaaatggaaaagccagccggcagtgaagagtgacttgaagaactaaatttagcatattgcaaaaatattttgtgcggaattcgatataagtacttttacagcaagatggtatagttatgttgcctggactggtttttacatttttaaaatatttcagctgtcatttttgtactaattataaaattggcacataattcaaaaatatacatttgagatgatttgtcctcccaaattatacaagtttattttatggtataaagtgttctctctggaaatgtttttaaaaaaattcttaggcttctctttgcgaaataaaactattaaaatatttgaaatgcaaaacaaagaagaat

SEQ ID NO: 424914 - DNA, 2232 bp, Homo sapiens
cttccccttctctgccctgctccaggcaccaggctctttccccttcagtgtctcagaggaggggacggcagcaccatggacccccgcttgtccactgtccgccagacctgctgctgcttcaatgtccgcatcgcaaccaccgccctggccatctaccatgtgatcatgagcgtcttgttgttcatcgagcactcagtagaggtggcccatggcaaggcgtcctgcaagctctcccagatgggctacctcaggatcgctgacctgatctccagcttcctgctcatcaccatgctcttcatcatcagcctgagcctactgatcggcgtagtcaagaaccgggagaagtacctgctgcccttcctgtccctgcaaatcatggactatctcctgtgcctgctcaccctgctgggctcctacattgagctgcccgcctacctcaagttggcctcccggagccgtgctagctcctccaagttccccctgatgacgctgcagctgctggacttctgcctgagcatcctgaccctctgcagctcctacatggaagtgcccacctatctcaacttcaagtccatgaaccacatgaattacctccccagccaggaggatatgcctcataaccagttcatcaagatgatgatcatcttttccatcgccttcatcactgtccttatcttcaaggtctacatgttcaagtgcgtgtggcggtgctacagattgatcaagtgcatgaactcggtggaggagaagagaaactccaagatgctccagaaggtggtcctgccgtcctacgaggaagccctgtctttgccatcgaagaccccagaggggggcccagcaccacccccatactcagaggtgtgaccctcgccaggccccagccccagtgctgggaggggtggagctgcctcataatctgcttttttgctttggtggcccctgtggcctgggtgggccctcccgcccctccctggcaggacaatctgcttgtgtctccctcgctggcctgctcctcctgcagggcctgtgagctgctcacaactgggtcaacgctttaggctgagtcactcctcgggtctctccataattcagcccaacaatgcttggtttatttcaatcagctctgacacttgtttagacgattggccattctaaagttggtgagtttgtcaagcaactatcgacttgatcagttcagccaagcaactgacaaatcaaaaacccacttgtcagttcagtaaaataatttggtcaaacaacagtctattgcattgatttataaatagttgtcagttcacatagcaatttaatcaagtaatcattaattagttaccccctatatataaatatatgtaatcaatttcttcaaatagcttgcttacatgataatcaattagccaaccatgagtcatttagaatagtgataaatagaatacacagaatagtgatgaaattcaatttaaaaaatcacgttagcctccaaaccatttaattcaaatgaacccatcaactggatgccaactctggcgaatgtaggacctctgagtggctgtataattgttaattcaaatgaaattcatttaaacagttgacaaactgtcattcaacaattagctccaggaaataacagttatttcatcataaaacagtcccttcaaacacacaattgttctgctgaagagttgtcatcaacaatccaatgctcacctattcagttgctctgtggtcagtgtggctgcataacagtggattccatgaaaggagtcattttagtgatgagctgccagtccattcccaggccaggctgtcgctggccatccattcagtcgattcagtcataggcgaatctgttctgcccgaggcttgtggtcaagcaaaaattcagccctgaaatcaggcacatctgttcgttggactaaacccacaggttagttcagtcaaagcaggcaacccccttgtgggcactgaccctgccactggggtcatggcggttgtggcagctggggaggtttggccccaacagccctcctgtgcctgcttccctgtgtgtcggggtcctccagggagctgacccagaggtggaggccacggaggcagggtctctggggactgtcggggggtacagagggagaaggctctgcaagagctccctggcaatacccccttgtgtaattgctttgtgtgcgacagggaggaagtttcaataaagcagcaacaagcttcaaaaaaaaa

SEQ ID NO: 424915 - DNA, 2971 bp, Homo sapiens
cttccccttctctgccctgctccaggcaccaggctctttccccttcagtgtctcagaggaggggacggcagcaccatggacccccgcttgtccactgtccgccagacctgctgctgcttcaatgtccgcatcgcaaccaccgccctggccatctaccatgtgatcatgagcgtcttgttgttcatcgagcactcagtagaggtggcccatggcaaggcgtcctgcaagctctcccagatgggctacctcaggatcggtaggtccaggggacgccggtggagtggcggggggaggaggacagggagggccctggccagggatagccaggctagtgttggaggcactgccacctctccatggacgatggatgacctctggcaagtgtcttcctttcttggggcctcagctgtttcatccgcaaatggggatgttccacctgaccccacccacatctgcaggtggtgagagcagatggaatggcactttgcaaatccccaccagctggtaaaggtgatagcctcactcttctgcttaaagccgtcagtggctgctcatcacactagaataaaatggaaactcctcaccataggatccagcctctgcccacctctctgacagcatctccctgcgattctccaccccacaccttgctccagccacactgacctcaccaaccctgtccctgtctcaggccgattcctcattgctctcaggccactccccagggatgccttcctcagcctcaccctggctgaagtggaccccagcctgcacctccagcccagcaccctctgtcgcatcctcctgtgctatgtgtgatgttctgcttttgtctttgtactcactccagactcaggactgcaagagggcagggcctgggctttcctgtgcatcctcatgtccccaaaccagtggttccccaagtgtggtcctgggagcctggctggggtcccaggggcacccctgagcacctccctgctctccttgcctttcagctgacctgatctccagcttcctgctcatcaccatgctcttcatcatcagcctgagcctactgatcggcgtagtcaagaaccgggagaagtacctgctgcccttcctgtccctgcaaatcatggactatctcctgtgcctgctcaccctgctgggctcctacattgagctgcccgcctacctcaagttggcctcccggagccgtgctagctcctccaagttccccctgatgacgctgcagctgctggacttctgcctgagcatcctgaccctctgcagctcctacatggaagtgcccacctatctcaacttcaagtccatgaaccacatgaattacctccccagccaggaggatatgcctcataaccagttcatcaagatgatgatcatcttttccatcgccttcatcactgtccttatcttcaaggtctacatgttcaagtgcgtgtggcggtgctacagattgatcaagtgcatgaactcggtggaggagaagagaaactccaagatgctccagaaggtggtcctgccgtcctacgaggaagccctgtctttgccatcgaagaccccagaggggggcccagcaccacccccatactcagaggtgtgaccctcgccaggccccagccccagtgctgggaggggtggagctgcctcataatctgcttttttgctttggtggcccctgtggcctgggtgggccctcccgcccctccctggcaggacaatctgcttgtgtctccctcgctggcctgctcctcctgcagggcctgtgagctgctcacaactgggtcaacgctttaggctgagtcactcctcgggtctctccataattcagcccaacaatgcttggtttatttcaatcagctctgacacttgtttagacgattggccattctaaagttggtgagtttgtcaagcaactatcgacttgatcagttcagccaagcaactgacaaatcaaaaacccacttgtcagttcagtaaaataatttggtcaaacaacagtctattgcattgatttataaatagttgtcagttcacatagcaatttaatcaagtaatcattaattagttaccccctatatataaatatatgtaatcaatttcttcaaatagcttgcttacatgataatcaattagccaaccatgagtcatttagaatagtgataaatagaatacacagaatagtgatgaaattcaatttaaaaaatcacgttagcctccaaaccatttaattcaaatgaacccatcaactggatgccaactctggcgaatgtaggacctctgagtggctgtataattgttaattcaaatgaaattcatttaaacagttgacaaactgtcattcaacaattagctccaggaaataacagttatttcatcataaaacagtcccttcaaacacacaattgttctgctgaagagttgtcatcaacaatccaatgctcacctattcagttgctctgtggtcagtgtggctgcataacagtggattccatgaaaggagtcattttagtgatgagctgccagtccattcccaggccaggctgtcgctggccatccattcagtcgattcagtcataggcgaatctgttctgcccgaggcttgtggtcaagcaaaaattcagccctgaaatcaggcacatctgttcgttggactaaacccacaggttagttcagtcaaagcaggcaacccccttgtgggcactgaccctgccactggggtcatggcggttgtggcagctggggaggtttggccccaacagccctcctgtgcctgcttccctgtgtgtcggggtcctccagggagctgacccagaggtggaggccacggaggcagggtctctggggactgtcggggggtacagagggagaaggctctgcaagagctccctggcaatacccccttgtgtaattgctttgtgtgcgacagggaggaagtttcaataaagcagcaacaagcttcaaaaaaaaa

SEQ ID NO: 424916 - DNA, 2178 bp, Homo sapiens
cttccccttctctgccctgctccaggcaccaggctctttccccttcagtgtctcagaggaggggacggcagcaccatggacccccgcttgtccactgtccgccagacctgctgctgcttcaatgtccgcatcgcaaccaccgccctggccatctaccatgtgatcatgagcgtcttgttgttcatcgagcactcagtagaggtggcccatggcaaggcgtcctgcaagctctcccagatgggctacctcaggatcgctgacctgatctccagcttcctgctcatcaccatgctcttcatcatcagcctgagcctactgatcggcgtagtcaagaaccgggagaagtacctgctgcccttcctgtccctgcaaatcatggactatctcctgtgcctgctcaccctgctgggctcctacattgagctgcccgcctacctcaagttggcctcccggagccgtgctagctcctccaagttccccctgatgacgctgcagctgctggacttctgcctgagcatcctgaccctctgcagctcctacatggaagtgcccacctatctcaacttcaagtccatgaaccacatgaattacctccccagccaggaggatatgcctcataaccagttcatcaagatgatgatcatcttttccatcgccttcatcactgtccttatcttcaaggtctacatgttcaagtgcgtgtggcggtgctacagattgatcaagtgcatgaactcggtggaggagaagagaaactccaagatgctccagaaggtggtcctgccgtcctacgaggaagccctgtctttgccatcgaagaccccagaggggggcccagcaccacccccatactcagaggtgtgaccctcgccaggccccagccccagtgctgggaggggtggagctgcctcataatctgcttttttgctttggtggcccctgtggcctgggtgggccctcccgcccctccctggcaggacaatctgcttgtgtctccctcgctggcctgctcctcctgcagggcctgtgagctgctcacaactgggtcaacgctttaggctgagtcactcctcgggtctctccataattcagcccaacaatgcttggtttatttcaatcagctctgacacttgtttagacgattggccattctaaagttggtgagtttgtcaagcaactatcgacttgatcagttcagccaagcaactgacaaatcaaaaacccacttgtcagttcagtaaaataatttggtcaaacaacagtctattgcattgatttataaatagttgtcagttcacatagcaatttaatcaagtaatcattaattagttaccccctatatataaatatatgtaatcaatttcttcaaatagcttgcttacatgataatcaattagccaaccatgagtcatttagaatagtgataaatagaatacacagaatagtgatgaaattcaatttaaaaaatcacgttagcctccaaaccatttaattcaaatgaacccatcaactggatgccaactctggcgaatgtaggacctctgagtggctgtataattgttaattcaaatgaaattcatttaaacagttgacaaactgtcattcaacaattagctccaggaaataacagttatttcatcataaaacagtcccttcaaacacacaattgttctgctgaagagttgtcatcaacaatccaatgctcacctattcagttgctctgtggtcagtgtggctgcataacagtggattccatgaaaggagtcattttagtgatgagctgccagtccattcccaggccaggctgtcgctggccatccattcagtcgattcagtcataggcgaatctgttctgcccgaggcttgtggtcaagcaaattcagtcaaagcaggcaacccccttgtgggcactgaccctgccactggggtcatggcggttgtggcagctggggaggtttggccccaacagccctcctgtgcctgcttccctgtgtgtcggggtcctccagggagctgacccagaggtggaggccacggaggcagggtctctggggactgtcggggggtacagagggagaaggctctgcaagagctccctggcaatacccccttgtgtaattgctttgtgtgcgacagggaggaagtttcaataaagcagcaacaagcttcaaaaaaaaa

SEQ ID NO: 424917 - DNA, 2049 bp, Homo sapiens
cttccccttctctgccctgctccaggcaccaggctctttccccttcagtgtctcagaggaggggacggcagcaccatggacccccgcttgtccactgtccgccagacctgctgctgcttcaatgtccgcatcgcaaccaccgccctggccatctaccatgtgatcatgagcgtcttgttgttcatcgagcactcagtagaggtggcccatggcaaggcgtcctgcaagctctcccagatgggctacctcaggatcgctgacctgatctccagcttcctgctcatcaccatgctcttcatcatcagcctgagcctactgatcggcgtagtcaagaaccgggagaagtacctgctgcccttcctgtccctgcaaatcatggactatctcctgtgcctgctcaccctgctgggctcctacattgagctgcccgcctacctcaagttggcctcccggagccgtgctagctcctccaagttccccctgatgacgctgcagctgctggacttctgcctgagcatcctgaccctctgcagctcctacatggaagtgcccacctatctcaacttcaagtccatgaaccacatgaattacctccccagccaggaggatatgcctcataaccagttcatcaagatgatgatcatcttttccatcgccttcatcactgtccttatcttcaaggtctacatgttcaagtgcgtgtggcggtgctacagattgatcaagtgcatgaactcggtggaggagaagagaaactccaagatgctccagaaggtggtcctgccgtcctacgaggaagccctgtctttgccatcgaagaccccagaggggggcccagcaccacccccatactcagaggtgtgaccctcgccaggccccagccccagtgctgggaggggtggagctgcctcataatctgcttttttgctttggtggcccctgtggcctgggtgggccctcccgcccctccctggcaggacaatctgcttgtgtctccctcgctggcctgctcctcctgcagggcctgtgagctgctcacaactgggtcaacgctttaggctgagtcactcctcgggtctctccataattcagcccaacaatgcttggtttatttcaatcagctctgacacttgtttagacgattggccattctaaagttggtgagtttgtcaagcaactatcgacttgatcagttcagccaagcaactgacaaatcaaaaacccacttgtcagttcagtaaaataatttggtcaaacaacagtctattgcattgatttataaatagttgtcagttcacatagcaatttaatcaagtaatcattaattagttaccccctatatataaatatatgtaatcaatttcttcaaatagcttgcttacatgataatcaattagccaaccatgagtcatttagaatagtgataaatagaatacacagaatagtgatgaaattcaatttaaaaaatcacgttagcctccaaaccatttaattcaaatgaacccatcaaaatccaatgctcacctattcagttgctctgtggtcagtgtggctgcataacagtggattccatgaaaggagtcattttagtgatgagctgccagtccattcccaggccaggctgtcgctggccatccattcagtcgattcagtcataggcgaatctgttctgcccgaggcttgtggtcaagcaaaaattcagccctgaaatcaggcacatctgttcgttggactaaacccacaggttagttcagtcaaagcaggcaacccccttgtgggcactgaccctgccactggggtcatggcggttgtggcagctggggaggtttggccccaacagccctcctgtgcctgcttccctgtgtgtcggggtcctccagggagctgacccagaggtggaggccacggaggcagggtctctggggactgtcggggggtacagagggagaaggctctgcaagagctccctggcaatacccccttgtgtaattgctttgtgtgcgacagggaggaagtttcaataaagcagcaacaagcttcaaaaaaaaa

SEQ ID NO: 424918 - DNA, 2607 bp, Homo sapiens
atactcccttactacatatccgtgtataagtcattcatttaatcttgcagcctccgtttcctcaactgcagaatggaaatcaaaactccaacctctcaagattgctccaaggattaaatgaccaggcatccaaatcgcttagttcagtgtcagtacatagtgggcactcgataaaaaccgattgtaacactactggaatacaggccgcgaggctatgcgttcagatctggagaccctgctgggacagaccagagataattctgtctcgctcacctggctttggcaacggaccgccccggtgcacgaagcgcagggcggtcgcaggagctggctgagcagcgaagcccaggccctcctgggaagaagtccgagcaggggcatcgcgcggcaggacgccggctttccgggacaggaacaaaaggcctgggaaggaggcgggtcagacaccaggaagggtggagggcactgcaaaggcggaacccgcgcaccagggaaaactcgggcgtttgcgcacctcactagtcacgaaggctgaggtgggatcctcccaagttcccttagtagccagcttcggcacttccgggaggagccggaaataatttttgtgctcggcggaggctctctaggcgtgcgacccagcgactcgatagccggaagtcatccttgctgaggctggggcaaccaccgcaggtcgagacagcaggcggctcaagtggacagccgggatggcagagcgtgcggcgctggaggagctggtgaaacttcagggagagcgcgtgcgaggcctcaagcagcagaaggccagcgccgagctgatcgaggaggaggtggcgaaactcctgaaactgaaggcacagctgggtcctgatgaaagcaaacagaaatttgtgctcaaaacccccaagggcacaagagactatagtccccggcagatggcagttcgcgagaaggtgtttgacgtaatcatccgttgcttcaagcgccacggtgcagaagtcattgatacacctgtatttgaactaaaggaaacactgatgggaaagtatggggaagactccaagcttatctatgacctgaaggaccagggcggggagctcctgtcccttcgctatgacctcactgttccttttgctcggtatttggcaatgaataaactgaccaacattaaacgctaccacatagcaaaggtatatcggcgggataacccagccatgacccgtggccgataccgggaattctaccagtgtgattttgacattgctgggaactttgatcccatgatccctgatgcagagtgcctgaagatcatgtgcgagatcctgagttcacttcagataggcgacttcctggtcaaggtaaacgatcgacgcattctagatgggatgtttgctatctgtggtgtttctgacagcaagttccgtaccatctgctcctcagtagacaagctggacaaggtgtcctgggaagaggtgaagaatgagatggtgggagagaagggccttgcacctgaggtggctgaccgcattggggactatgtccagcaacatggtggggtatccctggtggaacagctgctccaggatcctaaactatcccaaaacaagcaggccttggagggcctgggagacctgaagttgctctttgagtacctgaccctatttggcattgatgacaaaatctcctttgacctgagccttgctcgagggctggattactacactggggtgatctatgaggcagtgctgctacagaccccagcccaggcaggggaagagcccctgggtgtgggcagtgtggctgctggaggacgctatgatgggctagtgggcatgttcgaccccaaagggcgcaaggtgccatgtgtggggctcagcattggggtggagcggattttctccatcgtggaacagagactagaggctttggaggagaagatacggaccacggagacacaggtgcttgtggcatctgcacagaagaagctgctagaggaaagactaaagcttgtctcagaactgtgggatgctgggatcaaggctgagctgctgtacaagaagaacccaaagctactgaaccagttacagtactgtgaggaggcaggcatcccactggtggctatcatcggcgagcaggaactcaaggatggggtcatcaagctccgttcagtgacgagcagggaagaggtggatgtccgaagagaagaccttgtggaggaaatcaaaaggagaacaggccagcccctctgcatctgctgaactgaacaaactatcagaggaaaggaagtgggactggcactatttgaggttaagacaaactgcatatgtacttcaattgctttgcacttttccgtttcagcggaagacctgaagagtggtcagaacagagcctttgatttttattatggttattttattgattattactggcaaaaacggccaggtacaacacctttttcatacaaggcccaggaggcttagtccagtctgtgctcctgggctacaaggacccagcctgagatggtcccatctgcagggccccgcaccagttggagcagatgcctccccaccaccaattgccaaaggtccaataaaatgcctcaaccacgga

SEQ ID NO: 424919 - DNA, 2902 bp, Homo sapiens
atactcccttactacatatccgtgtataagtcattcatttaatcttgcagcctccgtttcctcaactgcagaatggaaatcaaaactccaacctctcaagattgctccaaggattaaatgaccaggcatccaaatcgcttagttcagtgtcagtacatagtgggcactcgataaaaaccgattgtaacactactggaatacaggccgcgaggctatgcgttcagatctggagaccctgctgggacagaccagagataattctgtctcgctcacctggctttggcaacggaccgccccggtgcacgaagcgcagggcggtcgcaggagctggctgagcagcgaagcccaggccctcctgggaagaagtccgagcaggggcatcgcgcggcaggacgccggctttccgggacaggaacaaaaggcctgggaaggaggcgggtcagacaccaggaagggtggagggcactgcaaaggcggaacccgcgcaccagggaaaactcgggcgtttgcgcacctcactagtcacgaaggctgaggtgggatcctcccaagttcccttagtagccagcttcggcacttccgggaggagccggaaataatttttgtgctcggcggaggctctctaggcgtgcgacccagcgactcgatagccggaagtcatccttgctgaggctggggcaaccaccgcaggtcgagacagcaggcggctcaagtggacagccgggatggcagagcgtgcggcgctggaggagctggtgaaacttcagggagagcgcgtgcgaggcctcaagcagcagaaggccagcgccgagctgatcgaggaggaggtggcgaaactcctgaaactgaaggcacagctgggtcctgatgaaagcaaacagaaatttgtgctcaaaacccccaagggcacaagagactatagtccccggcagatggcagttcgcgagaaggtgtttgacgtaatcatccgttgcttcaagcgccacggtgcagaagtcattgatacacctgtatttgaactaaaggaaacactgatgggaaagtatggggaagactccaagcttatctatgacctgaaggaccagggcggggagctcctgtcccttcgctatgacctcactgttccttttgctcggtatttggcaatgaataaactgaccaacattaaacgctaccacatagcaaaggtatatcggcgggataacccagccatgacccgtggccgataccgggaattctaccagtgtgattttgacattgctgggaactttgatcccatgatccctgatgcagagtgcctgaagatcatgtgcgagatcctgagttcacttcagataggcgacttcctggtcaaggtaaacgatcgacgcattctagatgggatgtttgctatctgtggtgtttctgacagcaagttccgtaccatctgctcctcagtagacaagctggacaaggtgtcctgggaagaggtgaagaatgagatggtgggagagaagggccttgcacctgaggtggctgaccgcattggggactatgtccagcaacatggtggggtatccctggtggaacagctgctccaggatcctaaactatcccaaaacaagcaggccttggagggcctgggagacctgaagttgctctttgagtacctgaccctatttggcattgatgacaaaatctcctttgacctgagccttgctcgagggctggattactacactggggtgatctatgaggcagtgctgctacagaccccagcccaggcaggggaagagcccctgggtgtgggcagtgtggctgctggaggacgctatgatgggctagtgggcatgttcgaccccaaagggcgcaaggtgccatgtgtggggctcagcattggggtggagcggattttctccatcgtggaacagagactagaggctttggaggagaagatacggaccacggagacacaggtgcttgtggcatctgcacagaagaagctgctagaggaaagactaaagcttgtctcagaactgtgggatgctgggatcaaggctgagctgctgtacaagaagaacccaaagctactgaaccagttacagtactgtgaggaggcaggcatcccactggtggctatcatcggcgagcaggaactcaaggatggggtcatcaagctccgttcagtgacgagcagggaagaggtggatgtccgaagagaagaccttgtggaggaaatcaaaaggagaacaggccagcccctctgcatctgctgaactgaacaaactatcagaggaaaggaagtgggactggcactatttgaggttaagacaaactgcatatgtacttcaattgctttgcacttttccgtttcagcggaagacctgaagagtggtcagaacagagcctttgatttttattatggttattttattgattattactggcaaaaacggccaggtacaacacctttttcatacaaggcccaggaggcttagtccagtctgtgctcctgggctacaaggacccagcctgagatggtcccatctgcagggccccgcaccagttggagcagatgcctccccaccaccaattgccaaaggtccaataaaatgcctcaaccacggagtctgcgtgtgtcagtgatgcctagccccgccttccccagcagaccaatgtagggatggaaaagggagaaaaacagtaaacttgtgaccctgaggttcttgtctccagcgtccaccctgcggcttgggagctcctcctggggaggcagcccccgtacatacgcacccgcgactttgcagctttcacctgaaggtctgagcgaagcccgggcggcgcacgtgcagtggatacctccacccccctgggaggcggggtcgcgctcagagccaatgagagcttgcggggtggaggggta

SEQ ID NO: 424920 - DNA, 2994 bp, Homo sapiens
atactcccttactacatatccgtgtataagtcattcatttaatcttgcagcctccgtttcctcaactgcagaatggaaatcaaaactccaacctctcaagattgctccaaggattaaatgaccaggcatccaaatcgcttagttcagtgtcagtacatagtgggcactcgataaaaaccgattgtaacactactggaatacaggccgcgaggctatgcgttcagatctggagaccctgctgggacagaccagagataattctgtctcgctcacctggctttggcaacggaccgccccggtgcacgaagcgcagggcggtcgcaggagctggctgagcagcgaagcccaggccctcctgggaagaagtccgagcaggggcatcgcgcggcaggacgccggctttccgggacaggaacaaaaggcctgggaaggaggcgggtcagacaccaggaagggtggagggcactgcaaaggcggaacccgcgcaccagggaaaactcgggcgtttgcgcacctcactagtcacgaaggctgaggtgggatcctcccaagttcccttagtagccagcttcggcacttccgggaggagccggaaataatttttgtgctcggcggaggctctctaggcgtgcgacccagcgactcgatagccggaagtcatccttgctgaggctggggcaaccaccgcaggtcgagacagcaggcggctcaagtggacagccgggatggcagagcgtgcggcgctggaggagctggtgaaacttcagggagagcgcgtgcgaggcctcaagcagcagaaggccagcgccgagctgatcgaggaggaggtggcgaaactcctgaaactgaaggcacagctgggtcctgatgaaagcaaacagaaatttgtgctcaaaacccccaagggcacaagagactatagtccccggcagatggcagttcgcgagaaggtgtttgacgtaatcatccgttgcttcaagcgccacggtgcagaagtcattgatacacctgtatttgaactaaaggaaacactgatgggaaagtatggggaagactccaagcttatctatgacctgaaggaccagggcggggagctcctgtcccttcgctatgacctcactgttccttttgctcggtatttggcaatgaataaactgaccaacattaaacgctaccacatagcaaaggtatatcggcgggataacccagccatgacccgtggccgataccgggaattctaccagtgtgattttgacattgctgggaactttgatcccatgatccctgatgcagagtgcctgaagatcatgtgcgagatcctgagttcacttcagataggcgacttcctggtcaaggtaaacgatcgacgcattctagatgggatgtttgctatctgtggtgtttctgacagcaagttccgtaccatctgctcctcagtagacaagctggacaaggtgtcctgggaagaggtgaagaatgagatggtgggagagaagggccttgcacctgaggtggctgaccgcattggggactatgtccagcaacatggtggggtatccctggtggaacagctgctccaggatcctaaactatcccaaaacaagcaggccttggagggcctgggagacctgaagttgctctttgagtacctgaccctatttggcattgatgacaaaatctcctttgacctgagccttgctcgagggctggattactacactggggtgatctatgaggcagtgctgctacagaccccagcccaggcaggggaagagcccctgggtgtgggcagtgtggctgctggaggacgctatgatgggctagtgggcatgttcgaccccaaagggcgcaaggtgccatgtgtggggctcagcattggggtggagcggattttctccatcgtggaacagagactagaggtaggtcctaggaggtaggtagaagatagtctgagcaggtggtggcacctaagctatctgatctccaagggagcaagtggtgctgctttgggcagggagcatctcacagaaatggagaaaagattattgctctttttcacagatttctaccccattatatgtaagttttatggatctttaatccataatctttctgcactcaatcctctgctctgggtctctacttccttcagggctgtcacaaacctgggctggtgtatccaagacttagatcttcctcatgatacggaatacttaacattttactgccttgtgccaggcactgtgcttggtgcttttcatgcattatcaaaatataattgttactacagccctgtgagagtagctaattttattaattgcattttccagatgagaacactgaagcattatagatcaaataatttgcttaaggccatgaaacttgtaagtggtagggtcagaatttgaatccaggcagtctgactccaaagtcttgccactaaccacactgcaatactgtctctaaatgggaagcatgtgtctgaggccctgggatccctcagatggctaccgtgactctctagcacctagagtaacaccaaggaagcctcttgtagcctcaagccctcctttgttgctgctggtcttaagtggctggttgcatttcatcttctgggaaatgctctggcaacctccccacagtcctatgccttttctctagggtggaaaccacccatttcccagttgagatcatttttccagtaggcatcttacattctaagaactatgaaaatagttttcctgaaaaagacaagggaagcagcagcagcattctcctttccccacacccatatacacgcctgtgccctgtaactgaagtgtgagaggcacagtgtcataaatgggtagatagtaagtggggactaaaactgtcaagggtgatctaattggggtgggctcatagtagtacttctgtgtgaatgctttggtggacccttaaggtactacatggaccagcctgggcaacatgatgagaccctgtctctacagatta

SEQ ID NO: 424921 - DNA, 2547 bp, Homo sapiens
atactcccttactacatatccgtgtataagtcattcatttaatcttgcagcctccgtttcctcaactgcagaatggaaatcaaaactccaacctctcaagattgctccaaggattaaatgaccaggcatccaaatcgcttagttcagtgtcagtacatagtgggcactcgataaaaaccgattgtaacactactggaatacaggccgcgaggctatgcgttcagatctggagaccctgctgggacagaccagagataattctgtctcgctcacctggctttggcaacggaccgccccggtgcacgaagcgcagggcggtcgcaggagctggctgagcagcgaagcccaggccctcctgggaagaagtccgagcaggggcatcgcgcggcaggacgccggctttccgggacaggaacaaaaggcctgggaaggaggcgggtcagacaccaggaagggtggagggcactgcaaaggcggaacccgcgcaccagggaaaactcgggcgtttgcgcacctcactagtcacgaaggctgaggtgggatcctcccaagttcccttagtagccagcttcggcacttccgggaggagccggaaataatttttgtgctcggcggaggctctctaggcgtgcgacccagcgactcgatagccggaagtcatccttgctgaggctggggcaaccaccgcaggtcgagacagcaggcggctcaagtggacagccgggatggcagagcgtgcggcgctggaggagctggtgaaacttcagggagagcgcgtgcgaggcctcaagcagcagaaggccagcgccgagctgatcgaggaggaggtggcgaaactcctgaaactgaaggcacagctgggtcctgatgaaagcaaacagaaatttgtgctcaaaacccccaagggcacaagagactatagtccccggcagatggcagttcgcgagaaggtgtttgacgtaatcatccgttgcttcaagcgccacggtgcagaagtcattgatacacctgtatttgaactaaaggaaacactgatgggaaagtatggggaagactccaagcttatctatgacctgaaggaccagggcggggagctcctgtcccttcgctatgacctcactgttccttttgctcggtatttggcaatgaataaactgaccaacattaaacgctaccacatagcaaaggattttgacattgctgggaactttgatcccatgatccctgatgcagagtgcctgaagatcatgtgcgagatcctgagttcacttcagataggcgacttcctggtcaaggtaaacgatcgacgcattctagatgggatgtttgctatctgtggtgtttctgacagcaagttccgtaccatctgctcctcagtagacaagctggacaaggtgtcctgggaagaggtgaagaatgagatggtgggagagaagggccttgcacctgaggtggctgaccgcattggggactatgtccagcaacatggtggggtatccctggtggaacagctgctccaggatcctaaactatcccaaaacaagcaggccttggagggcctgggagacctgaagttgctctttgagtacctgaccctatttggcattgatgacaaaatctcctttgacctgagccttgctcgagggctggattactacactggggtgatctatgaggcagtgctgctacagaccccagcccaggcaggggaagagcccctgggtgtgggcagtgtggctgctggaggacgctatgatgggctagtgggcatgttcgaccccaaagggcgcaaggtgccatgtgtggggctcagcattggggtggagcggattttctccatcgtggaacagagactagaggctttggaggagaagatacggaccacggagacacaggtgcttgtggcatctgcacagaagaagctgctagaggaaagactaaagcttgtctcagaactgtgggatgctgggatcaaggctgagctgctgtacaagaagaacccaaagctactgaaccagttacagtactgtgaggaggcaggcatcccactggtggctatcatcggcgagcaggaactcaaggatggggtcatcaagctccgttcagtgacgagcagggaagaggtggatgtccgaagagaagaccttgtggaggaaatcaaaaggagaacaggccagcccctctgcatctgctgaactgaacaaactatcagaggaaaggaagtgggactggcactatttgaggttaagacaaactgcatatgtacttcaattgctttgcacttttccgtttcagcggaagacctgaagagtggtcagaacagagcctttgatttttattatggttattttattgattattactggcaaaaacggccaggtacaacacctttttcatacaaggcccaggaggcttagtccagtctgtgctcctgggctacaaggacccagcctgagatggtcccatctgcagggccccgcaccagttggagcagatgcctccccaccaccaattgccaaaggtccaataaaatgcctcaaccacgga

SEQ ID NO: 424922 - DNA, 2499 bp, Homo sapiens
atactcccttactacatatccgtgtataagtcattcatttaatcttgcagcctccgtttcctcaactgcagaatggaaatcaaaactccaacctctcaagattgctccaaggattaaatgaccaggcatccaaatcgcttagttcagtgtcagtacatagtgggcactcgataaaaaccgattgtaacactactggaatacaggccgcgaggctatgcgttcagatctggagaccctgctgggacagaccagagataattctgtctcgctcacctggctttggcaacggaccgccccggtgcacgaagcgcagggcggtcgcaggagctggctgagcagcgaagcccaggccctcctgggaagaagtccgagcaggggcatcgcgcggcaggacgccggctttccgggacaggaacaaaaggcctgggaaggaggcgggtcagacaccaggaagggtggagggcactgcaaaggcggaacccgcgcaccagggaaaactcgggcgtttgcgcacctcactagtcacgaaggctgaggtgggatcctcccaagttcccttagtagccagcttcggcacttccgggaggagccggaaataatttttgtgctcggcggaggctctctaggcgtgcgacccagcgactcgatagccggaagtcatccttgctgaggctggggcaaccaccgcaggtcgagacagcaggcggctcaagtggacagccgggatggcagagcgtgcggcgctggaggagctggtgaaacttcagggagagcgcgtgcgaggcctcaagcagcagaaggccagcgccgagctgatcgaggaggaggtggcgaaactcctgaaactgaaggcacagctgggtcctgatgaaagcaaacagaaatttgtgctcaaaacccccaagggcacaagagactatagtccccggcagatggcagttcgcgagaaggtgtttgacgtaatcatccgttgcttcaagcgccacggtgcagaagtcattgatacacctgtatttgaactaaaggaaacactgatgggaaagtatggggaagactccaagcttatctatgacctgaaggaccagggcggggagctcctgtcccttcgctatgacctcactgttccttttgctcggtatttggcaatgaataaactgaccaacattaaacgctaccacatagcaaaggtatatcggcgggataacccagccatgacccgtggccgataccgggaattctaccagtgtgtaaacgatcgacgcattctagatgggatgtttgctatctgtggtgtttctgacagcaagttccgtaccatctgctcctcagtagacaagctggacaaggtgtcctgggaagaggtgaagaatgagatggtgggagagaagggccttgcacctgaggtggctgaccgcattggggactatgtccagcaacatggtggggtatccctggtggaacagctgctccaggatcctaaactatcccaaaacaagcaggccttggagggcctgggagacctgaagttgctctttgagtacctgaccctatttggcattgatgacaaaatctcctttgacctgagccttgctcgagggctggattactacactggggtgatctatgaggcagtgctgctacagaccccagcccaggcaggggaagagcccctgggtgtgggcagtgtggctgctggaggacgctatgatgggctagtgggcatgttcgaccccaaagggcgcaaggtgccatgtgtggggctcagcattggggtggagcggattttctccatcgtggaacagagactagaggctttggaggagaagatacggaccacggagacacaggtgcttgtggcatctgcacagaagaagctgctagaggaaagactaaagcttgtctcagaactgtgggatgctgggatcaaggctgagctgctgtacaagaagaacccaaagctactgaaccagttacagtactgtgaggaggcaggcatcccactggtggctatcatcggcgagcaggaactcaaggatggggtcatcaagctccgttcagtgacgagcagggaagaggtggatgtccgaagagaagaccttgtggaggaaatcaaaaggagaacaggccagcccctctgcatctgctgaactgaacaaactatcagaggaaaggaagtgggactggcactatttgaggttaagacaaactgcatatgtacttcaattgctttgcacttttccgtttcagcggaagacctgaagagtggtcagaacagagcctttgatttttattatggttattttattgattattactggcaaaaacggccaggtacaacacctttttcatacaaggcccaggaggcttagtccagtctgtgctcctgggctacaaggacccagcctgagatggtcccatctgcagggccccgcaccagttggagcagatgcctccccaccaccaattgccaaaggtccaataaaatgcctcaaccacgga

SEQ ID NO: 424923 - DNA, 770 bp, Homo sapiens
agtgacgagcagggaagaggtggatgtccgaagagaagaccttgtggagcggattttctccatcgtggaacagagactagaggctttggaggagaagatacggaccacggagacacaggtgcttgtggcatctgcacagaagaagctgctagaggaaagactaaagcttgtctcagaactgtgggatgctgggatcaaggctgagctgctgtacaagaagaacccaaagctactgaaccagttacagtactgtgaggaggcaggcatcccactggtggctatcatcggcgagcaggaactcaaggatggggtcatcaagctccgttcagtgacgagcagggaagaggtggatgtccgaagagaagaccttgtggaggaaatcaaaaggagaacaggccagcccctctgcatctgctgaactgaacaaactatcagaggaaaggaagtgggactggcactatttgaggttaagacaaactgcatatgtacttcaattgctttgcacttttccgtttcagcggaagacctgaagagtggtcagaacagagcctttgatttttattatggttattttattgattattactggcaaaaacggccaggtacaacacctttttcatacaaggcccaggaggcttagtccagtctgtgctcctgggctacaaggacccagcctgagatggtcccatctgcagggccccgcaccagttggagcagatgcctccccaccaccaattgccaaaggtccaataaaatgcctcaaccacgga

SEQ ID NO: 424924 - DNA, 1535 bp, Homo sapiens
atactcccttactacatatccgtgtataagtcattcatttaatcttgcagcctccgtttcctcaactgcagaatggaaatcaaaactccaacctctcaagattgctccaaggattaaatgaccaggcatccaaatcgcttagttcagtgtcagtacatagtgggcactcgataaaaaccgattgtaacactactggaatacaggccgcgaggctatgcgttcagatctggagaccctgctgggacagaccagagataattctgtctcgctcacctggctttggcaacggaccgccccggtgcacgaagcgcagggcggtcgcaggagctggctgagcagcgaagcccaggccctcctgggaagaagtccgagcaggggcatcgcgcggcaggacgccggctttccgggacaggaacaaaaggcctgggaaggaggcgggtcagacaccaggaagggtggagggcactgcaaaggcggaacccgcgcaccagggaaaactcgggcgtttgcgcacctcactagtcacgaaggctgaggtgggatcctcccaagttcccttagtagccagcttcggcacttccgggaggagccggaaataatttttgtgctcggcggaggctctctaggcgtgcgacccagcgactcgatagccggaagtcatccttgctgaggctggggcaaccaccgcaggtcgagacagcaggcggctcaagtggacagccgggatggcagagcgtgcggcgctggaggagctggtgaaacttcagggagagcgcgtgcgaggcctcaagcagcagaaggccagcgccgagctgatcgaggaggaggtggcgaaactcctgaaactgaaggcacagctgggtcctgatgaaagcaaacagaaatttgtgctcaaaacccccaagggcacaagagactatagtccccggcagatggcagttcgcgagaaggtgtttgacgtaatcatccgttgcttcaagcgccacggtgcagaagtcattgatacacctgtatttgaactaaaggaaacactgatgggaaagtatggggaagactccaagcttatctatgacctgaaggaccagggcggggagctcctgtcccttcgctatgacctcactgtatctttctaaacttgggctcttgagactttggatggattggcactcacttggctcaggtttaagaatggtagagtaggtaggatcaaatatgaggcctttggcgattaggggaattatttctctaaaccaggagtggaactttggctaaacagagcatacacatccttagaaatcttctgaatcctgagtgagacctcagcttgatgtcagggcccagttccaactctacagtcatcccctggctccagaatacctctcccctgccctgtccagtgaacaaaattcttcttaatggactagcaacacatttcccttgtctccaagctacacagagaatcatctgcttagaaatcccatatgggggcctttttctggtcgcctttttctggtctgtggccaacctgcccagcc

SEQ ID NO: 424925 - DNA, 1094 bp, Homo sapiens
atactcccttactacatatccgtgtataagtcattcatttaatcttgcagcctccgtttcctcaactgcagaatggaaatcaaaactccaacctctcaagattgctccaaggattaaatgaccaggcatccaaatcgcttagttcagtgtcagtacatagtgggcactcgataaaaaccgattgtaacactactggaatacaggccgcgaggctatgcgttcagatctggagaccctgctgggacagaccagagataattctgtctcgctcacctggctttggcaacggaccgccccggtgcacgaagcgcagggcggtcgcaggagctggctgagcagcgaagcccaggccctcctgggaagaagtccgagcaggggcatcgcgcggcaggacgccggctttccgggacaggaacaaaaggcctgggaaggaggcgggtcagacaccaggaagggtggagggcactgcaaaggcggaacccgcgcaccagggaaaactcgggcgtttgcgcacctcactagtcacgaaggctgaggtgggatcctcccaagttcccttagtagccagcttcggcacttccgggaggagccggaaataatttttgtgctcggcggaggctctctaggcgtgcgacccagcgactcgatagccggaagtcatccttgctgaggctggggcaaccaccgcaggtcgagacagcaggcggctcaagtggacagccgggatggcagagcgtgcggcgctggaggagctggtgaaacttcagggagagcgcgtgcgaggcctcaagcagcagaaggccagcgccgagctgatcgaggaggaggtggcgaaactcctgaaactgaaggcacagctgggtcctgatgaaagcaaacagaaatttgtgctcaaaacccccaaggtcattgaggaggatctgaaatgctgcagaggagaggacagtcgctctgggcgctgggctggactggactctacctgagtcattctgggatggcaaagtgatggcagaaactaggccagctgggtgatcaggggagtcagcctgctgctgctactccttcgttcattcaataaatgtgtatttagcgct

SEQ ID NO: 424926 - DNA, 1986 bp, Homo sapiens
aaaaaaaaaaaaaaaaaaaaaaaaaaaaaaaaaaaaaaatccttgctgaggctggggcaaccaccgcaggtcgagacagcaggcggctcaagtggacagccgggatggcagagcgtgcggcgctggaggagctggtgaaacttcagggagagcgcgtgcgaggcctcaagcagcagaaggccagcgccgagctgatcgaggaggaggtggcgaaactcctgaaactgaaggcacagctgggtcctgatgaaagcaaacagaaatttgtgctcaaaacccccaagggcacaagagactatagtccccggcagatggcagttcgcgagaaggtgtttgacgtaatcatccgttgcttcaagcgccacggtgcagaagtcattgatacacctgtatttgaactaaaggaaacactgatgggaaagtatggggaagactccaagcttatctatgacctgaaggaccagggcggggagctcctgtcccttcgctatgacctcactgttccttttgctcggtatttggcaatgaataaactgaccaacattaaacgctaccacatagcaaaggtatatcggcgggataacccagccatgacccgtggccgataccgggaattctaccagtgtgattttgacattgctgggaactttgatcccatgatccctgatgcagagtgcctgaagatcatgtgcgagatcctgagttcacttcagataggcgacttcctggtcaaggtaaacgatcgacgcattctagatgggatgtttgctatctgtggtgtttctgacagcaagttccgtaccatctgctcctcagtagacaagctggacaaggtgtcctgggaagaggtgaagaatgagatggtgggagagaagggccttgcacctgaggtggctgaccgcattggggactatgtccagcaacatggtggggtatccctggtggaacagctgctccaggatcctaaactatcccaaaacaagcaggccttggagggcctgggagacctgaagttgctctttgagtacctgaccctatttggcattgatgacaaaatctcctttgacctgagccttgctcgagggctggattactacactggggtgatctatgaggcagtgctgctacagaccccagcccaggcaggggaagagcccctgggtgtgggcagtgtggctgctggaggacgctatgatgggctagtgggcatgttcgaccccaaagggcgcaaggtgccatgtgtggggctcagcattggggtggagcggattttctccatcgtggaacagagactagaggctttggaggagaagatacggaccacggagacacaggtgcttgtggcatctgcacagaagaagctgctagaggaaagactaaagcttgtctcagaactgtgggatgctgggatcaaggctgagctgctgtacaagaagaacccaaagctactgaaccagttacagtactgtgaggaggcaggcatcccactggtggctatcatcggcgagcaggaactcaaggatggggtcatcaagctccgttcagtgacgagcagggaagaggtggatgtccgaagagaagaccttgtggaggaaatcaaaaggagaacaggccagcccctctgcatctgctgaactgaacaaactatcagaggaaaggaagtgggactggcactatttgaggttaagacaaactgcatatgtacttcaattgctttgcacttttccgtttcagcggaagacctgaagagtggtcagaacagagcctttgatttttattatggttattttattgattattactggcaaaaacggccaggtacaacacctttttcatacaaggcccaggaggcttagtccagtctgtgctcctgggctacaaggacccagcctgagatggtcccatctgcagggccccgcaccagttggagcagatgcctccccaccaccaattgccaaaggtccaataaaatgcctcaaccacgga

SEQ ID NO: 424927 - DNA, 2650 bp, Homo sapiens
atactcccttactacatatccgtgtataagtcattcatttaatcttgcagcctccgtttcctcaactgcagaatggaaatcaaaactccaacctctcaagattgctccaaggattaaatgaccaggcatccaaatcgcttagttcagtgtcagtacatagtgggcactcgataaaaaccgattgtaacactactggaatacaggccgcgaggctatgcgttcagatctggagaccctgctgggacagaccagagataattctgtctcgctcacctggctttggcaacggaccgccccggtgcacgaagcgcagggcggtcgcaggagctggctgagcagcgaagcccaggccctcctgggaagaagtccgagcaggggcatcgcgcggcaggacgccggctttccgggacaggaacaaaaggcctgggaaggaggcgggtcagacaccaggaagggtggagggcactgcaaaggcggaacccgcgcaccagggaaaactcgggcgtttgcgcacctcactagtcacgaaggctgaggtgggatcctcccaagttcccttagtagccagcttcggcacttccgggaggagccggaaataatttttgtgctcggcggaggctctctaggcgtgcgacccagcgactcgatagccggaagtcatccttgctgaggctggggcaaccaccgcaggtcgagacagcaggcggctcaagtggacagccgggatggcagagcgtgcggcgctggaggagctggtgaaacttcagggagagcgcgtgcgaggcctcaagcagcagaaggccagcgccgagctgatcgaggaggaggtggcgaaactcctgaaactgaaggcacagctgggtcctgatgaaagcaaacagaaatttgtgctcaaaacccccaagggcacaagagactatagtccccggcagatggcagttcgcgagaaggtgtttgacgtaatcatccgttgcttcaagcgccacggtgcagaagtcattgatacacctgtatttgaactaaaggaaacactgatgggaaagtatggggaagactccaagcttatctatgacctgaaggaccagggcggggagctcctgtcccttcgctatgacctcactgttccttttgctcggtatttggcaatgaataaactgaccaacattaaacgctaccacatagcaaaggtatatcggcgggataacccagccatgacccgtggccgataccgggaattctaccagtgtgattttgacattgctgggaactttgatcccatgatccctgatgcagagtgcctgaagatcatgtgcgagatcctgagttcacttcagataggcgacttcctggtcaaggtaaacgatcgacgcattctagatgggatgtttgctatctgtggtgtttctgacagcaagttccgtaccatctgctcctcagtagacaagctggacaaggtgtcctgggaagaggtgaagaatgagatggtgggagagaagggccttgcacctgaggtggctgaccgcattggggactatgtccagcaacatggtggggtatccctggtggaacagctgctccaggatcctaaactatcccaaaacaagcaggccttggagggcctgggagacctgaagttgctctttgagtacctgaccctatttggcattgatgacaaaatctcctttgacctgagccttgctcgagggctggattactacactggggtgatctatgaggcagtgctgctacagaccccagcccaggcaggggaagagcccctgggtgtgggcagtgtggctgctggaggacgctatgatgggctagtgggcatgttcgaccccaaagggcgcaaggtgccatgtgtggggctcagcattggggtggagcggattttctccatcgtggaacagagactagaggctttggaggagaagatacggaccacggagacacaggtgcttgtggcatctgcacagaagaagctgctagaggaaagactaaagcttgtctcagaactgtgggatgctgggatcaaggctgagctgctgtacaagaagaacccaaagctactgaaccagttacagtactgtgaggaggcaggcatcccactggtggctatcatcggcgagcaggaactcaaggatggggtcatcaagctccgttcagtgacgagcagggaagaggtggatgtccgaagagaagaccttgtggaggaaatcaaaaggagaacaggccagcccctctgcatctgctgaactgaacaaactatcagaggaaaggaagtgggactggcactatttgaggttaagacaaactgcatatgtacttcaattgctttgcacttttccgtttcagcggaagacctgaagagtggtcagaacagagcctttgatttttattatggttattttattgattattactggcaaaaacggccaggtacaacacctttttcatacaaggcccaggaggcttagtccagtctgtgctcctgggctacaaggacccagcctgagatggtcccatctgcagggccccgcaccagttggagcagatgcctccccaccaccaattgccaaaggtccaataaaatgcctcaaccacggaaaaaaaaaaaaaaaaaaaaaaaaaaaaaaaaaaaaaaaaaaaa

SEQ ID NO: 424928 - DNA, 2761 bp, Homo sapiens
atactcccttactacatatccgtgtataagtcattcatttaatcttgcagcctccgtttcctcaactgcagaatggaaatcaaaactccaacctctcaagattgctccaaggattaaatgaccaggcatccaaatcgcttagttcagtgtcagtacatagtgggcactcgataaaaaccgattgtaacactactggaatacaggccgcgaggctatgcgttcagatctggagaccctgctgggacagaccagagataattctgtctcgctcacctggctttggcaacggaccgccccggtgcacgaagcgcagggcggtcgcaggagctggctgagcagcgaagcccaggccctcctgggaagaagtccgagcaggggcatcgcgcggcaggacgccggctttccgggacaggaacaaaaggcctgggaaggaggcgggtcagacaccaggaagggtggagggcactgcaaaggcggaacccgcgcaccagggaaaactcgggcgtttgcgcacctcactagtcacgaaggctgaggtgggatcctcccaagttcccttagtagccagcttcggcacttccgggaggagccggaaataatttttgtgctcggcggaggctctctaggcgtgcgacccagcgactcgatagccggaagtcatccttgctgaggctggggcaaccaccgcaggtcgagacagcaggcggctcaagtggacagccgggatggcagagcgtgcggcgctggaggagctggtgaaacttcagggagagcgcgtgcgaggcctcaagcagcagaaggccagcgccgagctgatcgaggaggaggtggcgaaactcctgaaactgaaggcacagctgggtcctgatgaaagcaaacagaaatttgtgctcaaaacccccaagggcacaagagactatagtccccggcagatggcagttcgcgagaaggtgtttgacgtaatcatccgttgcttcaagcgccacggtgcagaagtcattgatacacctgtatttgaactaaaggaaacactgatgggaaagtatggggaagactccaagcttatctatgacctgaaggaccagggcggggagctcctgtcccttcgctatgacctcactgttccttttgctcggtatttggcaatgaataaactgaccaacattaaacgctaccacatagcaaaggtatatcggcgggataacccagccatgacccgtggccgataccgggaattctaccagtgtgattttgacattgctgggaactttgatcccatgatccctgatgcagagtgcctgaagatcatgtgcgagatcctgagttcacttcagataggcgacttcctggtcaaggtcagagctgacaaggctgggagggcaaagttgggcctggcctctcacaagagaagatccttgtgcagagggaccagtagcctaagtgaccatgactattgcaggtcatgtaagaaaagagattcccccctcactatgcattggttccttgcaggtaaacgatcgacgcattctagatgggatgtttgctatctgtggtgtttctgacagcaagttccgtaccatctgctcctcagtagacaagctggacaaggtgtcctgggaagaggtgaagaatgagatggtgggagagaagggccttgcacctgaggtggctgaccgcattggggactatgtccagcaacatggtggggtatccctggtggaacagctgctccaggatcctaaactatcccaaaacaagcaggccttggagggcctgggagacctgaagttgctctttgagtacctgaccctatttggcattgatgacaaaatctcctttgacctgagccttgctcgagggctggattactacactggggtgatctatgaggcagtgctgctacagaccccagcccaggcaggggaagagcccctgggtgtgggcagtgtggctgctggaggacgctatgatgggctagtgggcatgttcgaccccaaagggcgcaaggtgccatgtgtggggctcagcattggggtggagcggattttctccatcgtggaacagagactagaggctttggaggagaagatacggaccacggagacacaggtgcttgtggcatctgcacagaagaagctgctagaggaaagactaaagcttgtctcagaactgtgggatgctgggatcaaggctgagctgctgtacaagaagaacccaaagctactgaaccagttacagtactgtgaggaggcaggcatcccactggtggctatcatcggcgagcaggaactcaaggatggggtcatcaagctccgttcagtgacgagcagggaagaggtggatgtccgaagagaagaccttgtggaggaaatcaaaaggagaacaggccagcccctctgcatctgctgaactgaacaaactatcagaggaaaggaagtgggactggcactatttgaggttaagacaaactgcatatgtacttcaattgctttgcacttttccgtttcagcggaagacctgaagagtggtcagaacagagcctttgatttttattatggttattttattgattattactggcaaaaacggccaggtacaacacctttttcatacaaggcccaggaggcttagtccagtctgtgctcctgggctacaaggacccagcctgagatggtcccatctgcagggccccgcaccagttggagcagatgcctccccaccaccaattgccaaaggtccaataaaatgcctcaaccacgga

SEQ ID NO: 424929 - DNA, 2385 bp, Homo sapiens
atactcccttactacatatccgtgtataagtcattcatttaatcttgcagcctccgtttcctcaactgcagaatggaaatcaaaactccaacctctcaagattgctccaaggattaaatgaccaggcatccaaatcgcttagttcagtgtcagtacatagtgggcactcgataaaaaccgattgtaacactactggaatacaggccgcgaggctatgcgttcagatctggagaccctgctgggacagaccagagataattctgtctcgctcacctggctttggcaacggaccgccccggtgcacgaagcgcagggcggtcgcaggagctggctgagcagcgaagcccaggccctcctgggaagaagtccgagcaggggcatcgcgcggcaggacgccggctttccgggacaggaacaaaaggcctgggaaggaggcgggtcagacaccaggaagggtggagggcactgcaaaggcggaacccgcgcaccagggaaaactcgggcgtttgcgcacctcactagtcacgaaggctgaggtgggatcctcccaagttcccttagtagccagcttcggcacttccgggaggagccggaaataatttttgtgctcggcggaggctctctaggcgtgcgacccagcgactcgatagccggaagtcatccttgctgaggctggggcaaccaccgcaggtcgagacagcaggcggctcaagtggacagccgggatggcagagcgtgcggcgctggaggagctggtgaaacttcagggagagcgcgtgcgaggcctcaagcagcagaaggccagcgccgagctgatcgaggaggaggtggcgaaactcctgaaactgaaggcacagctgggtcctgatgaaagcaaacagaaatttgtgctcaaaacccccaagggcacaagagactatagtccccggcagatggcagttcgcgagaaggtgtttgacgtaatcatccgttgcttcaagcgccacggtgcagaagtcattgatacacctgtatttgaactaaaggattttgacattgctgggaactttgatcccatgatccctgatgcagagtgcctgaagatcatgtgcgagatcctgagttcacttcagataggcgacttcctggtcaaggtaaacgatcgacgcattctagatgggatgtttgctatctgtggtgtttctgacagcaagttccgtaccatctgctcctcagtagacaagctggacaaggtgtcctgggaagaggtgaagaatgagatggtgggagagaagggccttgcacctgaggtggctgaccgcattggggactatgtccagcaacatggtggggtatccctggtggaacagctgctccaggatcctaaactatcccaaaacaagcaggccttggagggcctgggagacctgaagttgctctttgagtacctgaccctatttggcattgatgacaaaatctcctttgacctgagccttgctcgagggctggattactacactggggtgatctatgaggcagtgctgctacagaccccagcccaggcaggggaagagcccctgggtgtgggcagtgtggctgctggaggacgctatgatgggctagtgggcatgttcgaccccaaagggcgcaaggtgccatgtgtggggctcagcattggggtggagcggattttctccatcgtggaacagagactagaggctttggaggagaagatacggaccacggagacacaggtgcttgtggcatctgcacagaagaagctgctagaggaaagactaaagcttgtctcagaactgtgggatgctgggatcaaggctgagctgctgtacaagaagaacccaaagctactgaaccagttacagtactgtgaggaggcaggcatcccactggtggctatcatcggcgagcaggaactcaaggatggggtcatcaagctccgttcagtgacgagcagggaagaggtggatgtccgaagagaagaccttgtggaggaaatcaaaaggagaacaggccagcccctctgcatctgctgaactgaacaaactatcagaggaaaggaagtgggactggcactatttgaggttaagacaaactgcatatgtacttcaattgctttgcacttttccgtttcagcggaagacctgaagagtggtcagaacagagcctttgatttttattatggttattttattgattattactggcaaaaacggccaggtacaacacctttttcatacaaggcccaggaggcttagtccagtctgtgctcctgggctacaaggacccagcctgagatggtcccatctgcagggccccgcaccagttggagcagatgcctccccaccaccaattgccaaaggtccaataaaatgcctcaaccacgga

SEQ ID NO: 424930 - DNA, 1312 bp, Homo sapiens
atactcccttactacatatccgtgtataagtcattcatttaatcttgcagcctccgtttcctcaactgcagaatggaaatcaaaactccaacctctcaagattgctccaaggattaaatgaccaggcatccaaatcgcttagttcagtgtcagtacatagtgggcactcgataaaaaccgattgtaacactactggaatacaggccgcgaggctatgcgttcagatctggagaccctgctgggacagaccagagataattctgtctcgctcacctggctttggcaacggaccgccccggtgcacgaagcgcagggcggtcgcaggagctggctgagcagcgaagcccaggccctcctgggaagaagtccgagcaggggcatcgcgcggcaggacgccggctttccgggacaggaacaaaaggcctgggaaggaggcgggtcagacaccaggaagggtggagggcactgcaaaggcggaacccgcgcaccagggaaaactcgggcgtttgcgcacctcactagtcacgaaggctgaggtgggatcctcccaagttcccttagtagccagcttcggcacttccgggaggagccggaaataatttttgtgctcggcggaggctctctaggcgtgcgacccagcgactcgatagccggaagtcatccttgctgaggctggggcaaccaccgcaggtcgagacagcaggcggctcaagtggacagccgggatggcagagcgtgcggcgctggaggagctggtgaaacttcagggagagcgcgtgcgaggcctcaagcagcagaaggccagcgccgagctgatcgaggaggaggtggcgaaactcctgaaactgaaggcacagctgggtcctgatgaaagcaaacagaaatttgtgctcaaaacccccaagggcacaagagactatagtccccggcagatggcagttcgcgagaaggtgtttgacgtaatcatccgttgcttcaagcgccacggtgcagaagtcattgatacacctgtatttgaactaaaggaaacactgatgggaaagtatggggaagactccaagcttatctatgacctgaaggaccagggcggggagctcctgtcccttcgctatgacctcactgttccttttgctcggtatttggcaatgaataaactgaccaacattaaacgctaccacatagcaaaggtatatcggcgggataacccagccatgacccgtggccgataccgggaattctaccagtgtgtgagtgttgggaaaccgtggggcaggatgagttacttggggctctctcaagccagcagaatcta

SEQ ID NO: 424931 - DNA, 1407 bp, Homo sapiens
atactcccttactacatatccgtgtataagtcattcatttaatcttgcagcctccgtttcctcaactgcagaatggaaatcaaaactccaacctctcaagattgctccaaggattaaatgaccaggcatccaaatcgcttagttcagtgtcagtacatagtgggcactcgataaaaaccgattgtaacactactggaatacaggccgcgaggctatgcgttcagatctggagaccctgctgggacagaccagagataattctgtctcgctcacctggctttggcaacggaccgccccggtgcacgaagcgcagggcggtcgcaggagctggctgagcagcgaagcccaggccctcctgggaagaagtccgagcaggggcatcgcgcggcaggacgccggctttccgggacaggaacaaaaggcctgggaaggaggcgggtcagacaccaggaagggtggagggcactgcaaaggcggaacccgcgcaccagggaaaactcgggcgtttgcgcacctcactagtcacgaaggctgaggtgggatcctcccaagttcccttagtagccagcttcggcacttccgggaggagccggaaataatttttgtgctcggcggaggctctctaggcgtgcgacccagcgactcgatagccggaagtcatccttgctgaggctggggcaaccaccgcaggtcgagacagcaggcggctcaagtggacagccgggatggcagagcgtgcggcgctggaggagctggtgaaacttcagggagagcgcgtgcgaggcctcaagcagcagaaggccagcgccgagctgatcgaggaggaggtggcgaaactcctgaaactgaaggcacagctgggtcctgatgaaagcaaacagaaatttgtgctcaaaacccccaagggcacaagagactatagtccccggcagatggcagttcgcgagaaggtgtttgacgtaatcatccgttgcttcaagcgccacggtgcagaagtcattgatacacctgtatttgaactaaaggtgaggaatgggcaagaagaaactacatggtagatgagtgggcatttgaataacaaagaagatgacaacaagagagtgagggtccaaagggcccactcctgttgtggacacagaccagtctttgctccaataagaagagggacaagaatggcttggagggagaggccctgtcttttattatcttggttgtggccagcagattccaaaagagagccattctttggaatggtaattgttctgggtcctctctacattgtattgcgtggcatctgtacttggaatgttttctagattcatgcaaaccatacgtacataaatatgcaaccactctcctattgaaaaaaaaaaaaaaaaaaaaaaaaaaaaaaaaaaaaaaaaaaaa

SEQ ID NO: 424932 - DNA, 2936 bp, Homo sapiens
ggcagatgacattctggggttactggagtccacctctgtgctgatggggaaagtatggcatgatgaatccaaagcaaccagtaattctttttgaaagtgcaggcatttattttgagctgtatttcataggagtttcatttggtttggttttggtatagagaggtgtccatagatctctattccctttttttttttatcgacaaggcctactacggataaatcagtttttgttgcctgaatacactttgaattagactacagaagccagtttgagctcaaatttcacacttgctgcagacaactctcagtgtggacagtgcctttctgagtaattaggatgttatatgactttttggtgaagccgtatagggtaaggagatgccccaaggcccctgatcatttcagaagccacctggagcaccagaaggggtcatcttcccagggctatggctctgtgtgcttagacatagtatggaattgtgctctaagcccacaggcttctccagagttaaaaggaagcaagaacatccttaagttactttttcaaaatatgcgcttcaggaggaaccaggtttccccaggagagagaggctccctgctcaatcagcacagggagttgctagcgggcaggctgcccagtgctgtggaatctccgccagcctctgggttgggggctccctcccacttcttgcttcttatggagtacatgggactgctctgctttaagccgcgatcagagctgttgtgagcaggacaagattgcgtgatcacgaggtgcgtggggagatgctaggacatttgttgatgtctttgacctgtgctccgtctctgttggatgactgggttagctaacaccactagagggaggtacagaatgttaaacagtcgtcagagtcacactgagggttgttttaacagagggcaaattcccagtttgtcaagcatatctctgttagagtccgaagttcatggttttaatggttctagctcgtagcccttaatattttcaggatagctgggtcctgccagtgtccgctgagtccatcagcacaaccagaaggtccaggtccaggcatgggaagcattctctgacaataccgagccctcgggacctcctgaaaccttgagcagaggctggagaagaccttcagacagtccttttactacctcacaaagtgccatgcccgggacctcagacctcagggttgtgacgttgttgatgttgtcaggccccagtacgtctctagtgaccgaagcagacctgcctgaaagggcactccggacagtgagccctggctctaacctgtgccctcatatttctgctgcctcatatggtcttgtttgcccactctgtaggtgactgatgatcaccctaaaagggaggtaggtatctagcagtagcacagttactttgagcctgaccacttgttctgaagtgcagatgttgaaacatgcattgaggaagaacactttaaggaagcactttatgatttactcatggctggtgttggcctcaaagtaaaagaacatcttaatgcagaacagtacaataaagagccccataggatggatgccatcatctgtccccatggttgggattgccaaggaaagtgccttgttctgtgcatcttcagaatcccccaggccctctcttgatccttttcatgaagtccagagcattccttctattacaggctgaagatgcattgtaaaaggtaatgctataatagtattccctcttctcaataaatgtgcaaaactggagaatctggtgctgatctgcagcatacttgacaacacagggaataccgtggatgttccacgccagccttacatccgtccccattgcctgcccatgtccagtggccctgcgcaacaaaagtaagggcttgtcttaccacactctccccagcatctagctcaaggtagatgactgactgggaaattccggttggataaaatggcttttccacattgcaactttgcatctctattaggaaaatttagattgaacctttcctctacttgatgcttagtttgagaacagttttcacaactttagagggtctctctcagagtatgttatactgtaaccttgaagtttgagatgaaacaaggtgtcagaggttttgaatctttcaaaggaattgccttttacagattttttttttattccctaagaagggaaaaagagagggaagaactacactaatgttagagataaggtatgttttggctcaaaatgtgtcatgaacctaaaggtaacttgatgggcagaaatgtctcagccatgtgaaccaagaagtgggaccacagtgcaaggctgtgggtggcagcactagatacggtggtggcaggagtgtgacatgtaggcactccatgggggacagctggacggtgtctatcaaaagtgcaaatgcgtaagctctttgaactagcaatgctactcctaagaattgtacctgtgtacaaggtacttgtgtacaagagtttttgttgaaacattgtaatagcaaaaagttggagagtgccaccaatacaggggaatggttaaatacattatggccagcttaaacaatggaatagtttgtagaaatttaaaacaatggatcctgtgtgtgtgtactaccatagaatgggccccaagatgcatgattaagtgaggaaaaaagcccatggtatcctaatgtttggaatggagaaagtgtgtagatgtatgtgtgtgcatatgttttcacacagacgtatacacgtgtatatcatatgtccacctgcatatgcctaggatgtctctgggaggatatctagcagcccggcagcctgaattgcctctgggaagaggggtgggaatgacttttcaatgtacaccttttgtaccttttgaattttgtaccatgtacatgtattatctattaaaaaatagttcttaattttta

SEQ ID NO: 424933 - DNA, 3039 bp, Homo sapiens
ggcagatgacattctggggttactggagtccacctctgtgctgatggggaaagtatggcatgatgaatccaaagcaaccagtaattctttttgaaagtgcaggcatttattttgagctgtatttcataggagtttcatttggtttggttttggtatagagaggtgtccatagatctctattccctttttttttttatcgacaaggcctactacggataaatcagtttttgttgcctgaatacactttgaattagactacagaagccagtttgagctcaaatttcacacttgctgcagacaactctcagtgtggacagtgcctttctgagtaattaggatgttatatgactttttggtgaagccgtatagggtaaggagatgccccaaggcccctgatcatttcagaagccacctggagcaccagaaggggtcatcttcccagggctatggctctgtgtgcttagacatagtatggaattgtgctctaagcccacaggcttctccagagttaaaaggaagcaagaacatccttaagttactttttcaaaatatgcgcttcaggaggaaccaggtttccccaggagagagaggctccctgctcaatcagcacagggagttgctagcgggcaggctgcccagtgctgtggaatctccgccagcctctgggttgggggctccctcccacttcttgcttcttatggagtacatgggactgctctgctttaagccgcgatcagagctgttgtgagcaggacaagattgcgtgatcacgaggtgcgtggggagatgctaggacatttgttgatgtctttgacctgtgctccgtctctgttggatgactgggttagctaacaccactagagggaggtacagaatgttaaacagtcgtcagagtcacactgagggttgttttaacagagggcaaattcccagtttgtcaagcatatctctgttagagtccgaagttcatggttttaatggttctagctcgtagcccttaatattttcaggatagctgggtcctgccagtgtccgctgagtccatcagcacaaccagaaggtccaggtccaggcatgggaagcattctctgacaataccgagccctcgggacctcctgaaaccttgagcagaggctggagaagaccttcagacagtccttttactacctcacaaagtgccatgcccgggacctcagacctcagggttgtgacgttgttgatgttgtcaggccccagtacgtctctagtgaccgaagcagacctgcctgaaagggcactccggacagtgagccctggctctaacctgtgccctcatatttctgctgcctcatatggtcttgtttgcccactctgtaggtgactgatgatcaccctaaaagggaggtaggtatctagcagtagcacagttactttgagcctgaccacttgttctgaagtgcagatgttgaaacatgcattgaggaagaacactttaaggaagcactttatgatttactcatggctggtgttggcctcaaagtaaaagaacatcttaatgcagaacagtacaataaagagccccataggatggatgccatcatctgtccccatggttgggattgccaaggaaagtgccttgttctgtgcatcttcagaatcccccaggccctctcttgatccttttcatgaagtccagagcattccttctattacaggctgaagatgcattgtaaaaggtaatgctataatagtattccctcttctcaataaatgtgcaaaactggagaatctggtgctgatctgcagcatacttgacaacacagggaataccgtggatgttccacgccagccttacatccgtccccattgcctgcccatgtccagtggccctgcgcaacaaaagtaagggcttgtcttaccacactctccccagcatctagctcaaggtagatgactgactgggaaattccggttggataaaatggcttttccacattgcaactttgcatctctattaggaaaatttagattgaacctttcctctacttgatgcttagtttgagaacagttttcacaactttagagggtctctctcagagtatgttatactgtaaccttgaagtttgagatgaaacaaggtgtcagaggttttgaatctttcaaaggaattgccttttacagattttttttttattccctaagaagggaaaaagagagggaagaactacactaatgttagagataaggtatgttttggctcaaaatgtgtcatgaacctaaaggtaacttgatgggcagaaatgtctcagccatgtgaaccaagaagtgggaccacagtgcaaggctgtgggtggcagcactagatacggtggtggcaggagtgtgacatgtaggcactccatgggggacagctggacggtgtctatcaaaagtgcaaatgcgtaagctctttgaactagcaatgctactcctaagaattgtacctgtgtacaaggtacttgtgtacaagagtttttgttgaaacattgtaatagcaaaaagttggagagtgccaccaatacaggggaatggttaaatacattatggccagcttaaacaatggaatagtttgtagaaatttaaaacaatggatcctgtgtgtgtgtactaccatagaatgggccccaagatgcatgattaagtgaggaaaaaagcccatggtatcctaatgtttggaatggagaaagtgtgtagatgtatgtgtgtgcatatgttttcacacagacgtatacacgtgtatatcatatgtccacctgcatatgcctaggatgtctctgggaggatatctagcagcccggcagcctgaattgcctctgggaagaggggtgggaatgacttttcaatgtacaccttttgtaccttttgaattttgtaccatgtacatgtattatctattaaaaaatagttcttaatttttaatttggtatacttttcttaatagaaccaaaatggaagaaaattctgattctctaaatctgctttcttaaagataaagcctttgattcaaaagtagtgagactc

SEQ ID NO: 424934 - DNA, 2702 bp, Homo sapiens
  misc_feature (29)..(29): n is a, c, g, or t
agaatgatgtatgatgtgcgataccgggntgtgtatttcagtgacgaggggccggcgcttcagctgtatatctagatgtgtcttctgtggactctatcaagtgatgttatatgactttttggtgaagccgtatagggtaaggagatgccccaaggcccctgatcatttcagaagccacctggagcaccagaaggggtcatcttcccagggctatggctctgtgtgcttagacatagtatggaattgtgctctaagcccacaggcttctccagagttaaaaggaagcaagaacatccttaagttactttttcaaaatatgcgcttcaggaggaaccaggtttccccaggagagagaggctccctgctcaatcagcacagggagttgctagcgggcaggctgcccagtgctgtggaatctccgccagcctctgggttgggggctccctcccacttcttgcttcttatggagtacatgggactgctctgctttaagccgcgatcagagctgttgtgagcaggacaagattgcgtgatcacgaggtgcgtggggagatgctaggacatttgttgatgtctttgacctgtgctccgtctctgttggatgactgggttagctaacaccactagagggaggtacagaatgttaaacagtcgtcagagtcacactgagggttgttttaacagagggcaaattcccagtttgtcaagcatatctctgttagagtccgaagttcatggttttaatggttctagctcgtagcccttaatattttcaggatagctgggtcctgccagtgtccgctgagtccatcagcacaaccagaaggtccaggtccaggcatgggaagcattctctgacaataccgagccctcgggacctcctgaaaccttgagcagaggctggagaagaccttcagacagtccttttactacctcacaaagtgccatgcccgggacctcagacctcagggttgtgacgttgttgatgttgtcaggccccagtacgtctctagtgaccgaagcagacctgcctgaaagggcactccggacagtgagccctggctctaacctgtgccctcatatttctgctgcctcatatggtcttgtttgcccactctgtaggtgactgatgatcaccctaaaagggaggtaggtatctagcagtagcacagttactttgagcctgaccacttgttctgaagtgcagatgttgaaacatgcattgaggaagaacactttaaggaagcactttatgatttactcatggctggtgttggcctcaaagtaaaagaacatcttaatgcagaacagtacaataaagagccccataggatggatgccatcatctgtccccatggttgggattgccaaggaaagtgccttgttctgtgcatcttcagaatcccccaggccctctcttgatccttttcatgaagtccagagcattccttctattacaggctgaagatgcattgtaaaaggtaatgctataatagtattccctcttctcaataaatgtgcaaaactggagaatctggtgctgatctgcagcatacttgacaacacagggaataccgtggatgttccacgccagccttacatccgtccccattgcctgcccatgtccagtggccctgcgcaacaaaagtaagggcttgtcttaccacactctccccagcatctagctcaaggtagatgactgactgggaaattccggttggataaaatggcttttccacattgcaactttgcatctctattaggaaaatttagattgaacctttcctctacttgatgcttagtttgagaacagttttcacaactttagagggtctctctcagagtatgttatactgtaaccttgaagtttgagatgaaacaaggtgtcagaggttttgaatctttcaaaggaattgccttttacagattttttttttattccctaagaagggaaaaagagagggaagaactacactaatgttagagataaggtatgttttggctcaaaatgtgtcatgaacctaaaggtaacttgatgggcagaaatgtctcagccatgtgaaccaagaagtgggaccacagtgcaaggctgtgggtggcagcactagatacggtggtggcaggagtgtgacatgtaggcactccatgggggacagctggacggtgtctatcaaaagtgcaaatgcgtaagctctttgaactagcaatgctactcctaagaattgtacctgtgtacaaggtacttgtgtacaagagtttttgttgaaacattgtaatagcaaaaagttggagagtgccaccaatacaggggaatggttaaatacattatggccagcttaaacaatggaatagtttgtagaaatttaaaacaatggatcctgtgtgtgtgtactaccatagaatgggccccaagatgcatgattaagtgaggaaaaaagcccatggtatcctaatgtttggaatggagaaagtgtgtagatgtatgtgtgtgcatatgttttcacacagacgtatacacgtgtatatcatatgtccacctgcatatgcctaggatgtctctgggaggatatctagcagcccggcagcctgaattgcctctgggaagaggggtgggaatgacttttcaatgtacaccttttgtaccttttgaattttgtaccatgtacatgtattatctattaaaaaatagttcttaattttta

SEQ ID NO: 424935 - DNA, 1047 bp, Homo sapiens
taaattacagtatgactatccagtagactgttgtgccatcattataatttatgtttctgaagaatatttgacagcatggcaaagtgcttatagtgttaagtgaaaagagtgatatacaaaattgtatgtataaatccaaaaaatgacttttaaaaagatggaaaggatatgcaaactctgggtagttggattatgggttttcctggttttatgctttaaaaaattttctccagtatattactacttatattatcagtaaaaatcaatagcatctagagctggcagtggagagattgaggccagatcactagtttggtccatgaacaattaactggctgggtggacacagaggctatatgatcttgtgttggcagcaaggctgggacagaagggaaaaggacctgcccaggaggagaagggaccgtgtgactatgtgaccataatccctacaaaaaaacacaaagtgttaagggaagacactgtgggtggcatgctcttgtgatgtagtcgtaggtcggtaaaagaccacttatgaatcaagtatattctgacaagtggaaaaggatatgaatgctctcctgggtaaaattaacctcctttgcatttcattctcacattctcgcacaaaatgaattatcaagatggattttataatagctgattctctgaagaatccctgagactttgtatgattctttagtatagcagtggctttcgatgtgccaagtctacctcctcccatactgggacactcaagcaacacagatgtacacgggaattttgggtattctatactgagaatactgcacacatatcgttagtcatcttaatgttgtaacttaccaaactcttaaggtttgcaaatgtgattttgttggcatctagaaccagtgtattttttatttatgtctgaaaaataatcattgtggggttttaaaatgaaaaatcatgtagctaatgcctatccatagatgaaattgttatgttgggaaaatgtgtacttaatctttgctttagtaaaatgattattataaaaatgttaaaggt

SEQ ID NO: 424936 - DNA, 471 bp, Homo sapiens
ccctgtgatctgcaaggctccctgcaggaaggcaccgttttagaggcacactctattatgactgattagacgacccttctcggggcctgcctgagaacaaaagttctgttttcttttcagggccttgtgaagtaaacagttatttcatagttagtcctaggtgaaaaccatcttttaccatctactgagtgcaccagcagtctgagggctatatgagggccataatggcctgacaaaaccacttttctggggtgttctgtggctgtcaatggtctgttattgttgtctcttgaagtgattggacatttcatacacatacaccatgcagcagccatgacagaagcagatcactccaacctgctgctggctctcatgtctccttgggatttaactgtgaatatgttcatccagctgaaatgctctgaaactgaacaaccttatctcactccgctaaaacaaaaactaatgaaa

SEQ ID NO: 424937 - DNA, 1772 bp, Homo sapiens
ctgggaagacgctggtcagttcacctgccccactggttgttttttaaacaaattctgatacaggcgacatcctcactgaccgagcaaagattgacattcgtatcatcactgtgcaccattggcttctaggcactccagtggggtaggagaaggaggtctgaaaccctcgcagagggatcttgccctcattctttgggtctgaaacactggcagtcgttggaaacaggactcagggataaacgcagcgcaatggattgggggacgctgcacactttcatcgggggtgtcaacaaacactccaccagcatcgggaaggtgtggatcacagtcatctttattttccgagtcatgatcctcgtggtggctgcccaggaagtgtggggtgacgagcaagaggacttcgtctgcaacacactgcaaccgggatgcaaaaatgtgtgctatgaccactttttcccggtgtcccacatccggctgtgggccctccagctgatcttcgtctccaccccagcgctgctggtggccatgcatgtggcctactacaggcacgaaaccactcgcaagttcaggcgaggagagaagaggaatgatttcaaagacatagaggacattaaaaagcagaaggttcggatagaggggtcgctgtggtggacgtacaccagcagcatctttttccgaatcatctttgaagcagcctttatgtatgtgttttacttcctttacaatgggtaccacctgccctgggtgttgaaatgtgggattgacccctgccccaaccttgttgactgctttatttctaggccaacagagaagaccgtgtttaccatttttatgatttctgcgtctgtgatttgcatgctgcttaacgtggcagagttgtgctacctgctgctgaaagtgtgttttaggagatcaaagagagcacagacgcaaaaaaatcaccccaatcatgccctaaaggagagtaagcagaatgaaatgaatgagctgatttcagatagtggtcaaaatgcaatcacaggtttcccaagctaaacatttcaaggtaaaatgtagctgcgtcataaggagacttctgtcttctccagaaggcaataccaacctgaaagttccttctgtagcctgaagagtttgtaaatgactttcataataaatagacacttgagttaactttttgtaggatacttgctccattcatacacaacgtaatcaaatatgtggtccatctctgaaaacaagagactgcttgacaaaggagcattgcagtcactttgacaggttccttttaagtggactctctgacaaagtgggtactttctgaaaatttatataactgttgttgataaggaacatttatccaggaattgatacgtttattaggaaaagatatttttataggcttggatgtttttagttctgactttgaatttatataaagtatttttataatgactggtcttccttacctggaaaaacatgcgatgttagttttagaattacaccacaagtatctaaatttggaacttacaaagggtctatcttgtaaatattgttttgcattgtctgttggcaaatttgtgaactgtcatgatacgcttaaggtggaaagtgttcattgcacaatatatttttactgctttctgaatgtagacggaacagtgtggaagcagaaggcttttttaactcatccgtttgccaatcattgcaaacaactgaaatgtggatgtgattgcctcaataaagctcgtccccattgcttaagccttcacatg

SEQ ID NO: 424938 - DNA, 1845 bp, Homo sapiens
cttcctggggagcaggaagggtcagggaaggaaaagaagtacagaagatctggctaaacaatttctgtatggcgaaagaaaaattctaacttgtacgccctcttcatgcatctttaattcaatttgaatattccaggcgacatcctcactgaccgagcaaagattgacattcgtatcatcactgtgcaccattggcttctaggcactccagtggggtaggagaaggaggtctgaaaccctcgcagagggatcttgccctcattctttgggtctgaaacactggcagtcgttggaaacaggactcagggataaacgcagcgcaatggattgggggacgctgcacactttcatcgggggtgtcaacaaacactccaccagcatcgggaaggtgtggatcacagtcatctttattttccgagtcatgatcctcgtggtggctgcccaggaagtgtggggtgacgagcaagaggacttcgtctgcaacacactgcaaccgggatgcaaaaatgtgtgctatgaccactttttcccggtgtcccacatccggctgtgggccctccagctgatcttcgtctccaccccagcgctgctggtggccatgcatgtggcctactacaggcacgaaaccactcgcaagttcaggcgaggagagaagaggaatgatttcaaagacatagaggacattaaaaagcagaaggttcggatagaggggtcgctgtggtggacgtacaccagcagcatctttttccgaatcatctttgaagcagcctttatgtatgtgttttacttcctttacaatgggtaccacctgccctgggtgttgaaatgtgggattgacccctgccccaaccttgttgactgctttatttctaggccaacagagaagaccgtgtttaccatttttatgatttctgcgtctgtgatttgcatgctgcttaacgtggcagagttgtgctacctgctgctgaaagtgtgttttaggagatcaaagagagcacagacgcaaaaaaatcaccccaatcatgccctaaaggagagtaagcagaatgaaatgaatgagctgatttcagatagtggtcaaaatgcaatcacaggtttcccaagctaaacatttcaaggtaaaatgtagctgcgtcataaggagacttctgtcttctccagaaggcaataccaacctgaaagttccttctgtagcctgaagagtttgtaaatgactttcataataaatagacacttgagttaactttttgtaggatacttgctccattcatacacaacgtaatcaaatatgtggtccatctctgaaaacaagagactgcttgacaaaggagcattgcagtcactttgacaggttccttttaagtggactctctgacaaagtgggtactttctgaaaatttatataactgttgttgataaggaacatttatccaggaattgatacgtttattaggaaaagatatttttataggcttggatgtttttagttctgactttgaatttatataaagtatttttataatgactggtcttccttacctggaaaaacatgcgatgttagttttagaattacaccacaagtatctaaatttggaacttacaaagggtctatcttgtaaatattgttttgcattgtctgttggcaaatttgtgaactgtcatgatacgcttaaggtggaaagtgttcattgcacaatatatttttactgctttctgaatgtagacggaacagtgtggaagcagaaggcttttttaactcatccgtttgccaatcattgcaaacaactgaaatgtggatgtgattgcctcaataaagctcgtccccattgcttaagccttcacatg

SEQ ID NO: 424939 - DNA, 3216 bp, Homo sapiens
  misc_feature (3209)..(3209): n is a, c, g, or t
cagcacagagagtggaaaacagcagaggtgacagagcagccgtgctcgaagcgttcctggagcccaagctctcctccacaggtgaagacagggccagcaggagacaccatggggcacctctcagccccacttcacagagtgcgtgtaccctggcaggggcttctgctcacagcctcacttctaaccttctggaacccgcccaccactgcccagctcactactgaatccatgccattcaatgttgcagaggggaaggaggttcttctccttgtccacaatctgccccagcaactttttggctacagctggtacaaaggggaaagagtggatggcaaccgtcaaattgtaggatatgcaataggaactcaacaagctaccccagggcccgcaaacagcggtcgagagacaatataccccaatgcatccctgctgatccagaacgtcacccagaatgacacaggattctacaccctacaagtcataaagtcagatcttgtgaatgaagaagcaactggacagttccatgtatacccggagctgcccaagccctccatctccagcaacaactccaaccctgtggaggacaaggatgctgtggccttcacctgtgaacctgagactcaggacacaacctacctgtggtggataaacaatcagagcctcccggtcagtcccaggctgcagctgtccaatggcaacaggaccctcactctactcagtgtcacaaggaatgacacaggaccctatgagtgtgaaatacagaacccagtgagtgcgaaccgcagtgacccagtcaccttgaatgtcacctatggcccggacacccccaccatttccccttcagacacctattaccgtccaggggcaaacctcagcctctcctgctatgcagcctctaacccacctgcacagtactcctggcttatcaatggaacattccagcaaagcacacaagagctctttatccctaacatcactgtgaataatagtggatcctatacctgccacgccaataactcagtcactggctgcaacaggaccacagtcaagacgatcatagtcactgataatgctctaccacaagaaaatggcctctcacctggggccattgctggcattgtgattggagtagtggccctggttgctctgatagcagtagccctggcatgttttctgcatttcgggaagaccggcagggcaagcgaccagcgtgatctcacagagcacaaaccctcagtctccaaccacactcaggaccactccaatgacccacctaacaagatgaatgaagttacttattctaccctgaactttgaagcccagcaacccacacaaccaacttcagcctccccatccctaacagccacagaaataatttattcagaagtaaaaaagcagtaatgaaacctgtcctgctcactgcagtgctgatgtatttcaagtctctcaccctcatcactaggagattcctttcccctgtaggggtagaggggtggggacagaaacaactttctcctactcttccttcctaataggcatctccaggctgcctggtcactgcccctctctcagtgtcaatagatgaaagtacattgggagtctgtaggaaacccaaccttcttgtcattgaaatttggcaaagctgactttgggaaagagggaccagaacttcccctcccttccccttttcccaacctggacttgttttaaacttgcctgttcagagcactcattccttcccacccccagtcctgtcctatcactctaattcggatttgccatagccttgaggttatgtccttttccattaagtacatgtgccaggaaacaagagagagagaaagtaaaggcagtaatgccttctcctatttctccaaagccttgtgtgaactcaccaaacacaagaaaatcaaatatataaccaatagtgaaatgccacacctttgtccactgtcagggttgtctacctgtaggatcagggtctaagcaccttggtgcttagctagaataccacctaatccttctggcaagcctgtcttcagagaacccactagaagcaactaggaaaatcacttgccaaaatccaaggcaattcctgatggaaaatgcaaaagcacatatatgttttaatatctttatgggctctgttcaaggcagtgctgagagggaggggttatagcttcaggagggaaccagcttctgataaacacaatctgctaggaacttgggaaaggaatcagagagctgcccttcagcgattatttaaattattgttaaagaatacacaatttggggtattgggatttttctccttttctctgagacattccaccattttaatttttgtaactgcttatttatgtgaaaagggttatttttacttagcttagctatgtcagccaatccgattgccttaggtgaaagaaaccaccgaaatccctcaggtcccttggtcaggagcctctcaagattttttttgtcagaggctccaaatagaaaataagaaaaggttttcttcattcatggctagagctagatttaactcagtttctaggcacctcagaccaatcatcaactaccattctattccatgtttgcacctgtgcattttctgtttgcccccattcactttgtcaggaaaccttggcctctgctaaggtgtatttggtccttgagaagtgggagcaccctacagggacactatcactcatgctggtggcattgtttacagctagaaagctgcactggtgctaatgccccttggggaaatggggctgtgaggaggaggattataacttaggcctagcctcttttaacagcctctgaaatttatcttttcttctatggggtctataaatgtatcttataataaaaaggaaggacaggaggaagacaggcaaatgtacttctcacccagtcttctacacagatggaatctctttggggctaagagaaaggttttattctatattgcttacctgatctcatgttaggcctaagaggctttctccaggaggattagcttggagttctctatactcaggtacctctttcagggttttctaaccctgacacggactgtgcatactttccctcatccatgctgtgctgtgttatttaatttttcctggctaagatcatgtctgaattatgtatgaaaattattctatgtttttataataaaaataatatatcagacatcggtgatnaaaaaaa

SEQ ID NO: 424940 - DNA, 1786 bp, Homo sapiens
  misc_feature (1584)..(1584): n is a, c, g, or t
  misc_feature (1622)..(1622): n is a, c, g, or t
  misc_feature (1771)..(1771): n is a, c, g, or t
cagcacagagagtggaaaacagcagaggtgacagagcagccgtgctcgaagcgttcctggagcccaagctctcctccacaggtgaagacagggccagcaggagacaccatggggcacctctcagccccacttcacagagtgcgtgtaccctggcaggggcttctgctcacagcctcacttctaaccttctggaacccgcccaccactgcccagctcactactgaatccatgccattcaatgttgcagaggggaaggaggttcttctccttgtccacaatctgccccagcaactttttggctacagctggtacaaaggggaaagagtggatggcaaccgtcaaattgtaggatatgcaataggaactcaacaagctaccccagggcccgcaaacagcggtcgagagacaatataccccaatgcatccctgctgatccagaacgtcacccagaatgacacaggattctacaccctacaagtcataaagtcagatcttgtgaatgaagaagcaactggacagttccatgtatacccggagctgcccaagccctccatctccagcaacaactccaaccctgtggaggacaaggatgctgtggccttcacctgtgaacctgagactcaggacacaacctacctgtggtggataaacaatcagagcctcccggtcagtcccaggctgcagctgtccaatggcaacaggaccctcactctactcagtgtcacaaggaatgacacaggaccctatgagtgtgaaatacagaacccagtgagtgcgaaccgcagtgacccagtcaccttgaatgtcacctatggcccggacacccccaccatttccccttcagacacctattaccgtccaggggcaaacctcagcctctcctgctatgcagcctctaacccacctgcacagtactcctggcttatcaatggaacattccagcaaagcacacaagagctctttatccctaacatcactgtgaataatagtggatcctatacctgccacgccaataactcagtcactggctgcaacaggaccacagtcaagacgatcatagtcactgagctaagtccagtagtagcaaagccccaaatcaaagccagcaagaccacagtcacaggagataaggactctgtgaacctgacctgctccacaaatgacactggaatctccatccgttggttcttcaaaaaccagagtctcccgtcctcggagaggatgaagctgtcccagggcaacaccaccctcagcataaaccctgtcaagagggaggatgctgggacgtattggtgtgaggtcttcaacccaatcagtaagaaccaaagcgaccccatcatgctgaacgtaaactgtaagtgactcctcaccccttcctatatgtccctctaggattactctgtcaatggtgtgcaaaatggataaaactcacaggaggcagaatatcaatgaagagaccattatagcaaacagaattgcaaagtggttaagagctcagctcaggccgggcacagtggctcacgcctgtgatcccagcagtttgggaggccaaggcgggcggatcacgagggcaggagatcgagnccatcctggctaatatggtgaaaccccgtgtctactanaaatacaaaaaaaaattagccgggcatggtggcgggcgcctgtggtcccagctactcgggaggctgaggcgggagaatggcgtgaacctgggaggcggagctttcagtgagccgagatggtgccactgcactccagtctgggcaacagngcaagactctgtctc

SEQ ID NO: 424941 - DNA, 1800 bp, Homo sapiens
cagcacagagagtggaaaacagcagaggtgacagagcagccgtgctcgaagcgttcctggagcccaagctctcctccacaggtgaagacagggccagcaggagacaccatggggcacctctcagccccacttcacagagtgcgtgtaccctggcaggggcttctgctcacagcctcacttctaaccttctggaacccgcccaccactgcccagctcactactgaatccatgccattcaatgttgcagaggggaaggaggttcttctccttgtccacaatctgccccagcaactttttggctacagctggtacaaaggggaaagagtggatggcaaccgtcaaattgtaggatatgcaataggaactcaacaagctaccccagggcccgcaaacagcggtcgagagacaatataccccaatgcatccctgctgatccagaacgtcacccagaatgacacaggattctacaccctacaagtcataaagtcagatcttgtgaatgaagaagcaactggacagttccatgtatacccggagctgcccaagccctccatctccagcaacaactccaaccctgtggaggacaaggatgctgtggccttcacctgtgaacctgagactcaggacacaacctacctgtggtggataaacaatcagagcctcccggtcagtcccaggctgcagctgtccaatggcaacaggaccctcactctactcagtgtcacaaggaatgacacaggaccctatgagtgtgaaatacagaacccagtgagtgcgaaccgcagtgacccagtcaccttgaatgtcacctatggcccggacacccccaccatttccccttcagacacctattaccgtccaggggcaaacctcagcctctcctgctatgcagcctctaacccacctgcacagtactcctggcttatcaatggaacattccagcaaagcacacaagagctctttatccctaacatcactgtgaataatagtggatcctatacctgccacgccaataactcagtcactggctgcaacaggaccacagtcaagacgatcatagtcactggtaagtaattcctggagcatcaacactaagatctggggtacaagctttctggttttcaaataggagcagagaagaaattttcttttgcagcctgtatccaacaggcacaaacaagtccaaattctcccctgaaccctctcaattcatctgtgcagactctcttccctttgtttttctgatttctcacagctgaccttaggtccagcctggaatgtggggagggggttctctcagccccagaaagccccgtgtagcaggaggggcttcacagagggggaagcagaaagggtcctcaaggtcaatttgcttctgtcactaacatgtccctttctgtaacttcttggccttcttttacctattccatgagatataaggaatatgtgaggttttaaaacagactcacaatagttttccctaaatgagagaaggaaatgcccttcatcagggatgagcagctcagactctgctccctgctctactcccggcttgcccggtgattggctctgccctgaccccatgtggggtaggacgcaggtgtgtgcagaaggtgtccaggtggcctgtcatgaatccagctaaatcaagatggcagtcaatggctgggcgctgtggttcatgcctgtgatcccagtactttggaaggccgaggtgagaggatcacctgaggtcaggagttcgagaccagcctgaccaacatggcaaaactccatctctactaaaaatacaaaaaaaaa

SEQ ID NO: 424942 - DNA, 1652 bp, Homo sapiens
  misc_feature (1450)..(1450): n is a, c, g, or t
  misc_feature (1488)..(1488): n is a, c, g, or t
  misc_feature (1637)..(1637): n is a, c, g, or t
cagcacagagagtggaaaacagcagaggtgacagagcagccgtgctcgaagcgttcctggagcccaagctctcctccacaggtgaagacagggccagcaggagacaccatggggcacctctcagccccacttcacagagtgcgtgtaccctggcaggggcttctgctcacagcctcacttctaaccttctggaacccgcccaccactgcccagctcactactgaatccatgccattcaatgttgcagaggggaaggaggttcttctccttgtccacaatctgccccagcaactttttggctacagctggtacaaaggggaaagagtggatggcaaccgtcaaattgtaggatatgcaataggaactcaacaagctaccccagggcccgcaaacagcggtcgagagacaatataccccaatgcatccctgctgatccagaacgtcacccagaatgacacaggattctacaccctacaagtcataaagtcagatcttgtgaatgaagaagcaactggacagttccatgtatacccggagctgcccaagccctccatctccagcaacaactccaaccctgtggaggacaaggatgctgtggccttcacctgtgaacctgagactcaggacacaacctacctgtggtggataaacaatcagagcctcccggtcagtcccaggctgcagctgtccaatggcaacaggaccctcactctactcagtgtcacaaggaatgacacaggaccctatgagtgtgaaatacagaacccagtgagtgcgaaccgcagtgacccagtcaccttgaatgtcacctatggcccggacacccccaccatttccccttcagacacctattaccgtccaggggcaaacctcagcctctcctgctatgcagcctctaacccacctgcacagtactcctggcttatcaatggaacattccagcaaagcacacaagagctctttatccctaacatcactgtgaataatagtggatcctatacctgccacgccaataactcagtcactggctgcaacaggaccacagtcaagacgatcatagtcactgagtctcccgtcctcggagaggatgaagctgtcccagggcaacaccaccctcagcataaaccctgtcaagagggaggatgctgggacgtattggtgtgaggtcttcaacccaatcagtaagaaccaaagcgaccccatcatgctgaacgtaaactgtaagtgactcctcaccccttcctatatgtccctctaggattactctgtcaatggtgtgcaaaatggataaaactcacaggaggcagaatatcaatgaagagaccattatagcaaacagaattgcaaagtggttaagagctcagctcaggccgggcacagtggctcacgcctgtgatcccagcagtttgggaggccaaggcgggcggatcacgagggcaggagatcgagnccatcctggctaatatggtgaaaccccgtgtctactanaaatacaaaaaaaaattagccgggcatggtggcgggcgcctgtggtcccagctactcgggaggctgaggcgggagaatggcgtgaacctgggaggcggagctttcagtgagccgagatggtgccactgcactccagtctgggcaacagngcaagactctgtctc

SEQ ID NO: 424943 - DNA, 738 bp, Homo sapiens
aattgtgagctttcaccttaagtccatttcaggtacatgcatattctactgacgcatattttgttcaatcgatactgtagcatttgcacccgggctgaccaccgagtatccacacagtgctacttgcattgtcaccagctgagtgactgtgagggtagccccaattgtgcaacggtataacaagaatagctaggcacagtgctaacacctgtatcccacatatgggagccgaggctgaggatctctgagcccaggactccaagaccagcctgggcaaaatagtggaacccctatctctccaaaaataatttttttttaataagccaggtgggtggggatggtggctcacgcctgtaatcccaaattgctgggattacagtcatacaccactgtacctggcctacagttataaatttctttcttgcacaagattcttaactactctgagcctcggattcctcaaccgaaaattgcactgtgaatgcctgctccatagtattgcacgggtttggggtttttgttttgtttttgagcctgggtgatagagtgagaacctgcctcaaaaaaaaaaaaaaaaaaaaagaagaagaagaaatagatgcaaaaggtattatttatatattatatatatatatatatatatatatggagggagaagcattatacaagaaacccactgggacatggctatgatcaaatatgggaaagggggaaaaaaggaggtaaagcaaagtctca

SEQ ID NO: 424944 - DNA, 375 bp, Homo sapiens
cagcacagagagtggaaaacagcagaggtgacagagcagccgtgctcgaagcgttcctggagcccaagctctcctccacaggtgaagacagggccagcaggagacaccatggggcacctctcagccccacttcacagagtgcgtgtaccctggcaggggcttctgctcacagcctcacttctaaccttctggaacccgcccaccactgcccagctcactactgaatccatgccattcaatgttgcagaggggaaggaggttcttctccttgtccacaatctgccccagcaacccacacaaccaacttcagcctccccatccctaacagccacagaaataatttattcagaagtaaaaaagcagtaatgaaacctg

SEQ ID NO: 424945 - DNA, 435 bp, Homo sapiens
tgggccggcactacttggactctggcatacctggaacttctggcatagctggaccttctggcattcttggccttcttttacctattccatgagatataaggaatatgtgaggttttaaaacagactcacaatagttttccctaaatgagagaaggaaatgcccttcatcagggatgagcagctcagactctgctccctgctctactcccggcttgcccggtgattggctctgccctgaccccatgtggggtaggacgcaggtgtgtgcagaaggtgtccaggtggcctgtcatgaatccagctaaatcaagatggcagtcaatggctggtctcaaactcctgacctcaggtgatccacccacctcggcctcccaaagtacagggattacaggcatgagccaccatgcccagccttaatttttatatttttagtag

SEQ ID NO: 424946 - DNA, 325 bp, Homo sapiens
tctggtactaacatgctgggtctggaccatacactctgagggaagtaaattccttaactgatccttaaactccccaccctccaactgccacctccttcagctagaatcacctgaagtcagctttgcatttccatggatcgctaactcttcttttgcttctccagctcaggaccactccaatgacccacctaacaagatgaatgaagttacttattctaccctgaactttgaagcccagcaacccacacaaccaacttcagcctccccatccctaacagccacagaaataatttattcagaagtaaaaaagcagtaatgaaacctg

SEQ ID NO: 424947 - DNA, 4225 bp, Homo sapiens
  misc_feature (4218)..(4218): n is a, c, g, or t
cagcacagagagtggaaaacagcagaggtgacagagcagccgtgctcgaagcgttcctggagcccaagctctcctccacaggtgaagacagggccagcaggagacaccatggggcacctctcagccccacttcacagagtgcgtgtaccctggcaggggcttctgctcacagcctcacttctaaccttctggaacccgcccaccactgcccagctcactactgaatccatgccattcaatgttgcagaggggaaggaggttcttctccttgtccacaatctgccccagcaactttttggctacagctggtacaaaggggaaagagtggatggcaaccgtcaaattgtaggatatgcaataggaactcaacaagctaccccagggcccgcaaacagcggtcgagagacaatataccccaatgcatccctgctgatccagaacgtcacccagaatgacacaggattctacaccctacaagtcataaagtcagatcttgtgaatgaagaagcaactggacagttccatgtatacccggagctgcccaagccctccatctccagcaacaactccaaccctgtggaggacaaggatgctgtggccttcacctgtgaacctgagactcaggacacaacctacctgtggtggataaacaatcagagcctcccggtcagtcccaggctgcagctgtccaatggcaacaggaccctcactctactcagtgtcacaaggaatgacacaggaccctatgagtgtgaaatacagaacccagtgagtgcgaaccgcagtgacccagtcaccttgaatgtcacctatggcccggacacccccaccatttccccttcagacacctattaccgtccaggggcaaacctcagcctctcctgctatgcagcctctaacccacctgcacagtactcctggcttatcaatggaacattccagcaaagcacacaagagctctttatccctaacatcactgtgaataatagtggatcctatacctgccacgccaataactcagtcactggctgcaacaggaccacagtcaagacgatcatagtcactgagctaagtccagtagtagcaaagccccaaatcaaagccagcaagaccacagtcacaggagataaggactctgtgaacctgacctgctccacaaatgacactggaatctccatccgttggttcttcaaaaaccagagtctcccgtcctcggagaggatgaagctgtcccagggcaacaccaccctcagcataaaccctgtcaagagggaggatgctgggacgtattggtgtgaggtcttcaacccaatcagtaagaaccaaagcgaccccatcatgctgaacgtaaactataatgctctaccacaagaaaatggcctctcacctggggccattgctggcattgtgattggagtagtggccctggttgctctgatagcagtagccctggcatgttttctgcatttcgggaagaccggcaggtatgatggcctttcctcttgttctgtttcctccaaggctgactgccatgcttgggagagggaaagaattctttgcctgtctctgggcctggatctcatactcctcccactaaactcctgcttctcggcactaattcccacaggtttcctcttccctggtcttcgtgctccctgtctcccattatctcttggacatgggtattccaatccccatctaatctagaggaagagactcaagtatgttcctctgtcccctagtcagggaaagcaaggtctaagaaggaaaacaaatgaaaaaatgaaagaagcagcaggagaaagcaagtcatgtgctctgttgaccacattggaagaggagggagaaatagcataggaagagaacctaagagaaagcaaaaacaaccaaagtcctcttgaacaataaatagagaaaaaaaaaaaagtatctaccccggaaaacaaaatgggaaaggttttaaggatagaagtaggcacagaagcagctgataaagaatgaaatgaaatgtgaacatccagcaaacaggaaaagagtaaacactagaagggattgtagttagactgaagaacgaggccctcagaagaaaggcagtatgaacatcaaggactctaaggaattacctgctcacagtgtccttcctaacttacggaacaaagatcctgtgcttgggaatagcagtcacagtttctgatatttatttagggcaagcgaccagcgtgatctcacagagcacaaaccctcagtctccaaccacactcaggaccactccaatgacccacctaacaagatgaatgaagttacttattctaccctgaactttgaagcccagcaacccacacaaccaacttcagcctccccatccctaacagccacagaaataatttattcagaagtaaaaaagcagtaatgaaacctgtcctgctcactgcagtgctgatgtatttcaagtctctcaccctcatcactaggagattcctttcccctgtaggggtagaggggtggggacagaaacaactttctcctactcttccttcctaataggcatctccaggctgcctggtcactgcccctctctcagtgtcaatagatgaaagtacattgggagtctgtaggaaacccaaccttcttgtcattgaaatttggcaaagctgactttgggaaagagggaccagaacttcccctcccttccccttttcccaacctggacttgttttaaacttgcctgttcagagcactcattccttcccacccccagtcctgtcctatcactctaattcggatttgccatagccttgaggttatgtccttttccattaagtacatgtgccaggaaacaagagagagagaaagtaaaggcagtaatgccttctcctatttctccaaagccttgtgtgaactcaccaaacacaagaaaatcaaatatataaccaatagtgaaatgccacacctttgtccactgtcagggttgtctacctgtaggatcagggtctaagcaccttggtgcttagctagaataccacctaatccttctggcaagcctgtcttcagagaacccactagaagcaactaggaaaatcacttgccaaaatccaaggcaattcctgatggaaaatgcaaaagcacatatatgttttaatatctttatgggctctgttcaaggcagtgctgagagggaggggttatagcttcaggagggaaccagcttctgataaacacaatctgctaggaacttgggaaaggaatcagagagctgcccttcagcgattatttaaattattgttaaagaatacacaatttggggtattgggatttttctccttttctctgagacattccaccattttaatttttgtaactgcttatttatgtgaaaagggttatttttacttagcttagctatgtcagccaatccgattgccttaggtgaaagaaaccaccgaaatccctcaggtcccttggtcaggagcctctcaagattttttttgtcagaggctccaaatagaaaataagaaaaggttttcttcattcatggctagagctagatttaactcagtttctaggcacctcagaccaatcatcaactaccattctattccatgtttgcacctgtgcattttctgtttgcccccattcactttgtcaggaaaccttggcctctgctaaggtgtatttggtccttgagaagtgggagcaccctacagggacactatcactcatgctggtggcattgtttacagctagaaagctgcactggtgctaatgccccttggggaaatggggctgtgaggaggaggattataacttaggcctagcctcttttaacagcctctgaaatttatcttttcttctatggggtctataaatgtatcttataataaaaaggaaggacaggaggaagacaggcaaatgtacttctcacccagtcttctacacagatggaatctctttggggctaagagaaaggttttattctatattgcttacctgatctcatgttaggcctaagaggctttctccaggaggattagcttggagttctctatactcaggtacctctttcagggttttctaaccctgacacggactgtgcatactttccctcatccatgctgtgctgtgttatttaatttttcctggctaagatcatgtctgaattatgtatgaaaattattctatgtttttataataaaaataatatatcagacatcggtgatnaaaaaaa

SEQ ID NO: 424948 - DNA, 3309 bp, Homo sapiens
  misc_feature (3302)..(3302): n is a, c, g, or t
cagcacagagagtggaaaacagcagaggtgacagagcagccgtgctcgaagcgttcctggagcccaagctctcctccacaggtgaagacagggccagcaggagacaccatggggcacctctcagccccacttcacagagtgcgtgtaccctggcaggggcttctgctcacagcctcacttctaaccttctggaacccgcccaccactgcccagctcactactgaatccatgccattcaatgttgcagaggggaaggaggttcttctccttgtccacaatctgccccagcaactttttggctacagctggtacaaaggggaaagagtggatggcaaccgtcaaattgtaggatatgcaataggaactcaacaagctaccccagggcccgcaaacagcggtcgagagacaatataccccaatgcatccctgctgatccagaacgtcacccagaatgacacaggattctacaccctacaagtcataaagtcagatcttgtgaatgaagaagcaactggacagttccatgtatacccggagctgcccaagccctccatctccagcaacaactccaaccctgtggaggacaaggatgctgtggccttcacctgtgaacctgagactcaggacacaacctacctgtggtggataaacaatcagagcctcccggtcagtcccaggctgcagctgtccaatggcaacaggaccctcactctactcagtgtcacaaggaatgacacaggaccctatgagtgtgaaatacagaacccagtgagtgcgaaccgcagtgacccagtcaccttgaatgtcacctatggcccggacacccccaccatttccccttcagacacctattaccgtccaggggcaaacctcagcctctcctgctatgcagcctctaacccacctgcacagtactcctggcttatcaatggaacattccagcaaagcacacaagagctctttatccctaacatcactgtgaataatagtggatcctatacctgccacgccaataactcagtcactggctgcaacaggaccacagtcaagacgatcatagtcactgagagacagaatctcaccatgttgcccaggctggactcgaactcctgggctcaagcaatcctcccatctgtttcccaaagtgctgagattacagataatgctctaccacaagaaaatggcctctcacctggggccattgctggcattgtgattggagtagtggccctggttgctctgatagcagtagccctggcatgttttctgcatttcgggaagaccggcagggcaagcgaccagcgtgatctcacagagcacaaaccctcagtctccaaccacactcaggaccactccaatgacccacctaacaagatgaatgaagttacttattctaccctgaactttgaagcccagcaacccacacaaccaacttcagcctccccatccctaacagccacagaaataatttattcagaagtaaaaaagcagtaatgaaacctgtcctgctcactgcagtgctgatgtatttcaagtctctcaccctcatcactaggagattcctttcccctgtaggggtagaggggtggggacagaaacaactttctcctactcttccttcctaataggcatctccaggctgcctggtcactgcccctctctcagtgtcaatagatgaaagtacattgggagtctgtaggaaacccaaccttcttgtcattgaaatttggcaaagctgactttgggaaagagggaccagaacttcccctcccttccccttttcccaacctggacttgttttaaacttgcctgttcagagcactcattccttcccacccccagtcctgtcctatcactctaattcggatttgccatagccttgaggttatgtccttttccattaagtacatgtgccaggaaacaagagagagagaaagtaaaggcagtaatgccttctcctatttctccaaagccttgtgtgaactcaccaaacacaagaaaatcaaatatataaccaatagtgaaatgccacacctttgtccactgtcagggttgtctacctgtaggatcagggtctaagcaccttggtgcttagctagaataccacctaatccttctggcaagcctgtcttcagagaacccactagaagcaactaggaaaatcacttgccaaaatccaaggcaattcctgatggaaaatgcaaaagcacatatatgttttaatatctttatgggctctgttcaaggcagtgctgagagggaggggttatagcttcaggagggaaccagcttctgataaacacaatctgctaggaacttgggaaaggaatcagagagctgcccttcagcgattatttaaattattgttaaagaatacacaatttggggtattgggatttttctccttttctctgagacattccaccattttaatttttgtaactgcttatttatgtgaaaagggttatttttacttagcttagctatgtcagccaatccgattgccttaggtgaaagaaaccaccgaaatccctcaggtcccttggtcaggagcctctcaagattttttttgtcagaggctccaaatagaaaataagaaaaggttttcttcattcatggctagagctagatttaactcagtttctaggcacctcagaccaatcatcaactaccattctattccatgtttgcacctgtgcattttctgtttgcccccattcactttgtcaggaaaccttggcctctgctaaggtgtatttggtccttgagaagtgggagcaccctacagggacactatcactcatgctggtggcattgtttacagctagaaagctgcactggtgctaatgccccttggggaaatggggctgtgaggaggaggattataacttaggcctagcctcttttaacagcctctgaaatttatcttttcttctatggggtctataaatgtatcttataataaaaaggaaggacaggaggaagacaggcaaatgtacttctcacccagtcttctacacagatggaatctctttggggctaagagaaaggttttattctatattgcttacctgatctcatgttaggcctaagaggctttctccaggaggattagcttggagttctctatactcaggtacctctttcagggttttctaaccctgacacggactgtgcatactttccctcatccatgctgtgctgtgttatttaatttttcctggctaagatcatgtctgaattatgtatgaaaattattctatgtttttataataaaaataatatatcagacatcggtgatnaaaaaaa

SEQ ID NO: 424949 - DNA, 3495 bp, Homo sapiens
  misc_feature (3488)..(3488): n is a, c, g, or t
attgtgaggtgatctagaggtcccgcaacaactccaaccctgtggaggacaaggatgctgtggccttcacctgtgaacctgagactcaggacacaacctacctgtggtggataaacaatcagagcctcccggtcagtcccaggctgcagctgtccaatggcaacaggaccctcactctactcagtgtcacaaggaatgacacaggaccctatgagtgtgaaatacagaacccagtgagtgcgaaccgcagtgacccagtcaccttgaatgtcacctatggcccggacacccccaccatttccccttcagacacctattaccgtccaggggcaaacctcagcctctcctgctatgcagcctctaacccacctgcacagtactcctggcttatcaatggaacattccagcaaagcacacaagagctctttatccctaacatcactgtgaataatagtggatcctatacctgccacgccaataactcagtcactggctgcaacaggaccacagtcaagacgatcatagtcactgagatggcgtttcaccatgttgccaaggctggtctcaaactcctgagctcaagcaatccacccgcctccacctcccaaagtgctaagattacagataatgctctaccacaagaaaatggcctctcacctggggccattgctggcattgtgattggagtagtggccctggttgctctgatagcagtagccctggcatgttttctgcatttcgggaagaccggcaggtatgatggcctttcctcttgttctgtttcctccaaggctgactgccatgcttgggagagggaaagaattctttgcctgtctctgggcctggatctcatactcctcccactaaactcctgcttctcggcactaattcccacaggtttcctcttccctggtcttcgtgctccctgtctcccattatctcttggacatgggtattccaatccccatctaatctagaggaagagactcaagtatgttcctctgtcccctagtcagggaaagcaaggtctaagaaggaaaacaaatgaaaaaatgaaagaagcagcaggagaaagcaagtcatgtgctctgttgaccacattggaagaggagggagaaatagcataggaagagaacctaagagaaagcaaaaacaaccaaagtcctcttgaacaataaatagagaaaaaaaaaaaagtatctaccccggaaaacaaaatgggaaaggttttaaggatagaagtaggcacagaagcagctgataaagaatgaaatgaaatgtgaacatccagcaaacaggaaaagagtaaacactagaagggattgtagttagactgaagaacgaggccctcagaagaaaggcagtatgaacatcaaggactctaaggaattacctgctcacagtgtccttcctaacttacggaacaaagatcctgtgcttgggaatagcagtcacagtttctgatatttatttagggcaagcgaccagcgtgatctcacagagcacaaaccctcagtctccaaccacactcaggaccactccaatgacccacctaacaagatgaatgaagttacttattctaccctgaactttgaagcccagcaacccacacaaccaacttcagcctccccatccctaacagccacagaaataatttattcagaagtaaaaaagcagtaatgaaacctgtcctgctcactgcagtgctgatgtatttcaagtctctcaccctcatcactaggagattcctttcccctgtaggggtagaggggtggggacagaaacaactttctcctactcttccttcctaataggcatctccaggctgcctggtcactgcccctctctcagtgtcaatagatgaaagtacattgggagtctgtaggaaacccaaccttcttgtcattgaaatttggcaaagctgactttgggaaagagggaccagaacttcccctcccttccccttttcccaacctggacttgttttaaacttgcctgttcagagcactcattccttcccacccccagtcctgtcctatcactctaattcggatttgccatagccttgaggttatgtccttttccattaagtacatgtgccaggaaacaagagagagagaaagtaaaggcagtaatgccttctcctatttctccaaagccttgtgtgaactcaccaaacacaagaaaatcaaatatataaccaatagtgaaatgccacacctttgtccactgtcagggttgtctacctgtaggatcagggtctaagcaccttggtgcttagctagaataccacctaatccttctggcaagcctgtcttcagagaacccactagaagcaactaggaaaatcacttgccaaaatccaaggcaattcctgatggaaaatgcaaaagcacatatatgttttaatatctttatgggctctgttcaaggcagtgctgagagggaggggttatagcttcaggagggaaccagcttctgataaacacaatctgctaggaacttgggaaaggaatcagagagctgcccttcagcgattatttaaattattgttaaagaatacacaatttggggtattgggatttttctccttttctctgagacattccaccattttaatttttgtaactgcttatttatgtgaaaagggttatttttacttagcttagctatgtcagccaatccgattgccttaggtgaaagaaaccaccgaaatccctcaggtcccttggtcaggagcctctcaagattttttttgtcagaggctccaaatagaaaataagaaaaggttttcttcattcatggctagagctagatttaactcagtttctaggcacctcagaccaatcatcaactaccattctattccatgtttgcacctgtgcattttctgtttgcccccattcactttgtcaggaaaccttggcctctgctaaggtgtatttggtccttgagaagtgggagcaccctacagggacactatcactcatgctggtggcattgtttacagctagaaagctgcactggtgctaatgccccttggggaaatggggctgtgaggaggaggattataacttaggcctagcctcttttaacagcctctgaaatttatcttttcttctatggggtctataaatgtatcttataataaaaaggaaggacaggaggaagacaggcaaatgtacttctcacccagtcttctacacagatggaatctctttggggctaagagaaaggttttattctatattgcttacctgatctcatgttaggcctaagaggctttctccaggaggattagcttggagttctctatactcaggtacctctttcagggttttctaaccctgacacggactgtgcatactttccctcatccatgctgtgctgtgttatttaatttttcctggctaagatcatgtctgaattatgtatgaaaattattctatgtttttataataaaaataatatatcagacatcggtgatnaaaaaaa

SEQ ID NO: 424950 - DNA, 2623 bp, Homo sapiens
  misc_feature (2616)..(2616): n is a, c, g, or t
cagtggctcacacctgtaatcctgacactttgagaggccgaggtgggcacatcactgatgtcaggagattgagaccagcctggccaacatagtgaaaccttgttctactaaaaatacaaaaaattagccgggcgtggtagtggatgcctgtaatcccagctacttgggaggctgagacaggagcatcgcttgaacccgggaggcagagcttgcagtgagccgagatcgtgccattgcactccagcctgggcgacagagcgagactccgtcgcaaaaaaaaaaaactctaccagtcacttccctccaaagaggagtaaccactatcctgacttctaatgctccagattagtattgcttggttttgttcctatctaaaggagaaataaaacatatccttatatgtggcttcttcaacattgctttgtgagactcatccatattgtatgtatttgtggtttgctggttctcattgctgcattatcctatcccattgcatatataccataatttctctcttctaatgatcattcatcaggaggtcagcaagcagagaatgggtaacaacaaaagcccttctccagagctaaaatttcaaaatggtaacagcttgtggtgctgaatcacaccaggcaaggtgaggccctgccctgtgtcactgacttaactgatcattatttgtgcttttcagatgaatgaagttacttattctaccctgaactttgaagcccagcaacccacacaaccaacttcagcctccccatccctaacagccacagaaataatttattcagaagtaaaaaagcagtaatgaaacctgtcctgctcactgcagtgctgatgtatttcaagtctctcaccctcatcactaggagattcctttcccctgtaggggtagaggggtggggacagaaacaactttctcctactcttccttcctaataggcatctccaggctgcctggtcactgcccctctctcagtgtcaatagatgaaagtacattgggagtctgtaggaaacccaaccttcttgtcattgaaatttggcaaagctgactttgggaaagagggaccagaacttcccctcccttccccttttcccaacctggacttgttttaaacttgcctgttcagagcactcattccttcccacccccagtcctgtcctatcactctaattcggatttgccatagccttgaggttatgtccttttccattaagtacatgtgccaggaaacaagagagagagaaagtaaaggcagtaatgccttctcctatttctccaaagccttgtgtgaactcaccaaacacaagaaaatcaaatatataaccaatagtgaaatgccacacctttgtccactgtcagggttgtctacctgtaggatcagggtctaagcaccttggtgcttagctagaataccacctaatccttctggcaagcctgtcttcagagaacccactagaagcaactaggaaaatcacttgccaaaatccaaggcaattcctgatggaaaatgcaaaagcacatatatgttttaatatctttatgggctctgttcaaggcagtgctgagagggaggggttatagcttcaggagggaaccagcttctgataaacacaatctgctaggaacttgggaaaggaatcagagagctgcccttcagcgattatttaaattattgttaaagaatacacaatttggggtattgggatttttctccttttctctgagacattccaccattttaatttttgtaactgcttatttatgtgaaaagggttatttttacttagcttagctatgtcagccaatccgattgccttaggtgaaagaaaccaccgaaatccctcaggtcccttggtcaggagcctctcaagattttttttgtcagaggctccaaatagaaaataagaaaaggttttcttcattcatggctagagctagatttaactcagtttctaggcacctcagaccaatcatcaactaccattctattccatgtttgcacctgtgcattttctgtttgcccccattcactttgtcaggaaaccttggcctctgctaaggtgtatttggtccttgagaagtgggagcaccctacagggacactatcactcatgctggtggcattgtttacagctagaaagctgcactggtgctaatgccccttggggaaatggggctgtgaggaggaggattataacttaggcctagcctcttttaacagcctctgaaatttatcttttcttctatggggtctataaatgtatcttataataaaaaggaaggacaggaggaagacaggcaaatgtacttctcacccagtcttctacacagatggaatctctttggggctaagagaaaggttttattctatattgcttacctgatctcatgttaggcctaagaggctttctccaggaggattagcttggagttctctatactcaggtacctctttcagggttttctaaccctgacacggactgtgcatactttccctcatccatgctgtgctgtgttatttaatttttcctggctaagatcatgtctgaattatgtatgaaaattattctatgtttttataataaaaataatatatcagacatcggtgatnaaaaaaa

SEQ ID NO: 424951 - DNA, 3931 bp, Homo sapiens
  misc_feature (3924)..(3924): n is a, c, g, or t
aggtcatgaagactggatggggcatcatcattccctaaaaaattatttaatgaaaaaaaacactaccttcccttttgtatgtaaagtgacagtcacaggaaggatgcctgatcacagctccaggaaagggtcagtgggaggccaggcacagtggctcacgcctgtaatcccagcactttgggaggctgaggcgggtggatcatgaggtcaggagatcaagaccatcctggctaacatggtgaaaccccgtctctactaaaaatacaaaaaattagctgggcatggtggcacatgcctttagtcccagctactcgggaggctgaggcaggagaatggcttgaacccgggaggcagagcttgcagtgagctgagatcatgccactgcattccggcctgggtgacagagcgagactccgtctgaaaaaaaaaaaaaaaaagtcagtgggaaaaacattctacctgatgatgaggttgctcggtctgtgcgctgagaagaagattccaagtggagatatagagatatccagagggtcactctgagacgatctggggtcaggagggaggtgcagccctctccttacaattcatcacctgaacaaagacactcgaccttctgcagagggtcagggctatcccctggttggtgacctttgcacagctcactgtgggacctgagagctggctaaaatctcagggaaaggagcatagccctaggccccaggccccaaccctattctcagtaggttatctcagatactctgcttgtccacagagctaagtccagtagtagcaaagccccaaatcaaagccagcaagaccacagtcacaggagataaggactctgtgaacctgacctgctccacaaatgacactggaatctccatccgttggttcttcaaaaaccagagtctcccgtcctcggagaggatgaagctgtcccagggcaacaccaccctcagcataaaccctgtcaagagggaggatgctgggacgtattggtgtgaggtcttcaacccaatcagtaagaaccaaagcgaccccatcatgctgaacgtaaactataatgctctaccacaagaaaatggcctctcacctggggccattgctggcattgtgattggagtagtggccctggttgctctgatagcagtagccctggcatgttttctgcatttcgggaagaccggcaggtatgatggcctttcctcttgttctgtttcctccaaggctgactgccatgcttgggagagggaaagaattctttgcctgtctctgggcctggatctcatactcctcccactaaactcctgcttctcggcactaattcccacaggtttcctcttccctggtcttcgtgctccctgtctcccattatctcttggacatgggtattccaatccccatctaatctagaggaagagactcaagtatgttcctctgtcccctagtcagggaaagcaaggtctaagaaggaaaacaaatgaaaaaatgaaagaagcagcaggagaaagcaagtcatgtgctctgttgaccacattggaagaggagggagaaatagcataggaagagaacctaagagaaagcaaaaacaaccaaagtcctcttgaacaataaatagagaaaaaaaaaaaagtatctaccccggaaaacaaaatgggaaaggttttaaggatagaagtaggcacagaagcagctgataaagaatgaaatgaaatgtgaacatccagcaaacaggaaaagagtaaacactagaagggattgtagttagactgaagaacgaggccctcagaagaaaggcagtatgaacatcaaggactctaaggaattacctgctcacagtgtccttcctaacttacggaacaaagatcctgtgcttgggaatagcagtcacagtttctgatatttatttagggcaagcgaccagcgtgatctcacagagcacaaaccctcagtctccaaccacactcaggaccactccaatgacccacctaacaagatgaatgaagttacttattctaccctgaactttgaagcccagcaacccacacaaccaacttcagcctccccatccctaacagccacagaaataatttattcagaagtaaaaaagcagtaatgaaacctgtcctgctcactgcagtgctgatgtatttcaagtctctcaccctcatcactaggagattcctttcccctgtaggggtagaggggtggggacagaaacaactttctcctactcttccttcctaataggcatctccaggctgcctggtcactgcccctctctcagtgtcaatagatgaaagtacattgggagtctgtaggaaacccaaccttcttgtcattgaaatttggcaaagctgactttgggaaagagggaccagaacttcccctcccttccccttttcccaacctggacttgttttaaacttgcctgttcagagcactcattccttcccacccccagtcctgtcctatcactctaattcggatttgccatagccttgaggttatgtccttttccattaagtacatgtgccaggaaacaagagagagagaaagtaaaggcagtaatgccttctcctatttctccaaagccttgtgtgaactcaccaaacacaagaaaatcaaatatataaccaatagtgaaatgccacacctttgtccactgtcagggttgtctacctgtaggatcagggtctaagcaccttggtgcttagctagaataccacctaatccttctggcaagcctgtcttcagagaacccactagaagcaactaggaaaatcacttgccaaaatccaaggcaattcctgatggaaaatgcaaaagcacatatatgttttaatatctttatgggctctgttcaaggcagtgctgagagggaggggttatagcttcaggagggaaccagcttctgataaacacaatctgctaggaacttgggaaaggaatcagagagctgcccttcagcgattatttaaattattgttaaagaatacacaatttggggtattgggatttttctccttttctctgagacattccaccattttaatttttgtaactgcttatttatgtgaaaagggttatttttacttagcttagctatgtcagccaatccgattgccttaggtgaaagaaaccaccgaaatccctcaggtcccttggtcaggagcctctcaagattttttttgtcagaggctccaaatagaaaataagaaaaggttttcttcattcatggctagagctagatttaactcagtttctaggcacctcagaccaatcatcaactaccattctattccatgtttgcacctgtgcattttctgtttgcccccattcactttgtcaggaaaccttggcctctgctaaggtgtatttggtccttgagaagtgggagcaccctacagggacactatcactcatgctggtggcattgtttacagctagaaagctgcactggtgctaatgccccttggggaaatggggctgtgaggaggaggattataacttaggcctagcctcttttaacagcctctgaaatttatcttttcttctatggggtctataaatgtatcttataataaaaaggaaggacaggaggaagacaggcaaatgtacttctcacccagtcttctacacagatggaatctctttggggctaagagaaaggttttattctatattgcttacctgatctcatgttaggcctaagaggctttctccaggaggattagcttggagttctctatactcaggtacctctttcagggttttctaaccctgacacggactgtgcatactttccctcatccatgctgtgctgtgttatttaatttttcctggctaagatcatgtctgaattatgtatgaaaattattctatgtttttataataaaaataatatatcagacatcggtgatnaaaaaaa

SEQ ID NO: 424952 - DNA, 3653 bp, Homo sapiens
  misc_feature (3646)..(3646): n is a, c, g, or t
aattgtgagctttcaccttaagtccatttcaggtacatgcatattctactgacgcatattttgttcaatcgatactgtagcatttgcacccgggctgaccaccgagtatccacacagtgctacttgcattgtcaccagctgagtgactgtgagggtagccccaattgtgcaacggtataacaagaatagctaggcacagtgctaacacctgtatcccacatatgggagccgaggctgaggatctctgagcccaggactccaagaccagcctgggcaaaatagtggaacccctatctctccaaaaataatttttttttaataagccaggtgggtggggatggtggctcacgcctgtaatcccaaattgctgggattacagtcatacaccactgtacctggcctacagttataaatttctttcttgcacaagattcttaactactctgagcctcggattcctcaaccgaaaattgcactgtgaatgcctgctccatagtattgcacgggtttggggtttttgttttgtttttgagacagggtgtcactctgtcacccagactggagtgcagtggtgcaaacacagctcactgcagcctcaacctcctgggctcaagcaattccctcaccttagcctcctaagtagtacatactaccacatctggctaatttatttttatttttgttttcagagagacagaatctcaccatgttgcccaggctggactcgaactcctgggctcaagcaatcctcccatctgtttcccaaagtgctgagattacagataatgctctaccacaagaaaatggcctctcacctggggccattgctggcattgtgattggagtagtggccctggttgctctgatagcagtagccctggcatgttttctgcatttcgggaagaccggcaggtatgatggcctttcctcttgttctgtttcctccaaggctgactgccatgcttgggagagggaaagaattctttgcctgtctctgggcctggatctcatactcctcccactaaactcctgcttctcggcactaattcccacaggtttcctcttccctggtcttcgtgctccctgtctcccattatctcttggacatgggtattccaatccccatctaatctagaggaagagactcaagtatgttcctctgtcccctagtcagggaaagcaaggtctaagaaggaaaacaaatgaaaaaatgaaagaagcagcaggagaaagcaagtcatgtgctctgttgaccacattggaagaggagggagaaatagcataggaagagaacctaagagaaagcaaaaacaaccaaagtcctcttgaacaataaatagagaaaaaaaaaaaagtatctaccccggaaaacaaaatgggaaaggttttaaggatagaagtaggcacagaagcagctgataaagaatgaaatgaaatgtgaacatccagcaaacaggaaaagagtaaacactagaagggattgtagttagactgaagaacgaggccctcagaagaaaggcagtatgaacatcaaggactctaaggaattacctgctcacagtgtccttcctaacttacggaacaaagatcctgtgcttgggaatagcagtcacagtttctgatatttatttagggcaagcgaccagcgtgatctcacagagcacaaaccctcagtctccaaccacactcaggaccactccaatgacccacctaacaagatgaatgaagttacttattctaccctgaactttgaagcccagcaacccacacaaccaacttcagcctccccatccctaacagccacagaaataatttattcagaagtaaaaaagcagtaatgaaacctgtcctgctcactgcagtgctgatgtatttcaagtctctcaccctcatcactaggagattcctttcccctgtaggggtagaggggtggggacagaaacaactttctcctactcttccttcctaataggcatctccaggctgcctggtcactgcccctctctcagtgtcaatagatgaaagtacattgggagtctgtaggaaacccaaccttcttgtcattgaaatttggcaaagctgactttgggaaagagggaccagaacttcccctcccttccccttttcccaacctggacttgttttaaacttgcctgttcagagcactcattccttcccacccccagtcctgtcctatcactctaattcggatttgccatagccttgaggttatgtccttttccattaagtacatgtgccaggaaacaagagagagagaaagtaaaggcagtaatgccttctcctatttctccaaagccttgtgtgaactcaccaaacacaagaaaatcaaatatataaccaatagtgaaatgccacacctttgtccactgtcagggttgtctacctgtaggatcagggtctaagcaccttggtgcttagctagaataccacctaatccttctggcaagcctgtcttcagagaacccactagaagcaactaggaaaatcacttgccaaaatccaaggcaattcctgatggaaaatgcaaaagcacatatatgttttaatatctttatgggctctgttcaaggcagtgctgagagggaggggttatagcttcaggagggaaccagcttctgataaacacaatctgctaggaacttgggaaaggaatcagagagctgcccttcagcgattatttaaattattgttaaagaatacacaatttggggtattgggatttttctccttttctctgagacattccaccattttaatttttgtaactgcttatttatgtgaaaagggttatttttacttagcttagctatgtcagccaatccgattgccttaggtgaaagaaaccaccgaaatccctcaggtcccttggtcaggagcctctcaagattttttttgtcagaggctccaaatagaaaataagaaaaggttttcttcattcatggctagagctagatttaactcagtttctaggcacctcagaccaatcatcaactaccattctattccatgtttgcacctgtgcattttctgtttgcccccattcactttgtcaggaaaccttggcctctgctaaggtgtatttggtccttgagaagtgggagcaccctacagggacactatcactcatgctggtggcattgtttacagctagaaagctgcactggtgctaatgccccttggggaaatggggctgtgaggaggaggattataacttaggcctagcctcttttaacagcctctgaaatttatcttttcttctatggggtctataaatgtatcttataataaaaaggaaggacaggaggaagacaggcaaatgtacttctcacccagtcttctacacagatggaatctctttggggctaagagaaaggttttattctatattgcttacctgatctcatgttaggcctaagaggctttctccaggaggattagcttggagttctctatactcaggtacctctttcagggttttctaaccctgacacggactgtgcatactttccctcatccatgctgtgctgtgttatttaatttttcctggctaagatcatgtctgaattatgtatgaaaattattctatgtttttataataaaaataatatatcagacatcggtgatnaaaaaaa

SEQ ID NO: 424953 - DNA, 2879 bp, Homo sapiens
  misc_feature (2872)..(2872): n is a, c, g, or t
aattgtgagctttcaccttaagtccatttcaggtacatgcatattctactgacgcatattttgttcaatcgatactgtagcatttgcacccgggctgaccaccgagtatccacacagtgctacttgcattgtcaccagctgagtgactgtgagggtagccccaattgtgcaacggtataacaagaatagctaggcacagtgctaacacctgtatcccacatatgggagccgaggctgaggatctctgagcccaggactccaagaccagcctgggcaaaatagtggaacccctatctctccaaaaataatttttttttaataagccaggtgggtggggatggtggctcacgcctgtaatcccaaattgctgggattacagtcatacaccactgtacctggcctacagttataaatttctttcttgcacaagattcttaactactctgagcctcggattcctcaaccgaaaattgcactgtgaatgcctgctccatagtattgcacgggtttggggtttttgttttgtttttgagacagggtgtcactctgtcacccagactggagtgcagtggtgcaaacacagctcactgcagcctcaacctcctgggctcaagcaattccctcaccttagcctcctaagtagtacatactaccacatctggctaatttatttttatttttgttttcagagagacagaatctcaccatgttgcccaggctggactcgaactcctgggctcaagcaatcctcccatctgtttcccaaagtgctgagattacagataatgctctaccacaagaaaatggcctctcacctggggccattgctggcattgtgattggagtagtggccctggttgctctgatagcagtagccctggcatgttttctgcatttcgggaagaccggcagctcaggaccactccaatgacccacctaacaagatgaatgaagttacttattctaccctgaactttgaagcccagcaacccacacaaccaacttcagcctccccatccctaacagccacagaaataatttattcagaagtaaaaaagcagtaatgaaacctgtcctgctcactgcagtgctgatgtatttcaagtctctcaccctcatcactaggagattcctttcccctgtaggggtagaggggtggggacagaaacaactttctcctactcttccttcctaataggcatctccaggctgcctggtcactgcccctctctcagtgtcaatagatgaaagtacattgggagtctgtaggaaacccaaccttcttgtcattgaaatttggcaaagctgactttgggaaagagggaccagaacttcccctcccttccccttttcccaacctggacttgttttaaacttgcctgttcagagcactcattccttcccacccccagtcctgtcctatcactctaattcggatttgccatagccttgaggttatgtccttttccattaagtacatgtgccaggaaacaagagagagagaaagtaaaggcagtaatgccttctcctatttctccaaagccttgtgtgaactcaccaaacacaagaaaatcaaatatataaccaatagtgaaatgccacacctttgtccactgtcagggttgtctacctgtaggatcagggtctaagcaccttggtgcttagctagaataccacctaatccttctggcaagcctgtcttcagagaacccactagaagcaactaggaaaatcacttgccaaaatccaaggcaattcctgatggaaaatgcaaaagcacatatatgttttaatatctttatgggctctgttcaaggcagtgctgagagggaggggttatagcttcaggagggaaccagcttctgataaacacaatctgctaggaacttgggaaaggaatcagagagctgcccttcagcgattatttaaattattgttaaagaatacacaatttggggtattgggatttttctccttttctctgagacattccaccattttaatttttgtaactgcttatttatgtgaaaagggttatttttacttagcttagctatgtcagccaatccgattgccttaggtgaaagaaaccaccgaaatccctcaggtcccttggtcaggagcctctcaagattttttttgtcagaggctccaaatagaaaataagaaaaggttttcttcattcatggctagagctagatttaactcagtttctaggcacctcagaccaatcatcaactaccattctattccatgtttgcacctgtgcattttctgtttgcccccattcactttgtcaggaaaccttggcctctgctaaggtgtatttggtccttgagaagtgggagcaccctacagggacactatcactcatgctggtggcattgtttacagctagaaagctgcactggtgctaatgccccttggggaaatggggctgtgaggaggaggattataacttaggcctagcctcttttaacagcctctgaaatttatcttttcttctatggggtctataaatgtatcttataataaaaaggaaggacaggaggaagacaggcaaatgtacttctcacccagtcttctacacagatggaatctctttggggctaagagaaaggttttattctatattgcttacctgatctcatgttaggcctaagaggctttctccaggaggattagcttggagttctctatactcaggtacctctttcagggttttctaaccctgacacggactgtgcatactttccctcatccatgctgtgctgtgttatttaatttttcctggctaagatcatgtctgaattatgtatgaaaattattctatgtttttataataaaaataatatatcagacatcggtgatnaaaaaaa

SEQ ID NO: 424954 - DNA, 2549 bp, Homo sapiens
  misc_feature (2542)..(2542): n is a, c, g, or t
tgcatcaacgcgttgagactctccatattgtcgactgcaggcggcgcgaattcactagtgattagatgactgaagaacgaggccctcagaagaaaggcagtatgaacatcaaggactctaaggaattacctgctcacagtgtccttcctaacttacggaacaaagatcctgtgcttgggaatagcagtcacagtttctgatatttatttagggcaagcgaccagcgtgatctcacagagcacaaaccctcagtctccaaccacagtaagtaaagccacttaccccagtgagaactggtatgttccaccacgtgccctcccctggcagggaatcctggattcccaaaccactccctcccttctgaattttcacagaaaggatctctatttcccaaccctaaggtggcataggtcttcccacccttcctagccacaggagtcccctgagacacatctgaggagagaggctcactctgcctaggccaggcaggcctgaggaagatcccatgtttccaggagccatttcctcagccttactccttccgcctcctgcctctattacggatgtgggcactctcccttgctcaggaccactccaatgacccacctaacaagatgaatgaagttacttattctaccctgaactttgaagcccagcaacccacacaaccaacttcagcctccccatccctaacagccacagaaataatttattcagaagtaaaaaagcagtaatgaaacctgtcctgctcactgcagtgctgatgtatttcaagtctctcaccctcatcactaggagattcctttcccctgtaggggtagaggggtggggacagaaacaactttctcctactcttccttcctaataggcatctccaggctgcctggtcactgcccctctctcagtgtcaatagatgaaagtacattgggagtctgtaggaaacccaaccttcttgtcattgaaatttggcaaagctgactttgggaaagagggaccagaacttcccctcccttccccttttcccaacctggacttgttttaaacttgcctgttcagagcactcattccttcccacccccagtcctgtcctatcactctaattcggatttgccatagccttgaggttatgtccttttccattaagtacatgtgccaggaaacaagagagagagaaagtaaaggcagtaatgccttctcctatttctccaaagccttgtgtgaactcaccaaacacaagaaaatcaaatatataaccaatagtgaaatgccacacctttgtccactgtcagggttgtctacctgtaggatcagggtctaagcaccttggtgcttagctagaataccacctaatccttctggcaagcctgtcttcagagaacccactagaagcaactaggaaaatcacttgccaaaatccaaggcaattcctgatggaaaatgcaaaagcacatatatgttttaatatctttatgggctctgttcaaggcagtgctgagagggaggggttatagcttcaggagggaaccagcttctgataaacacaatctgctaggaacttgggaaaggaatcagagagctgcccttcagcgattatttaaattattgttaaagaatacacaatttggggtattgggatttttctccttttctctgagacattccaccattttaatttttgtaactgcttatttatgtgaaaagggttatttttacttagcttagctatgtcagccaatccgattgccttaggtgaaagaaaccaccgaaatccctcaggtcccttggtcaggagcctctcaagattttttttgtcagaggctccaaatagaaaataagaaaaggttttcttcattcatggctagagctagatttaactcagtttctaggcacctcagaccaatcatcaactaccattctattccatgtttgcacctgtgcattttctgtttgcccccattcactttgtcaggaaaccttggcctctgctaaggtgtatttggtccttgagaagtgggagcaccctacagggacactatcactcatgctggtggcattgtttacagctagaaagctgcactggtgctaatgccccttggggaaatggggctgtgaggaggaggattataacttaggcctagcctcttttaacagcctctgaaatttatcttttcttctatggggtctataaatgtatcttataataaaaaggaaggacaggaggaagacaggcaaatgtacttctcacccagtcttctacacagatggaatctctttggggctaagagaaaggttttattctatattgcttacctgatctcatgttaggcctaagaggctttctccaggaggattagcttggagttctctatactcaggtacctctttcagggttttctaaccctgacacggactgtgcatactttccctcatccatgctgtgctgtgttatttaatttttcctggctaagatcatgtctgaattatgtatgaaaattattctatgtttttataataaaaataatatatcagacatcggtgatnaaaaaaa

SEQ ID NO: 424955 - DNA, 2131 bp, Homo sapiens
  misc_feature (2124)..(2124): n is a, c, g, or t
tctggtactaacatgctgggtctggaccatacactctgagggaagtaaattccttaactgatccttaaactccccaccctccaactgccacctccttcagctagaatcacctgaagtcagctttgcatttccatggatcgctaactcttcttttgcttctccagctcaggaccactccaatgacccacctaacaagatgaatgaagttacttattctaccctgaactttgaagcccagcaacccacacaaccaacttcagcctccccatccctaacagccacagaaataatttattcagaagtaaaaaagcagtaatgaaacctgtcctgctcactgcagtgctgatgtatttcaagtctctcaccctcatcactaggagattcctttcccctgtaggggtagaggggtggggacagaaacaactttctcctactcttccttcctaataggcatctccaggctgcctggtcactgcccctctctcagtgtcaatagatgaaagtacattgggagtctgtaggaaacccaaccttcttgtcattgaaatttggcaaagctgactttgggaaagagggaccagaacttcccctcccttccccttttcccaacctggacttgttttaaacttgcctgttcagagcactcattccttcccacccccagtcctgtcctatcactctaattcggatttgccatagccttgaggttatgtccttttccattaagtacatgtgccaggaaacaagagagagagaaagtaaaggcagtaatgccttctcctatttctccaaagccttgtgtgaactcaccaaacacaagaaaatcaaatatataaccaatagtgaaatgccacacctttgtccactgtcagggttgtctacctgtaggatcagggtctaagcaccttggtgcttagctagaataccacctaatccttctggcaagcctgtcttcagagaacccactagaagcaactaggaaaatcacttgccaaaatccaaggcaattcctgatggaaaatgcaaaagcacatatatgttttaatatctttatgggctctgttcaaggcagtgctgagagggaggggttatagcttcaggagggaaccagcttctgataaacacaatctgctaggaacttgggaaaggaatcagagagctgcccttcagcgattatttaaattattgttaaagaatacacaatttggggtattgggatttttctccttttctctgagacattccaccattttaatttttgtaactgcttatttatgtgaaaagggttatttttacttagcttagctatgtcagccaatccgattgccttaggtgaaagaaaccaccgaaatccctcaggtcccttggtcaggagcctctcaagattttttttgtcagaggctccaaatagaaaataagaaaaggttttcttcattcatggctagagctagatttaactcagtttctaggcacctcagaccaatcatcaactaccattctattccatgtttgcacctgtgcattttctgtttgcccccattcactttgtcaggaaaccttggcctctgctaaggtgtatttggtccttgagaagtgggagcaccctacagggacactatcactcatgctggtggcattgtttacagctagaaagctgcactggtgctaatgccccttggggaaatggggctgtgaggaggaggattataacttaggcctagcctcttttaacagcctctgaaatttatcttttcttctatggggtctataaatgtatcttataataaaaaggaaggacaggaggaagacaggcaaatgtacttctcacccagtcttctacacagatggaatctctttggggctaagagaaaggttttattctatattgcttacctgatctcatgttaggcctaagaggctttctccaggaggattagcttggagttctctatactcaggtacctctttcagggttttctaaccctgacacggactgtgcatactttccctcatccatgctgtgctgtgttatttaatttttcctggctaagatcatgtctgaattatgtatgaaaattattctatgtttttataataaaaataatatatcagacatcggtgatnaaaaaaa

SEQ ID NO: 424956 - DNA, 1478 bp, Homo sapiens
  misc_feature (1471)..(1471): n is a, c, g, or t
ccccgtccccgatggcccaatgtacttaaatggaaaaaggacatagccttgaggttatgtccttttccattaagtacatgtgccaggaaacaagagagagagaaagtaaaggcagtaatgccttctcctatttctccaaagccttgtgtgaactcaccaaacacaagaaaatcaaatatataaccaatagtgaaatgccacacctttgtccactgtcagggttgtctacctgtaggatcagggtctaagcaccttggtgcttagctagaataccacctaatccttctggcaagcctgtcttcagagaacccactagaagcaactaggaaaatcacttgccaaaatccaaggcaattcctgatggaaaatgcaaaagcacatatatgttttaatatctttatgggctctgttcaaggcagtgctgagagggaggggttatagcttcaggagggaaccagcttctgataaacacaatctgctaggaacttgggaaaggaatcagagagctgcccttcagcgattatttaaattattgttaaagaatacacaatttggggtattgggatttttctccttttctctgagacattccaccattttaatttttgtaactgcttatttatgtgaaaagggttatttttacttagcttagctatgtcagccaatccgattgccttaggtgaaagaaaccaccgaaatccctcaggtcccttggtcaggagcctctcaagattttttttgtcagaggctccaaatagaaaataagaaaaggttttcttcattcatggctagagctagatttaactcagtttctaggcacctcagaccaatcatcaactaccattctattccatgtttgcacctgtgcattttctgtttgcccccattcactttgtcaggaaaccttggcctctgctaaggtgtatttggtccttgagaagtgggagcaccctacagggacactatcactcatgctggtggcattgtttacagctagaaagctgcactggtgctaatgccccttggggaaatggggctgtgaggaggaggattataacttaggcctagcctcttttaacagcctctgaaatttatcttttcttctatggggtctataaatgtatcttataataaaaaggaaggacaggaggaagacaggcaaatgtacttctcacccagtcttctacacagatggaatctctttggggctaagagaaaggttttattctatattgcttacctgatctcatgttaggcctaagaggctttctccaggaggattagcttggagttctctatactcaggtacctctttcagggttttctaaccctgacacggactgtgcatactttccctcatccatgctgtgctgtgttatttaatttttcctggctaagatcatgtctgaattatgtatgaaaattattctatgtttttataataaaaataatatatcagacatcggtgatnaaaaaaa

SEQ ID NO: 424957 - DNA, 1698 bp, Homo sapiens
cagcacagagagtggaaaacagcagaggtgacagagcagccgtgctcgaagcgttcctggagcccaagctctcctccacaggtgaagacagggccagcaggagacaccatggggcacctctcagccccacttcacagagtgcgtgtaccctggcaggggcttctgctcacagcctcacttctaaccttctggaacccgcccaccactgcccagctcactactgaatccatgccattcaatgttgcagaggggaaggaggttcttctccttgtccacaatctgccccagcaactttttggctacagctggtacaaaggggaaagagtggatggcaaccgtcaaattgtaggatatgcaataggaactcaacaagctaccccagggcccgcaaacagcggtcgagagacaatataccccaatgcatccctgctgatccagaacgtcacccagaatgacacaggattctacaccctacaagtcataaagtcagatcttgtgaatgaagaagcaactggacagttccatgtatacccggagctgcccaagccctccatctccagcaacaactccaaccctgtggaggacaaggatgctgtggccttcacctgtgaacctgagactcaggacacaacctacctgtggtggataaacaatcagagcctcccggtcagtcccaggctgcagctgtccaatggcaacaggaccctcactctactcagtgtcacaaggaatgacacaggaccctatgagtgtgaaatacagaacccagtgagtgcgaaccgcagtgacccagtcaccttgaatgtcacctatggcccggacacccccaccatttccccttcagacacctattaccgtccaggggcaaacctcagcctctcctgctatgcagcctctaacccacctgcacagtactcctggcttatcaatggaacattccagcaaagcacacaagagctctttatccctaacatcactgtgaataatagtggatcctatacctgccacgccaataactcagtcactggctgcaacaggaccacagtcaagacgatcatagtcactgagctaagtccagtagtagcaaagccccaaatcaaagccagcaagaccacagtcacaggagataaggactctgtgaacctgacctgctccacaaatgacactggaatctccatccgttggttcttcaaaaaccagagtctcccgtcctcggagaggatgaagctgtcccagggcaacaccaccctcagcataaaccctgtcaagagggaggatgctgggacgtattggtgtgaggtcttcaacccaatcagtaagaaccaaagcgaccccatcatgctgaacgtaaactataatgctctaccacaagaaaatggcctctcacctggggccattgctggcattgtgattggagtagtggccctggttgctctgatagcagtagccctggcatgttttctgcatttcgggaagaccggcagggcaagcgaccagcgtgatctcacagagcacaaaccctcagtctccaaccacactcaggaccactccaatgacccacctaacaagatgaatgaagttacttattctaccctgaactttgaagcccagcaacccacacaaccaacttcagcctccccatccctaacagccacagaaataatttattcagaagtaaaaaagcagtaatgaaacctg

SEQ ID NO: 424958 - DNA, 876 bp, Homo sapiens
cagcacagagagtggaaaacagcagaggtgacagagcagccgtgctcgaagcgttcctggagcccaagctctcctccacaggtgaagacagggccagcaggagacaccatggggcacctctcagccccacttcacagagtgcgtgtaccctggcaggggcttctgctcacagcctcacttctaaccttctggaacccgcccaccactgcccagctcactactgaatccatgccattcaatgttgcagaggggaaggaggttcttctccttgtccacaatctgccccagcaactttttggctacagctggtacaaaggggaaagagtggatggcaaccgtcaaattgtaggatatgcaataggaactcaacaagctaccccagggcccgcaaacagcggtcgagagacaatataccccaatgcatccctgctgatccagaacgtcacccagaatgacacaggattctacaccctacaagtcataaagtcagatcttgtgaatgaagaagcaactggacagttccatgtatacccggagctgcccaagccctccatctccagcaacaactccaaccctgtggaggacaaggatgctgtggccttcacctgtgaacctgagactcaggacacaacctacctgtggtggataaacaatcagagcctcccggtcagtcccaggctgcagctgtccaatggcaacaggaccctcactctactcagtgtcacaaggaatgacacaggaccctatgagtgtgaaatacagaacccagtgagtgcgaaccgcagtgacccagtcaccttgaatgtcacctatggcccggacaccccaccatttccccttcagacacttgcatccagagggtaccgagctgactta

SEQ ID NO: 424959 - DNA, 958 bp, Homo sapiens
aattgtgagctttcaccttaagtccatttcaggtacatgcatattctactgacgcatattttgttcaatcgatactgtagcatttgcacccgggctgaccaccgagtatccacacagtgctacttgcattgtcaccagctgagtgactgtgagggtagccccaattgtgcaacggtataacaagaatagctaggcacagtgctaacacctgtatcccacatatgggagccgaggctgaggatctctgagcccaggactccaagaccagcctgggcaaaatagtggaacccctatctctccaaaaataatttttttttaataagccaggtgggtggggatggtggctcacgcctgtaatcccaaattgctgggattacagtcatacaccactgtacctggcctacagttataaatttctttcttgcacaagattcttaactactctgagcctcggattcctcaaccgaaaattgcactgtgaatgcctgctccatagtattgcacgggtttggggtttttgttttgtttttgagacagggtgtcactctgtcacccagactggagtgcagtggtgcaaacacagctcactgcagcctcaacctcctgggctcaagcaattccctcaccttagcctcctaagtagtacatactaccacatctggctaatttatttttatttttgttttcagagagacagaatctcaccatgttgcccaggctacaatgagccatgattgtgccactgcactccagcctgggtgatagagtgagaacctgcctcaaaaaaaaaaaaaaaaaaaaagaagaagaagaaatagatgcaaaaggtattatttatatattatatatatatatatatatatatatggagggagaagcattatacaagaaacccactgggacatggctatgatcaaatatgggaaagggggaaaaaaggaggtaaagcaaagtctca

SEQ ID NO: 424960 - DNA, 692 bp, Homo sapiens
tgatccagaacgtcacccagaatgacacaggattctacaccctacaagtcataaagtcagatcttgtgaatgaagaagcaactggacagttccatgtataccgtgagtatttccccatgacctctgggtgttggggggttagttctacttcccacacatgggattgtcaggcctgggctgtgcctgtgtcctcctctgcattataccccatgttaaggtttgagcatctagtgcaggacacactatgggacagacatcaaaataccgaatgtcttactctggagtcctgatcctgcagacatttgcttcagaggaaggacaatctgatgtgggtaacttatcgaggggagaccagtctcaatctagccccccgggaccctcctggtgaacatgtccctaagaaagacccagtaggactcagtcagggtctggcctgaagggccttctgggatcctcacagacaagctcagccctgggaatcccctgctccaaaacactatcccaaggttctcaactcctggtgaccctgaggagcctgggccagggctagattgtggcctcctgggcagggctgactaggaacaagaatttgagctatccgagggctgtggctcctggagctggtaaccagccagggttcaggcactagagcctcatttgggcaaggatggagcctcatccttcaccttagt

SEQ ID NO: 424961 - DNA, 428 bp, Homo sapiens
aactactctgagcctcggattcctcaaccgaaaattgcactgtgaatgcctgctccatagtattgcacgggtttggggtttttgttttgtttttgagacagggtgtcactctgtcacccagactggagtgcagtggtgcaaacacagctcactgcagcctcaacctcctgggctcaagcaattccctcaccttagcctcctaagtagtacatactaccacatctggctaatttatttttatttttgttttcagagagacagaatctcaccatgttgcccaggctggactcgaactcctgggctcaagcaatcctcccatctgtttcccaaagtgctgagattacaggtgtgagccaccacgcctggccccatagtgttattttaaagatttaatgtaataataaaccttcagcaaaacaccacacaca

SEQ ID NO: 424962 - DNA, 3504 bp, Homo sapiens
  misc_feature (3497)..(3497): n is a, c, g, or t
cagcacagagagtggaaaacagcagaggtgacagagcagccgtgctcgaagcgttcctggagcccaagctctcctccacaggtgaagacagggccagcaggagacaccatggggcacctctcagccccacttcacagagtgcgtgtaccctggcaggggcttctgctcacagcctcacttctaaccttctggaacccgcccaccactgcccagctcactactgaatccatgccattcaatgttgcagaggggaaggaggttcttctccttgtccacaatctgccccagcaactttttggctacagctggtacaaaggggaaagagtggatggcaaccgtcaaattgtaggatatgcaataggaactcaacaagctaccccagggcccgcaaacagcggtcgagagacaatataccccaatgcatccctgctgatccagaacgtcacccagaatgacacaggattctacaccctacaagtcataaagtcagatcttgtgaatgaagaagcaactggacagttccatgtatacccggagctgcccaagccctccatctccagcaacaactccaaccctgtggaggacaaggatgctgtggccttcacctgtgaacctgagactcaggacacaacctacctgtggtggataaacaatcagagcctcccggtcagtcccaggctgcagctgtccaatggcaacaggaccctcactctactcagtgtcacaaggaatgacacaggaccctatgagtgtgaaatacagaacccagtgagtgcgaaccgcagtgacccagtcaccttgaatgtcacctatggcccggacacccccaccatttccccttcagacacctattaccgtccaggggcaaacctcagcctctcctgctatgcagcctctaacccacctgcacagtactcctggcttatcaatggaacattccagcaaagcacacaagagctctttatccctaacatcactgtgaataatagtggatcctatacctgccacgccaataactcagtcactggctgcaacaggaccacagtcaagacgatcatagtcactgagctaagtccagtagtagcaaagccccaaatcaaagccagcaagaccacagtcacaggagataaggactctgtgaacctgacctgctccacaaatgacactggaatctccatccgttggttcttcaaaaaccagagtctcccgtcctcggagaggatgaagctgtcccagggcaacaccaccctcagcataaaccctgtcaagagggaggatgctgggacgtattggtgtgaggtcttcaacccaatcagtaagaaccaaagcgaccccatcatgctgaacgtaaactataatgctctaccacaagaaaatggcctctcacctggggccattgctggcattgtgattggagtagtggccctggttgctctgatagcagtagccctggcatgttttctgcatttcgggaagaccggcagggcaagcgaccagcgtgatctcacagagcacaaaccctcagtctccaaccacactcaggaccactccaatgacccacctaacaagatgaatgaagttacttattctaccctgaactttgaagcccagcaacccacacaaccaacttcagcctccccatccctaacagccacagaaataatttattcagaagtaaaaaagcagtaatgaaacctgtcctgctcactgcagtgctgatgtatttcaagtctctcaccctcatcactaggagattcctttcccctgtaggggtagaggggtggggacagaaacaactttctcctactcttccttcctaataggcatctccaggctgcctggtcactgcccctctctcagtgtcaatagatgaaagtacattgggagtctgtaggaaacccaaccttcttgtcattgaaatttggcaaagctgactttgggaaagagggaccagaacttcccctcccttccccttttcccaacctggacttgttttaaacttgcctgttcagagcactcattccttcccacccccagtcctgtcctatcactctaattcggatttgccatagccttgaggttatgtccttttccattaagtacatgtgccaggaaacaagagagagagaaagtaaaggcagtaatgccttctcctatttctccaaagccttgtgtgaactcaccaaacacaagaaaatcaaatatataaccaatagtgaaatgccacacctttgtccactgtcagggttgtctacctgtaggatcagggtctaagcaccttggtgcttagctagaataccacctaatccttctggcaagcctgtcttcagagaacccactagaagcaactaggaaaatcacttgccaaaatccaaggcaattcctgatggaaaatgcaaaagcacatatatgttttaatatctttatgggctctgttcaaggcagtgctgagagggaggggttatagcttcaggagggaaccagcttctgataaacacaatctgctaggaacttgggaaaggaatcagagagctgcccttcagcgattatttaaattattgttaaagaatacacaatttggggtattgggatttttctccttttctctgagacattccaccattttaatttttgtaactgcttatttatgtgaaaagggttatttttacttagcttagctatgtcagccaatccgattgccttaggtgaaagaaaccaccgaaatccctcaggtcccttggtcaggagcctctcaagattttttttgtcagaggctccaaatagaaaataagaaaaggttttcttcattcatggctagagctagatttaactcagtttctaggcacctcagaccaatcatcaactaccattctattccatgtttgcacctgtgcattttctgtttgcccccattcactttgtcaggaaaccttggcctctgctaaggtgtatttggtccttgagaagtgggagcaccctacagggacactatcactcatgctggtggcattgtttacagctagaaagctgcactggtgctaatgccccttggggaaatggggctgtgaggaggaggattataacttaggcctagcctcttttaacagcctctgaaatttatcttttcttctatggggtctataaatgtatcttataataaaaaggaaggacaggaggaagacaggcaaatgtacttctcacccagtcttctacacagatggaatctctttggggctaagagaaaggttttattctatattgcttacctgatctcatgttaggcctaagaggctttctccaggaggattagcttggagttctctatactcaggtacctctttcagggttttctaaccctgacacggactgtgcatactttccctcatccatgctgtgctgtgttatttaatttttcctggctaagatcatgtctgaattatgtatgaaaattattctatgtttttataataaaaataatatatcagacatcggtgatnaaaaaaa

SEQ ID NO: 424963 - DNA, 1645 bp, Homo sapiens
cagcacagagagtggaaaacagcagaggtgacagagcagccgtgctcgaagcgttcctggagcccaagctctcctccacaggtgaagacagggccagcaggagacaccatggggcacctctcagccccacttcacagagtgcgtgtaccctggcaggggcttctgctcacagcctcacttctaaccttctggaacccgcccaccactgcccagctcactactgaatccatgccattcaatgttgcagaggggaaggaggttcttctccttgtccacaatctgccccagcaactttttggctacagctggtacaaaggggaaagagtggatggcaaccgtcaaattgtaggatatgcaataggaactcaacaagctaccccagggcccgcaaacagcggtcgagagacaatataccccaatgcatccctgctgatccagaacgtcacccagaatgacacaggattctacaccctacaagtcataaagtcagatcttgtgaatgaagaagcaactggacagttccatgtatacccggagctgcccaagccctccatctccagcaacaactccaaccctgtggaggacaaggatgctgtggccttcacctgtgaacctgagactcaggacacaacctacctgtggtggataaacaatcagagcctcccggtcagtcccaggctgcagctgtccaatggcaacaggaccctcactctactcagtgtcacaaggaatgacacaggaccctatgagtgtgaaatacagaacccagtgagtgcgaaccgcagtgacccagtcaccttgaatgtcacctatggcccggacacccccaccatttccccttcagacacctattaccgtccaggggcaaacctcagcctctcctgctatgcagcctctaacccacctgcacagtactcctggcttatcaatggaacattccagcaaagcacacaagagctctttatccctaacatcactgtgaataatagtggatcctatacctgccacgccaataactcagtcactggctgcaacaggaccacagtcaagacgatcatagtcactgagctaagtccagtagtagcaaagccccaaatcaaagccagcaagaccacagtcacaggagataaggactctgtgaacctgacctgctccacaaatgacactggaatctccatccgttggttcttcaaaaaccagagtctcccgtcctcggagaggatgaagctgtcccagggcaacaccaccctcagcataaaccctgtcaagagggaggatgctgggacgtattggtgtgaggtcttcaacccaatcagtaagaaccaaagcgaccccatcatgctgaacgtaaactataatgctctaccacaagaaaatggcctctcacctggggccattgctggcattgtgattggagtagtggccctggttgctctgatagcagtagccctggcatgttttctgcatttcgggaagaccggcagctcaggaccactccaatgacccacctaacaagatgaatgaagttacttattctaccctgaactttgaagcccagcaacccacacaaccaacttcagcctccccatccctaacagccacagaaataatttattcagaagtaaaaaagcagtaatgaaacctg

SEQ ID NO: 424964 - DNA, 1503 bp, Homo sapiens
cagcacagagagtggaaaacagcagaggtgacagagcagccgtgctcgaagcgttcctggagcccaagctctcctccacaggtgaagacagggccagcaggagacaccatggggcacctctcagccccacttcacagagtgcgtgtaccctggcaggggcttctgctcacagcctcacttctaaccttctggaacccgcccaccactgcccagctcactactgaatccatgccattcaatgttgcagaggggaaggaggttcttctccttgtccacaatctgccccagcaactttttggctacagctggtacaaaggggaaagagtggatggcaaccgtcaaattgtaggatatgcaataggaactcaacaagctaccccagggcccgcaaacagcggtcgagagacaatataccccaatgcatccctgctgatccagaacgtcacccagaatgacacaggattctacaccctacaagtcataaagtcagatcttgtgaatgaagaagcaactggacagttccatgtatacccggagctgcccaagccctccatctccagcaacaactccaaccctgtggaggacaaggatgctgtggccttcacctgtgaacctgagactcaggacacaacctacctgtggtggataaacaatcagagcctcccggtcagtcccaggctgcagctgtccaatggcaacaggaccctcactctactcagtgtcacaaggaatgacacaggaccctatgagtgtgaaatacagaacccagtgagtgcgaaccgcagtgacccagtcaccttgaatgtcacctatggcccggacacccccaccatttccccttcagacacctattaccgtccaggggcaaacctcagcctctcctgctatgcagcctctaacccacctgcacagtactcctggcttatcaatggaacattccagcaaagcacacaagagctctttatccctaacatcactgtgaataatagtggatcctatacctgccacgccaataactcagtcactggctgcaacaggaccacagtcaagacgatcatagtcactgagagacagaatctcaccatgttgcccaggctggactcgaactcctgggctcaagcaatcctcccatctgtttcccaaagtgctgagattacagataatgctctaccacaagaaaatggcctctcacctggggccattgctggcattgtgattggagtagtggccctggttgctctgatagcagtagccctggcatgttttctgcatttcgggaagaccggcagggcaagcgaccagcgtgatctcacagagcacaaaccctcagtctccaaccacactcaggaccactccaatgacccacctaacaagatgaatgaagttacttattctaccctgaactttgaagcccagcaacccacacaaccaacttcagcctccccatccctaacagccacagaaataatttattcagaagtaaaaaagcagtaatgaaacctg

SEQ ID NO: 424965 - DNA, 876 bp, Homo sapiens
cagcacagagagtggaaaacagcagaggtgacagagcagccgtgctcgaagcgttcctggagcccaagctctcctccacaggtgaagacagggccagcaggagacaccatggggcacctctcagccccacttcacagagtgcgtgtaccctggcaggggcttctgctcacagcctcacttctaaccttctggaacccgcccaccactgcccagctcactactgaatccatgccattcaatgttgcagaggggaaggaggttcttctccttgtccacaatctgccccagcaactttttggctacagctggtacaaaggggaaagagtggatggcaaccgtcaaattgtaggatatgcaataggaactcaacaagctaccccagggcccgcaaacagcggtcgagagacaatataccccaatgcatccctgctgatccagaacgtcacccagaatgacacaggattctacaccctacaagtcataaagtcagatcttgtgaatgaagaagcaactggacagttccatgtataccataatgctctaccacaagaaaatggcctctcacctggggccattgctggcattgtgattggagtagtggccctggttgctctgatagcagtagccctggcatgttttctgcatttcgggaagaccggcagggcaagcgaccagcgtgatctcacagagcacaaaccctcagtctccaaccacactcaggaccactccaatgacccacctaacaagatgaatgaagttacttattctaccctgaactttgaagcccagcaacccacacaaccaacttcagcctccccatccctaacagccacagaaataatttattcagaagtaaaaaagcagtaatgaaacctg

SEQ ID NO: 424966 - DNA, 3451 bp, Homo sapiens
  misc_feature (3444)..(3444): n is a, c, g, or t
cagcacagagagtggaaaacagcagaggtgacagagcagccgtgctcgaagcgttcctggagcccaagctctcctccacaggtgaagacagggccagcaggagacaccatggggcacctctcagccccacttcacagagtgcgtgtaccctggcaggggcttctgctcacagcctcacttctaaccttctggaacccgcccaccactgcccagctcactactgaatccatgccattcaatgttgcagaggggaaggaggttcttctccttgtccacaatctgccccagcaactttttggctacagctggtacaaaggggaaagagtggatggcaaccgtcaaattgtaggatatgcaataggaactcaacaagctaccccagggcccgcaaacagcggtcgagagacaatataccccaatgcatccctgctgatccagaacgtcacccagaatgacacaggattctacaccctacaagtcataaagtcagatcttgtgaatgaagaagcaactggacagttccatgtatacccggagctgcccaagccctccatctccagcaacaactccaaccctgtggaggacaaggatgctgtggccttcacctgtgaacctgagactcaggacacaacctacctgtggtggataaacaatcagagcctcccggtcagtcccaggctgcagctgtccaatggcaacaggaccctcactctactcagtgtcacaaggaatgacacaggaccctatgagtgtgaaatacagaacccagtgagtgcgaaccgcagtgacccagtcaccttgaatgtcacctatggcccggacacccccaccatttccccttcagacacctattaccgtccaggggcaaacctcagcctctcctgctatgcagcctctaacccacctgcacagtactcctggcttatcaatggaacattccagcaaagcacacaagagctctttatccctaacatcactgtgaataatagtggatcctatacctgccacgccaataactcagtcactggctgcaacaggaccacagtcaagacgatcatagtcactgagctaagtccagtagtagcaaagccccaaatcaaagccagcaagaccacagtcacaggagataaggactctgtgaacctgacctgctccacaaatgacactggaatctccatccgttggttcttcaaaaaccagagtctcccgtcctcggagaggatgaagctgtcccagggcaacaccaccctcagcataaaccctgtcaagagggaggatgctgggacgtattggtgtgaggtcttcaacccaatcagtaagaaccaaagcgaccccatcatgctgaacgtaaactataatgctctaccacaagaaaatggcctctcacctggggccattgctggcattgtgattggagtagtggccctggttgctctgatagcagtagccctggcatgttttctgcatttcgggaagaccggcagctcaggaccactccaatgacccacctaacaagatgaatgaagttacttattctaccctgaactttgaagcccagcaacccacacaaccaacttcagcctccccatccctaacagccacagaaataatttattcagaagtaaaaaagcagtaatgaaacctgtcctgctcactgcagtgctgatgtatttcaagtctctcaccctcatcactaggagattcctttcccctgtaggggtagaggggtggggacagaaacaactttctcctactcttccttcctaataggcatctccaggctgcctggtcactgcccctctctcagtgtcaatagatgaaagtacattgggagtctgtaggaaacccaaccttcttgtcattgaaatttggcaaagctgactttgggaaagagggaccagaacttcccctcccttccccttttcccaacctggacttgttttaaacttgcctgttcagagcactcattccttcccacccccagtcctgtcctatcactctaattcggatttgccatagccttgaggttatgtccttttccattaagtacatgtgccaggaaacaagagagagagaaagtaaaggcagtaatgccttctcctatttctccaaagccttgtgtgaactcaccaaacacaagaaaatcaaatatataaccaatagtgaaatgccacacctttgtccactgtcagggttgtctacctgtaggatcagggtctaagcaccttggtgcttagctagaataccacctaatccttctggcaagcctgtcttcagagaacccactagaagcaactaggaaaatcacttgccaaaatccaaggcaattcctgatggaaaatgcaaaagcacatatatgttttaatatctttatgggctctgttcaaggcagtgctgagagggaggggttatagcttcaggagggaaccagcttctgataaacacaatctgctaggaacttgggaaaggaatcagagagctgcccttcagcgattatttaaattattgttaaagaatacacaatttggggtattgggatttttctccttttctctgagacattccaccattttaatttttgtaactgcttatttatgtgaaaagggttatttttacttagcttagctatgtcagccaatccgattgccttaggtgaaagaaaccaccgaaatccctcaggtcccttggtcaggagcctctcaagattttttttgtcagaggctccaaatagaaaataagaaaaggttttcttcattcatggctagagctagatttaactcagtttctaggcacctcagaccaatcatcaactaccattctattccatgtttgcacctgtgcattttctgtttgcccccattcactttgtcaggaaaccttggcctctgctaaggtgtatttggtccttgagaagtgggagcaccctacagggacactatcactcatgctggtggcattgtttacagctagaaagctgcactggtgctaatgccccttggggaaatggggctgtgaggaggaggattataacttaggcctagcctcttttaacagcctctgaaatttatcttttcttctatggggtctataaatgtatcttataataaaaaggaaggacaggaggaagacaggcaaatgtacttctcacccagtcttctacacagatggaatctctttggggctaagagaaaggttttattctatattgcttacctgatctcatgttaggcctaagaggctttctccaggaggattagcttggagttctctatactcaggtacctctttcagggttttctaaccctgacacggactgtgcatactttccctcatccatgctgtgctgtgttatttaatttttcctggctaagatcatgtctgaattatgtatgaaaattattctatgtttttataataaaaataatatatcagacatcggtgatnaaaaaaa

SEQ ID NO: 424967 - DNA, 3256 bp, Homo sapiens
  misc_feature (3249)..(3249): n is a, c, g, or t
cagcacagagagtggaaaacagcagaggtgacagagcagccgtgctcgaagcgttcctggagcccaagctctcctccacaggtgaagacagggccagcaggagacaccatggggcacctctcagccccacttcacagagtgcgtgtaccctggcaggggcttctgctcacagcctcacttctaaccttctggaacccgcccaccactgcccagctcactactgaatccatgccattcaatgttgcagaggggaaggaggttcttctccttgtccacaatctgccccagcaactttttggctacagctggtacaaaggggaaagagtggatggcaaccgtcaaattgtaggatatgcaataggaactcaacaagctaccccagggcccgcaaacagcggtcgagagacaatataccccaatgcatccctgctgatccagaacgtcacccagaatgacacaggattctacaccctacaagtcataaagtcagatcttgtgaatgaagaagcaactggacagttccatgtatacccggagctgcccaagccctccatctccagcaacaactccaaccctgtggaggacaaggatgctgtggccttcacctgtgaacctgagactcaggacacaacctacctgtggtggataaacaatcagagcctcccggtcagtcccaggctgcagctgtccaatggcaacaggaccctcactctactcagtgtcacaaggaatgacacaggaccctatgagtgtgaaatacagaacccagtgagtgcgaaccgcagtgacccagtcaccttgaatgtcacctatggcccggacacccccaccatttccccttcagacacctattaccgtccaggggcaaacctcagcctctcctgctatgcagcctctaacccacctgcacagtactcctggcttatcaatggaacattccagcaaagcacacaagagctctttatccctaacatcactgtgaataatagtggatcctatacctgccacgccaataactcagtcactggctgcaacaggaccacagtcaagacgatcatagtcactgagatggcgtttcaccatgttgccaaggctggtctcaaactcctgagctcaagcaatccacccgcctccacctcccaaagtgctaagattacagataatgctctaccacaagaaaatggcctctcacctggggccattgctggcattgtgattggagtagtggccctggttgctctgatagcagtagccctggcatgttttctgcatttcgggaagaccggcagctcaggaccactccaatgacccacctaacaagatgaatgaagttacttattctaccctgaactttgaagcccagcaacccacacaaccaacttcagcctccccatccctaacagccacagaaataatttattcagaagtaaaaaagcagtaatgaaacctgtcctgctcactgcagtgctgatgtatttcaagtctctcaccctcatcactaggagattcctttcccctgtaggggtagaggggtggggacagaaacaactttctcctactcttccttcctaataggcatctccaggctgcctggtcactgcccctctctcagtgtcaatagatgaaagtacattgggagtctgtaggaaacccaaccttcttgtcattgaaatttggcaaagctgactttgggaaagagggaccagaacttcccctcccttccccttttcccaacctggacttgttttaaacttgcctgttcagagcactcattccttcccacccccagtcctgtcctatcactctaattcggatttgccatagccttgaggttatgtccttttccattaagtacatgtgccaggaaacaagagagagagaaagtaaaggcagtaatgccttctcctatttctccaaagccttgtgtgaactcaccaaacacaagaaaatcaaatatataaccaatagtgaaatgccacacctttgtccactgtcagggttgtctacctgtaggatcagggtctaagcaccttggtgcttagctagaataccacctaatccttctggcaagcctgtcttcagagaacccactagaagcaactaggaaaatcacttgccaaaatccaaggcaattcctgatggaaaatgcaaaagcacatatatgttttaatatctttatgggctctgttcaaggcagtgctgagagggaggggttatagcttcaggagggaaccagcttctgataaacacaatctgctaggaacttgggaaaggaatcagagagctgcccttcagcgattatttaaattattgttaaagaatacacaatttggggtattgggatttttctccttttctctgagacattccaccattttaatttttgtaactgcttatttatgtgaaaagggttatttttacttagcttagctatgtcagccaatccgattgccttaggtgaaagaaaccaccgaaatccctcaggtcccttggtcaggagcctctcaagattttttttgtcagaggctccaaatagaaaataagaaaaggttttcttcattcatggctagagctagatttaactcagtttctaggcacctcagaccaatcatcaactaccattctattccatgtttgcacctgtgcattttctgtttgcccccattcactttgtcaggaaaccttggcctctgctaaggtgtatttggtccttgagaagtgggagcaccctacagggacactatcactcatgctggtggcattgtttacagctagaaagctgcactggtgctaatgccccttggggaaatggggctgtgaggaggaggattataacttaggcctagcctcttttaacagcctctgaaatttatcttttcttctatggggtctataaatgtatcttataataaaaaggaaggacaggaggaagacaggcaaatgtacttctcacccagtcttctacacagatggaatctctttggggctaagagaaaggttttattctatattgcttacctgatctcatgttaggcctaagaggctttctccaggaggattagcttggagttctctatactcaggtacctctttcagggttttctaaccctgacacggactgtgcatactttccctcatccatgctgtgctgtgttatttaatttttcctggctaagatcatgtctgaattatgtatgaaaattattctatgtttttataataaaaataatatatcagacatcggtgatnaaaaaaa

SEQ ID NO: 424968 - DNA, 3811 bp, Homo sapiens
  misc_feature (3804)..(3804): n is a, c, g, or t
aatataaaagaatatatagagccaggcacagtggctcacgcctgtaatcccagcactttgggaggctgaggcgggtggatcatgaggtcaggagatcaagaccatcctggctaacatggtgaaaccccgtctctactaaaaatacaaaaaattagctgggcatggtggcacatgcctttagtcccagctactcgggaggctgaggcaggagaatggcttgaacccgggaggcagagcttgcagtgagctgagatcatgccactgcattccggcctgggtgacagagcgagactccgtctgaaaaaaaaaaaaaaaaagtcagtgggaaaaacattctacctgatgatgaggttgctcggtctgtgcgctgagaagaagattccaagtggagatatagagatatccagagggtcactctgagacgatctggggtcaggagggaggtgcagccctctccttacaattcatcacctgaacaaagacactcgaccttctgcagagggtcagggctatcccctggttggtgacctttgcacagctcactgtgggacctgagagctggctaaaatctcagggaaaggagcatagccctaggccccaggccccaaccctattctcagtaggttatctcagatactctgcttgtccacagagctaagtccagtagtagcaaagccccaaatcaaagccagcaagaccacagtcacaggagataaggactctgtgaacctgacctgctccacaaatgacactggaatctccatccgttggttcttcaaaaaccagagtctcccgtcctcggagaggatgaagctgtcccagggcaacaccaccctcagcataaaccctgtcaagagggaggatgctgggacgtattggtgtgaggtcttcaacccaatcagtaagaaccaaagcgaccccatcatgctgaacgtaaactataatgctctaccacaagaaaatggcctctcacctggggccattgctggcattgtgattggagtagtggccctggttgctctgatagcagtagccctggcatgttttctgcatttcgggaagaccggcaggtatgatggcctttcctcttgttctgtttcctccaaggctgactgccatgcttgggagagggaaagaattctttgcctgtctctgggcctggatctcatactcctcccactaaactcctgcttctcggcactaattcccacaggtttcctcttccctggtcttcgtgctccctgtctcccattatctcttggacatgggtattccaatccccatctaatctagaggaagagactcaagtatgttcctctgtcccctagtcagggaaagcaaggtctaagaaggaaaacaaatgaaaaaatgaaagaagcagcaggagaaagcaagtcatgtgctctgttgaccacattggaagaggagggagaaatagcataggaagagaacctaagagaaagcaaaaacaaccaaagtcctcttgaacaataaatagagaaaaaaaaaaaagtatctaccccggaaaacaaaatgggaaaggttttaaggatagaagtaggcacagaagcagctgataaagaatgaaatgaaatgtgaacatccagcaaacaggaaaagagtaaacactagaagggattgtagttagactgaagaacgaggccctcagaagaaaggcagtatgaacatcaaggactctaaggaattacctgctcacagtgtccttcctaacttacggaacaaagatcctgtgcttgggaatagcagtcacagtttctgatatttatttagggcaagcgaccagcgtgatctcacagagcacaaaccctcagtctccaaccacactcaggaccactccaatgacccacctaacaagatgaatgaagttacttattctaccctgaactttgaagcccagcaacccacacaaccaacttcagcctccccatccctaacagccacagaaataatttattcagaagtaaaaaagcagtaatgaaacctgtcctgctcactgcagtgctgatgtatttcaagtctctcaccctcatcactaggagattcctttcccctgtaggggtagaggggtggggacagaaacaactttctcctactcttccttcctaataggcatctccaggctgcctggtcactgcccctctctcagtgtcaatagatgaaagtacattgggagtctgtaggaaacccaaccttcttgtcattgaaatttggcaaagctgactttgggaaagagggaccagaacttcccctcccttccccttttcccaacctggacttgttttaaacttgcctgttcagagcactcattccttcccacccccagtcctgtcctatcactctaattcggatttgccatagccttgaggttatgtccttttccattaagtacatgtgccaggaaacaagagagagagaaagtaaaggcagtaatgccttctcctatttctccaaagccttgtgtgaactcaccaaacacaagaaaatcaaatatataaccaatagtgaaatgccacacctttgtccactgtcagggttgtctacctgtaggatcagggtctaagcaccttggtgcttagctagaataccacctaatccttctggcaagcctgtcttcagagaacccactagaagcaactaggaaaatcacttgccaaaatccaaggcaattcctgatggaaaatgcaaaagcacatatatgttttaatatctttatgggctctgttcaaggcagtgctgagagggaggggttatagcttcaggagggaaccagcttctgataaacacaatctgctaggaacttgggaaaggaatcagagagctgcccttcagcgattatttaaattattgttaaagaatacacaatttggggtattgggatttttctccttttctctgagacattccaccattttaatttttgtaactgcttatttatgtgaaaagggttatttttacttagcttagctatgtcagccaatccgattgccttaggtgaaagaaaccaccgaaatccctcaggtcccttggtcaggagcctctcaagattttttttgtcagaggctccaaatagaaaataagaaaaggttttcttcattcatggctagagctagatttaactcagtttctaggcacctcagaccaatcatcaactaccattctattccatgtttgcacctgtgcattttctgtttgcccccattcactttgtcaggaaaccttggcctctgctaaggtgtatttggtccttgagaagtgggagcaccctacagggacactatcactcatgctggtggcattgtttacagctagaaagctgcactggtgctaatgccccttggggaaatggggctgtgaggaggaggattataacttaggcctagcctcttttaacagcctctgaaatttatcttttcttctatggggtctataaatgtatcttataataaaaaggaaggacaggaggaagacaggcaaatgtacttctcacccagtcttctacacagatggaatctctttggggctaagagaaaggttttattctatattgcttacctgatctcatgttaggcctaagaggctttctccaggaggattagcttggagttctctatactcaggtacctctttcagggttttctaaccctgacacggactgtgcatactttccctcatccatgctgtgctgtgttatttaatttttcctggctaagatcatgtctgaattatgtatgaaaattattctatgtttttataataaaaataatatatcagacatcggtgatnaaaaaaa

SEQ ID NO: 424969 - DNA, 2072 bp, Homo sapiens
  misc_feature (2065)..(2065): n is a, c, g, or t
gcaagagagagaaataaagagcatccaaataggaagagaagaaagcaaactatccttgtttgtagaggacatgatcctatgtcttgaaaaccccatagtctcagcccaaaagcttcttaagctgataaacaacttcagcaaagtcttgggatacaaaatcaatgtgcaaaaatcaccagcaacccacacaaccaacttcagcctccccatccctaacagccacagaaataatttattcagaagtaaaaaagcagtaatgaaacctgtcctgctcactgcagtgctgatgtatttcaagtctctcaccctcatcactaggagattcctttcccctgtaggggtagaggggtggggacagaaacaactttctcctactcttccttcctaataggcatctccaggctgcctggtcactgcccctctctcagtgtcaatagatgaaagtacattgggagtctgtaggaaacccaaccttcttgtcattgaaatttggcaaagctgactttgggaaagagggaccagaacttcccctcccttccccttttcccaacctggacttgttttaaacttgcctgttcagagcactcattccttcccacccccagtcctgtcctatcactctaattcggatttgccatagccttgaggttatgtccttttccattaagtacatgtgccaggaaacaagagagagagaaagtaaaggcagtaatgccttctcctatttctccaaagccttgtgtgaactcaccaaacacaagaaaatcaaatatataaccaatagtgaaatgccacacctttgtccactgtcagggttgtctacctgtaggatcagggtctaagcaccttggtgcttagctagaataccacctaatccttctggcaagcctgtcttcagagaacccactagaagcaactaggaaaatcacttgccaaaatccaaggcaattcctgatggaaaatgcaaaagcacatatatgttttaatatctttatgggctctgttcaaggcagtgctgagagggaggggttatagcttcaggagggaaccagcttctgataaacacaatctgctaggaacttgggaaaggaatcagagagctgcccttcagcgattatttaaattattgttaaagaatacacaatttggggtattgggatttttctccttttctctgagacattccaccattttaatttttgtaactgcttatttatgtgaaaagggttatttttacttagcttagctatgtcagccaatccgattgccttaggtgaaagaaaccaccgaaatccctcaggtcccttggtcaggagcctctcaagattttttttgtcagaggctccaaatagaaaataagaaaaggttttcttcattcatggctagagctagatttaactcagtttctaggcacctcagaccaatcatcaactaccattctattccatgtttgcacctgtgcattttctgtttgcccccattcactttgtcaggaaaccttggcctctgctaaggtgtatttggtccttgagaagtgggagcaccctacagggacactatcactcatgctggtggcattgtttacagctagaaagctgcactggtgctaatgccccttggggaaatggggctgtgaggaggaggattataacttaggcctagcctcttttaacagcctctgaaatttatcttttcttctatggggtctataaatgtatcttataataaaaaggaaggacaggaggaagacaggcaaatgtacttctcacccagtcttctacacagatggaatctctttggggctaagagaaaggttttattctatattgcttacctgatctcatgttaggcctaagaggctttctccaggaggattagcttggagttctctatactcaggtacctctttcagggttttctaaccctgacacggactgtgcatactttccctcatccatgctgtgctgtgttatttaatttttcctggctaagatcatgtctgaattatgtatgaaaattattctatgtttttataataaaaataatatatcagacatcggtgatnaaaaaaa

SEQ ID NO: 424970 - DNA, 1851 bp, Homo sapiens
cagcacagagagtggaaaacagcagaggtgacagagcagccgtgctcgaagcgttcctggagcccaagctctcctccacaggtgaagacagggccagcaggagacaccatggggcacctctcagccccacttcacagagtgcgtgtaccctggcaggggcttctgctcacagcctcacttctaaccttctggaacccgcccaccactgcccagctcactactgaatccatgccattcaatgttgcagaggggaaggaggttcttctccttgtccacaatctgccccagcaactttttggctacagctggtacaaaggggaaagagtggatggcaaccgtcaaattgtaggatatgcaataggaactcaacaagctaccccagggcccgcaaacagcggtcgagagacaatataccccaatgcatccctgctgatccagaacgtcacccagaatgacacaggattctacaccctacaagtcataaagtcagatcttgtgaatgaagaagcaactggacagttccatgtatacccggagctgcccaagccctccatctccagcaacaactccaaccctgtggaggacaaggatgctgtggccttcacctgtgaacctgagactcaggacacaacctacctgtggtggataaacaatcagagcctcccggtcagtcccaggctgcagctgtccaatggcaacaggaccctcactctactcagtgtcacaaggaatgacacaggaccctatgagtgtgaaatacagaacccagtgagtgcgaaccgcagtgacccagtcaccttgaatgtcacctatggcccggacacccccaccatttccccttcagacacctattaccgtccaggggcaaacctcagcctctcctgctatgcagcctctaacccacctgcacagtactcctggcttatcaatggaacattccagcaaagcacacaagagctctttatccctaacatcactgtgaataatagtggatcctatacctgccacgccaataactcagtcactggctgcaacaggaccacagtcaagacgatcatagtcactgagctaagtccagtagtagcaaagccccaaatcaaagccagcaagaccacagtcacaggagataaggactctgtgaacctgacctgctccacaaatgacactggaatctccatccgttggttcttcaaaaaccagagtctcccgtcctcggagaggatgaagctgtcccagggcaacaccaccctcagcataaaccctgtcaagagggaggatgctgggacgtattggtgtgaggtcttcaacccaatcagtaagaaccaaagcgaccccatcatgctgaacgtaaactataatgctctaccacaagaaaatggcctctcacctggggccattgctggcattgtgattggagtagtggccctggttgctctgatagcagtagccctggcatgttttctgcatttcgggaagaccggcagggcaagcgaccagcgtgatctcacagagcacaaaccctcagtctccaaccacaccacaggagtcccctgagacacatctgaggagagaggctcactctgcctaggccaggcaggcctgaggaagatcccatgtttccaggagccatttcctcagccttactccttccgcctcctgcctctattacggatgtgggcactctcccttgctcaggaccactccaatgacccacctaacaagatgaatgaagttacttattctaccctgaactttgaagcccagcaacccacacaaccaacttcagcctccccatccctaacagccacagaaataatttattcagaagtaaaaaagcagtaatgaaacctg

SEQ ID NO: 424971 - DNA, 293 bp, Homo sapiens
tgattataatttcacactaatttaaatgatgtttactttagtagaagcataaatatacaaaaggaattatttaattccaaactgttctttatagtaatgaccaactacatgatgacaagggtgagtttaaattctgggtgattacttattttcttgttgcaaacatattgaaaatctggaataaaatgcaagtcataatatttacgatcagacacggatgttactttggcaaattacacagggtttacttttctaaaggatagaaagggaagccagtacaatcaaatttgaag

SEQ ID NO: 424972 - DNA, 4322 bp, Homo sapiens
  misc_feature (1819)..(1819): n is a, c, g, or t
gcctgcgcagtggctccgagcgggcggttgcttgttggttgttgtagtaaccggggaagcagccgtcggcggctgccctgagccttcctggggaaggaggagggaggtaggcgcagagcgcggtccacgcctgctcgccccgaaccatgggaagatgagacaggaatctgtgccatccaaattgcttgatccagtgaatctgctaggaaaggtctctgaggcccccgtctgctgactgcatgacaaaccctaaaggaaatgccaatcgtgatggcccgggacctggaggaaacagcatcatcctcagaggatgaggaggtcataagtcaagaggatcatccatgcatcatgtggactggaggctgcaggagaattccagttttggtattccatgccgacgctattcttacaaaggacaacaatattagagtaattggagaacgttatcatttgtcttataagattgtacgaacggacagtcgcctagtacgcagcattctgacagcccatggatttcatgaagttcacccaagcagcactgactataacctaatgtggacaggatcccacctgaagcccttcttactgcgcaccctctctgaagcacaaaaagttaatcactttcccaggtcttatgaacttacccggaaggaccgactgtacaaaaacattattcgaatgcagcatacacatggattcaaggcttttcacatcctcccccagaccttcctcctgccagctgagtacgcggaattttgtaattcatattcgaaggaccggggaccttggatagtaaaaccagtggcatcttcaagggggcggggcgtctacctgatcaacaatccaaaccagatctccctggaagagaacattttggtctcccgttacattaacaaccccctgctcatagatgatttcaagtttgacgtgcgcctctatgtgctcgtgacttcctatgatcctcttgtcatctatctctatgaagaaggattggctagaaaatgcaattggaagatgggaaataccatggataaaagaaggctacctatttatgtacaggtgctttgacagatattattgtactctgacaactattattttagaatggtcttttaatgattttagagacttagtttttttcacatgtatcctatgacttgaaatcagtgagagcagactaaccaaacctcgctggtggagctctgtgttccgttcgcctctaggtggcagtcacagcatttataagtcctgtcatattcttaactgagattttgagtttgagccctgggaacattggagactaccaaaactccctagttctggcctcttccttgaaaattgagaaagggaagaactgaaacatctcgcagttattagataaagggctggaccaggcatctgaacatgagctgactactagctctaatcaggtttttataggaaagaaattgtcgataatatttgtagacacacgtgctctcacgttttgaagtatcactatacaaaattaggtataaaagcctattcctggccaggcgtggtggctcacacctgtaatcctagcactttgggaggccgagacgggaggattgcctgaggccaggagttcaagaccagtttgggcaacattgtgagaccccatctcattaaaaaaaaaaaaaaaaaaaaaaaaaaagaccaagaaaaagcctattccctatattatttaaaacaaaatgatggtaaaatacagtcctgacttctcagatatgcaaggttctgaggattttcagctttataatttgagacttctgagctttctctcttttgtgttatgagnttcatcattctccttcctctgctcatcctcaccttcacttctctcctgtgtcaagttttagaaactgattatgtcctgccaaaaattggactttgggaatagagaaaagagatggaggttgtgcttcactgtttctcaaggacatcatagcaatatgttttgcttaatattccaaagatattttcacctacaatattaacagccctctctatgggtaaaatttggcataattttaagacctttctggttcagagcacaacatgagaacaacagtaccaatgtttattatagaatttactacaaatatgcaagtgctttggctactggttgtgtgttggaagtcagaatctactgaattaagtataacccttttgcttccagcagaaacaaaaaaatttatacacacacacacacacacacacacacacacacacacacaatggatgttttttcacagaataattagaaaaacagcttttaaaaaactcagaccaagtagaaccagaaagccacatgaattttcagggctttggttaggtttacctgaaagtgtaggtgaatataaaagctttatcaaagctttacaaaagcataacgcatggcaatatgatgcactgtttgcgggagtcctgcgagggcacattgttccgtgcagtaatttcaatgtgcctaagttcttgtgtcttcactaattatgtatcttgacattcacttgctttgttgtaaccctcagagtctgttcaactatgtcgatagtctgtagcatctccagatctgcagcttttagttatcttgggccacatgtaatttatgtagacataactgaagatcatcagtttgggatgagattattgggttacgttgaggctcaacaagaaaaaccataatctttcctaaagagacggaacaggaggcaaatacaattcatttccttctttagaaatgaattcccttacaccctatcacttctgttttggacctcaaattaatactaggcgacagaaagattaaattcatttcacaagacagttttgtgatataagttattttgtgtaaaattttttaacacaaaattaaattcgtgaaaaccctagtttctgtatagatgagtgttttcagttgtccttattgttttattaacataagaagtgggagagctctcactgttttctcatgtgtgggtatagtattgaagaagtgttgcaattgtccccctggtatttgggtgcagctttttgtgattcccacagtagccctcagaggtcccctgtgcttttgaattttacttgcgtgttgctgttttgcaccaccaggggacactcagtttccacagaggggtgctatgctctaccaaaatggtgcagattctttttcctgtcaggggtggactccaaaaagattttgtcctggattttacagctttaggtggatccagtattgggtttagatgagttgacagagccctttctgagatgaagctaatagccagattttcactgaaacaggaaaaataaaaatttcaaaaaaattaaaacaaaatggagttaaaaactaaatatgttgccagagacccaaagataggcagctctagcaacttggggggcatgcaagtatccatccagggagctgagttccacccatgcggcggaggtgggaagagaggattctgggaaggtcccggttggaatggccttttttctgcctcagccatattattcagtggaaattcagaaaagaccccaaaacatttgtagtgcctttccctttctccccacccccagttccttcttcagtagccttccttgctaattaacactggctctgcagggatatttaccttttctctgctggattcctgtggttttgaaagaattcaggtacttgctggttgccaaggaattcagattacctcacaggctgcacactgtccagaatctgccacagcagcaagtaggggggaagagacaccaacaagggggagaaaaccctttccagtgctcattgtcaccctccctggcaggcccttgctgtttgtgaagtttgagtcatttctggctctaaagacaagggatcaggctggtaatcccctcccagacggctctgtagggcgctgcctagtcactgcagcgctttggcagtctcccggctgcagctggttgacagcagatcagagagctcttgggcctcttgttctcttccataagatttttctgggtcaggccaggatgaaacccagtggctcctggcaaggctgcctgaggtgctgtctcttcattgtccaggcctctctgactcaaaatgcctacacctgttgaaggataactcatgtgccacagcgaggtcgaggctggccttctcttttcttggtacatttgtagtgaatgtttgtcagaaaatataactaccaaagaggatgttaagcttctacatctagaatgcctgtgactctgaccataagaagatattggtatcaaaaaaaagtttttaagaaaacagcaggaca

SEQ ID NO: 424973 - DNA, 579 bp, Homo sapiens
gcctgctgagcacaaggtctccctgtgaacttcttcctggccttcaggggtgcccgtctccttggtatgatcacatagaggatgcccagatcattagagggcctagtatgtcttggtgggaagaaacaaaacagcaaagggagtcctaggggaggaggtgggctccccatccttcttgttctggaagttcttcatccccttgtttctctggtctggtcttcagcttctttatgactggctatctcccactgggatttgagtttgctgtggagctcacgtacccagaatcagaaggcatctcctccggcctcctcaacatatctgcacaggtatttgggatcatctttaccatctcccagggccagattattgacaactatggaaccaagcctgggaacatcttcctgtgtgtgttccttactcttggagcagccctcactgcattcattaaggcagatctccggagacagaaagcaaacaaagaaactcttgagaacgtgagtatatgggagctttgtggggctgagatcggggtccaaggcttttgatgaggatgtggcaacatagatggggcaggga

SEQ ID NO: 424974 - DNA, 4572 bp, Homo sapiens
  misc_feature (2069)..(2069): n is a, c, g, or t
gcctgcgcagtggctccgagcgggcggttgcttgttggttgttgtagtaaccggggaagcagccgtcggcggctgccctgagccttcctggggaaggaggagggaggtaggcgcagagcgcggtccacgcctgctcgccccgaaccatgggaagatgagacaggtaaacgcctgcgcccgcgcgcttccctaccctagggaggagcattcccgggtccgggctggcgcctgcagcaggacttcccgctcagagcccgggagtagctgttggcttccgggcgcgccgcgttgaatcgcggctgcggggtcgtcccgtccttcccggggggagcatctgcggacctacgtgggattggggtgagctgggggtggggctgagaagcagattcctttcgggagaggagtctccttaggaatctgtgccatccaaattgcttgatccagtgaatctgctaggaaaggtctctgaggcccccgtctgctgactgcatgacaaaccctaaaggaaatgccaatcgtgatggcccgggacctggaggaaacagcatcatcctcagaggatgaggaggtcataagtcaagaggatcatccatgcatcatgtggactggaggctgcaggagaattccagttttggtattccatgccgacgctattcttacaaaggacaacaatattagagtaattggagaacgttatcatttgtcttataagattgtacgaacggacagtcgcctagtacgcagcattctgacagcccatggatttcatgaagttcacccaagcagcactgactataacctaatgtggacaggatcccacctgaagcccttcttactgcgcaccctctctgaagcacaaaaagttaatcactttcccaggtcttatgaacttacccggaaggaccgactgtacaaaaacattattcgaatgcagcatacacatggattcaaggcttttcacatcctcccccagaccttcctcctgccagctgagtacgcggaattttgtaattcatattcgaaggaccggggaccttggatagtaaaaccagtggcatcttcaagggggcggggcgtctacctgatcaacaatccaaaccagatctccctggaagagaacattttggtctcccgttacattaacaaccccctgctcatagatgatttcaagtttgacgtgcgcctctatgtgctcgtgacttcctatgatcctcttgtcatctatctctatgaagaaggattggctagaaaatgcaattggaagatgggaaataccatggataaaagaaggctacctatttatgtacaggtgctttgacagatattattgtactctgacaactattattttagaatggtcttttaatgattttagagacttagtttttttcacatgtatcctatgacttgaaatcagtgagagcagactaaccaaacctcgctggtggagctctgtgttccgttcgcctctaggtggcagtcacagcatttataagtcctgtcatattcttaactgagattttgagtttgagccctgggaacattggagactaccaaaactccctagttctggcctcttccttgaaaattgagaaagggaagaactgaaacatctcgcagttattagataaagggctggaccaggcatctgaacatgagctgactactagctctaatcaggtttttataggaaagaaattgtcgataatatttgtagacacacgtgctctcacgttttgaagtatcactatacaaaattaggtataaaagcctattcctggccaggcgtggtggctcacacctgtaatcctagcactttgggaggccgagacgggaggattgcctgaggccaggagttcaagaccagtttgggcaacattgtgagaccccatctcattaaaaaaaaaaaaaaaaaaaaaaaaaaagaccaagaaaaagcctattccctatattatttaaaacaaaatgatggtaaaatacagtcctgacttctcagatatgcaaggttctgaggattttcagctttataatttgagacttctgagctttctctcttttgtgttatgagnttcatcattctccttcctctgctcatcctcaccttcacttctctcctgtgtcaagttttagaaactgattatgtcctgccaaaaattggactttgggaatagagaaaagagatggaggttgtgcttcactgtttctcaaggacatcatagcaatatgttttgcttaatattccaaagatattttcacctacaatattaacagccctctctatgggtaaaatttggcataattttaagacctttctggttcagagcacaacatgagaacaacagtaccaatgtttattatagaatttactacaaatatgcaagtgctttggctactggttgtgtgttggaagtcagaatctactgaattaagtataacccttttgcttccagcagaaacaaaaaaatttatacacacacacacacacacacacacacacacacacacacaatggatgttttttcacagaataattagaaaaacagcttttaaaaaactcagaccaagtagaaccagaaagccacatgaattttcagggctttggttaggtttacctgaaagtgtaggtgaatataaaagctttatcaaagctttacaaaagcataacgcatggcaatatgatgcactgtttgcgggagtcctgcgagggcacattgttccgtgcagtaatttcaatgtgcctaagttcttgtgtcttcactaattatgtatcttgacattcacttgctttgttgtaaccctcagagtctgttcaactatgtcgatagtctgtagcatctccagatctgcagcttttagttatcttgggccacatgtaatttatgtagacataactgaagatcatcagtttgggatgagattattgggttacgttgaggctcaacaagaaaaaccataatctttcctaaagagacggaacaggaggcaaatacaattcatttccttctttagaaatgaattcccttacaccctatcacttctgttttggacctcaaattaatactaggcgacagaaagattaaattcatttcacaagacagttttgtgatataagttattttgtgtaaaattttttaacacaaaattaaattcgtgaaaaccctagtttctgtatagatgagtgttttcagttgtccttattgttttattaacataagaagtgggagagctctcactgttttctcatgtgtgggtatagtattgaagaagtgttgcaattgtccccctggtatttgggtgcagctttttgtgattcccacagtagccctcagaggtcccctgtgcttttgaattttacttgcgtgttgctgttttgcaccaccaggggacactcagtttccacagaggggtgctatgctctaccaaaatggtgcagattctttttcctgtcaggggtggactccaaaaagattttgtcctggattttacagctttaggtggatccagtattgggtttagatgagttgacagagccctttctgagatgaagctaatagccagattttcactgaaacaggaaaaataaaaatttcaaaaaaattaaaacaaaatggagttaaaaactaaatatgttgccagagacccaaagataggcagctctagcaacttggggggcatgcaagtatccatccagggagctgagttccacccatgcggcggaggtgggaagagaggattctgggaaggtcccggttggaatggccttttttctgcctcagccatattattcagtggaaattcagaaaagaccccaaaacatttgtagtgcctttccctttctccccacccccagttccttcttcagtagccttccttgctaattaacactggctctgcagggatatttaccttttctctgctggattcctgtggttttgaaagaattcaggtacttgctggttgccaaggaattcagattacctcacaggctgcacactgtccagaatctgccacagcagcaagtaggggggaagagacaccaacaagggggagaaaaccctttccagtgctcattgtcaccctccctggcaggcccttgctgtttgtgaagtttgagtcatttctggctctaaagacaagggatcaggctggtaatcccctcccagacggctctgtagggcgctgcctagtcactgcagcgctttggcagtctcccggctgcagctggttgacagcagatcagagagctcttgggcctcttgttctcttccataagatttttctgggtcaggccaggatgaaacccagtggctcctggcaaggctgcctgaggtgctgtctcttcattgtccaggcctctctgactcaaaatgcctacacctgttgaaggataactcatgtgccacagcgaggtcgaggctggccttctcttttcttggtacatttgtagtgaatgtttgtcagaaaatataactaccaaagaggatgttaagcttctacatctagaatgcctgtgactctgaccataagaagatattggtatcaaaaaaaagtttttaagaaaacagcaggaca

SEQ ID NO: 424975 - DNA, 1062 bp, Homo sapiens
gcctgcgcagtggctccgagcgggcggttgcttgttggttgttgtagtaaccggggaagcagccgtcggcggctgccctgagccttcctggggaaggaggagggaggtaggcgcagagcgcggtccacgcctgctcgccccgaaccatgggaagatgagacaggaatctgtgccatccaaattgcttgatccagtgaatctgctaggaaaggtctctgaggcccccgtctgctgactgcatgacaaaccctaaaggaaatgccaatcgtgatggcccgggacctggaggaaacagcatcatcctcagaggatgaggaggtcataagtcaagaggatcatccatgcatcatgtggactggaggctgcaggagaattccagttttggtattccatgccgacgctattcttacaaaggacaacaatattagagtaattggagaacgttatcatttgtcttataagattgtacgaacggacagtcgcctagtacgcagcattctgacagcccatggatttcatgaagttcacccaagcagcactgactataacctaatgtggacaggatcccacctgaagcccttcttactgcgcaccctctctgaagcacaaaaagttaatcactttcccaggtcttatgaacttacccggaaggaccgactgtacaaaaacattattcgaatgcagcatacacatggattcaaggcttttcacatcctcccccagaccttcctcctgccagctgagtacgcggaattttgtaattcatattcgaaggaccggggaccttggatagtaaaaccagtggcatcttcaagggggcggggcgtctacctgatcaacaatccaaaccagatctccctggaagagaacattttggtctcccgttacattaacaaccccctgctcatagatgatttcaagtttgacgtgcgcctctatgtgctcgtgacttcctatgatcctcttgtcatctatctctatgaagaaggattggctaggtttgcaactgtgcgatatgatcaaggagccaagaacattcggaaccagttcatgcatctgaca

SEQ ID NO: 424976 - DNA, 300 bp, Homo sapiens
ccttcccggggggagcatctgcggacctacgtgggattggggtgagctgggggtggggctgagaagcagattcctttcgggagaggagtctccttaggtgagtatctctactcttcttccgatagacctgtttctccccgctctgcaggcagcctaggagaggttggcatcccttcccgtttggaggttttgtttgtttaaacttaaagggcttcccagcattttgggaaagatcaagaaatcccgttgagaatcccctgaagaaagccattgaagttgttagacattgcctattgcgcc

SEQ ID NO: 424977 - DNA, 3624 bp, Homo sapiens
actctgcgggcgaagtggctgcgcaaggagagaacttttcctgcacaaggaacgcctcgtggggagacccaaggcaggagcggtccggagccggctgcggcgtgtgcggccggccttgggacagcgatcgccgcgggtggcaacagagagccccaagcaaaagtgggagcaggagcttggaggtgagcacaggaagccccacttgaggcttttacgcagcctctagtctctgtttcttctggaataggcaagcgtcctttcaactctaagagaccagcagaggccactgtcccttaagactgccggagtcctcaccacttctccaggattccagaggagactgtggcgatggtgaatgaaggtcccaaccaggaagagagcgatgacacccctgtgccggagtccgcactccaagcggaccccagcgtctcggtccatcccagcgtctcggtccatcccagcgtctccatcaaccccagcgtctctgtccaccccagcagttcggcccaccccagtgccttagcccaacccagtggcttggctcaccccagtagctcgggccctgaggacctcagcgtgatcaaggtgagcaggcgccgttgggccgtggtcctggtgtttagctgctactccatgtgcaactcctttcagtggatccagtacggctccatcaataacatcttcatgcacttctacggtgtcagtgcctttgccattgactggctgtccatgtgctacatgctgacttacatccctctgctcctgccagtggcttggctgctggagaagttcggcctgcgcaccattgctctcactggctcggctctcaactgcctgggggcctgggtgaagctgggcagcctgaagccgcatctctttccggtcaccgtggtgggccagctcatctgctctgtggcccaggttttcatcctgggcatgccctcccgcatcgcttccgtctggttcggggctaatgaggtttcaacagcctgctcggtggctgtctttggcaatcagcttggaattgcgattgggttcttggtccctcctgttttggtacccaacattgaagaccgggacgagcttgcctaccacatcagcatcatgttctatataataggaggtgtggccactctcctcctcatccttgtcatcattgtgttcaaggagaaacctaaatatccccccagcagggcccaatccctgagctatgccttgacctctcctgatgcctcatacttaggttccatcgcccggctcttcaaaaatctcaactttgtgctgcttgtcatcacctatggtctgaatgctggtgctttttatgccttgtccactcttctgaatcgcatggtgatctggcactacccgggggaagaagtgaatgctggaagaattggcctgacgatcgtcattgcaggaatgcttggggctgtgatctcaggaatctggctggataggtccaaaacctacaaagagacaaccctggtagtctatatcatgacactggtgggcatggtggtgtacacgtttaccttgaacctgggacacctgtgggtagtgttcatcactgctggcacaatgggcttctttatgactggctatctcccactgggatttgagtttgctgtggagctcacgtacccagaatcagaaggcatctcctccggcctcctcaacatatctgcacaggtatttgggatcatctttaccatctcccagggccagattattgacaactatggaaccaagcctgggaacatcttcctgtgtgtgttccttactcttggagcagccctcactgcattcattaaggcagatctccggagacagaaagcaaacaaagaaactcttgagaacaaactccaagaggaggaggaggagagcaacaccagcaaagtgcccactgctgtgtcagaggatcatctctgagaggaaggtggtgacaactcagggaacacgaacaccccaccttttccttcagcacagctctcaccgccagcacaaagggcttcgctagagatgtttttggagggaatcagtgggactatttgtggcatggatggcctattcctcctagaacccacgtaagagcttggatgatttagttggagaaaattgcacctatcaccaaatgcaaatttgattcccacctccacccccttttaggttatgggagttggtgttgggacagggtggcagagaatattggagtcaatcctagcttggtctcttgccttccctcttttcctccatccatcgtggacaatgcctgcaaaattttcacaggaagaaagcctattcaggatattaacttgaaatttccagtgtcctaagagcctctcatgaagcccagttctaataagtggcaagctgctctgccggggtcatctcctgggtcatcggactgattgctcaagttctgcaggagaggaagcaccattagaacaactccatcagaacagctccaccgggacttgtgggcctaaattttcctggcctaacgggtctgtctccaaaccctctttcctaagagctgagcaaaccaaccataataaacttgacaaaagactttgttgtggccatgacagagataccgactcaggagggctacctacctaggtgtgatcatgctgggggctaccttctgagtatatttgtgaaagcacatatttgggaactctggtagcttgagttgggaatgggaaggttcttttttacagaagtacttccccagggacttctgtgtgtcacagtcacctctgatgcctttatcttgatgttgcattgggaatctcagccatcagcccaagtgcttgttttattccaaggcagggtaatccccgtcaacttactctaacctttgctgaaaactaatcttgattcattctactctgaaaatccaaaggtgcttctgagagataagagggaaggggtagaaggaaaggtgccccttgaaatgggaattgagcctgttagaattaaaagcttatctcacctctgctggggacagtatttgcaccaccaacccctctcctcacctgctttgagcgataatctttatcagatattctaaacttaaagggattccctttaaaccaactcaagctgatctttcctatctagcctgctgtttggctgtactcatgggctttggtaatatctcctaaaaatgaggttttggtaatttttcctatgcattgggcaactgtgatcgtgaccactgtgctgtcttgctccagccactgccctggcctcagcatatcagggcagcctgtgctggctgcaatactgtggtgcttgggccactgcctgagaggagccaggtttgtgtgtgtctgcatgtgtgtgtgtgtgtgtttgtacagattcaagcaatggatgcaaggaacatgctgtatgtaatagaagaaagaagtccacgttttcggcagaagtagtgagtcagtgtggaagagaggtgagggtgtgctttactttttgataaagagaaagatgtttactcataaacccttcaaaaggtattaacaaaatgtttaccaaacctattgctttattttaaaaacataatttgtgttttctatttgtaagatctgacatttcgaggcaataaaaacttctcagaaa

SEQ ID NO: 424978 - DNA, 870 bp, Homo sapiens
gcctgcgcagtggctccgagcgggcggttgcttgttggttgttgtagtaaccggggaagcagccgtcggcggctgccctgagccttcctggggaaggaggagggaggtaggcgcagagcgcggtccacgcctgctcgccccgaaccatgggaagatgagacaggaatctgtgccatccaaattgcttgatccagtgaatctgctaggaaaggtctctgaggcccccgtctgctgactgcatgacaaaccctaaaggaaatgccaatcgtgatggcccgggacctggaggaaacagcatcatcctcagaggatgaggaggtcataagtcaagaggatcatccatgcatcatgtggactggaggctgcaggagaattccagttttggtattccatgccgacgctattcttacaaaggacaacaatattagagtaattggagaacgttatcatttgtcttataagattgtacgaacggacagtcgcctagtacgcagcattctgacagcccatggatttcatgaagttcacccaagcagcactgactataacctaatgtggacaggatcccacctgaagcccttcttactgcgcaccctctctgaagcacaaaaagttaatcactttcccaggtaatgctctttgtagctgctttgcttcatttaaaggtacatgacattggggcatgtagccagcaaaggtaattagtgtccttaaagaagaggaagatgaaaatgaagaagaagaaggacttttttttttttttttgagatgagtatcgctctgtcacccaggctggagtgcagtggcatgatcttggctcactgcaacctctgcctcctgagttcaagcaattctcctgcctcagcctac

SEQ ID NO: 424979 - DNA, 5176 bp, Homo sapiens
  misc_feature (2673)..(2673): n is a, c, g, or t
actctgcgggcgaagtggctgcgcaaggagagaacttttcctgcacaaggaacgcctcgtggggagacccaaggcaggagcggtccggagccggctgcggcgtgtgcggccggccttgggacagcgatcgccgcgggtggcaacagagagccccaagcaaaagtgggagcaggagcttggaggtgagcacaggaagccccacttgaggcttttacgcagcctctagtctctgtttcttctggaataggcaagcgtcctttcaactctaagagaccagcagaggccactgtcccttaagactgccggagtcctcaccacttctccaggattccagaggagactgtggcgatggtgaatgaaggtcccaaccaggaagagagcgatgacacccctgtgccggagtccgcactccaagcggaccccagcgtctcggtccatcccagcgtctcggtccatcccagcgtctccatcaaccccagcgtctctgtccaccccagcagttcggcccaccccagtgccttagcccaacccagtggcttggctcaccccagtagctcgggccctgaggacctcagcgtgatcaaggtgagcaggcgccgttgggccgtggtcctggtgtttagctgctactccatgtgcaactcctttcagtggatccagtacggctccatcaataacatcttcatgcacttctacggtgtcagtgcctttgccattgactggctgtccatgtgctacatgctgacttacatccctctgctcctgccagtggcttggctgctggagaagttcggcctgcgcaccattgctctcactggctcggctctcaactgcctgggggcctgggtgaagctgggcagcctgaagccgcatctctttccggtcaccgtggtgggccagctcatctgctctgtggcccaggttttcatcctgggcatgccctcccgcatcgcttccgtctggttcggggctaatgaggtttcaacagcctgctcggtggctgtctttggcaatcaggaatctgtgccatccaaattgcttgatccagtgaatctgctaggaaaggtctctgaggcccccgtctgctgactgcatgacaaaccctaaaggaaatgccaatcgtgatggcccgggacctggaggaaacagcatcatcctcagaggatgaggaggtcataagtcaagaggatcatccatgcatcatgtggactggaggctgcaggagaattccagttttggtattccatgccgacgctattcttacaaaggacaacaatattagagtaattggagaacgttatcatttgtcttataagattgtacgaacggacagtcgcctagtacgcagcattctgacagcccatggatttcatgaagttcacccaagcagcactgactataacctaatgtggacaggatcccacctgaagcccttcttactgcgcaccctctctgaagcacaaaaagttaatcactttcccaggtcttatgaacttacccggaaggaccgactgtacaaaaacattattcgaatgcagcatacacatggattcaaggcttttcacatcctcccccagaccttcctcctgccagctgagtacgcggaattttgtaattcatattcgaaggaccggggaccttggatagtaaaaccagtggcatcttcaagggggcggggcgtctacctgatcaacaatccaaaccagatctccctggaagagaacattttggtctcccgttacattaacaaccccctgctcatagatgatttcaagtttgacgtgcgcctctatgtgctcgtgacttcctatgatcctcttgtcatctatctctatgaagaaggattggctagaaaatgcaattggaagatgggaaataccatggataaaagaaggctacctatttatgtacaggtgctttgacagatattattgtactctgacaactattattttagaatggtcttttaatgattttagagacttagtttttttcacatgtatcctatgacttgaaatcagtgagagcagactaaccaaacctcgctggtggagctctgtgttccgttcgcctctaggtggcagtcacagcatttataagtcctgtcatattcttaactgagattttgagtttgagccctgggaacattggagactaccaaaactccctagttctggcctcttccttgaaaattgagaaagggaagaactgaaacatctcgcagttattagataaagggctggaccaggcatctgaacatgagctgactactagctctaatcaggtttttataggaaagaaattgtcgataatatttgtagacacacgtgctctcacgttttgaagtatcactatacaaaattaggtataaaagcctattcctggccaggcgtggtggctcacacctgtaatcctagcactttgggaggccgagacgggaggattgcctgaggccaggagttcaagaccagtttgggcaacattgtgagaccccatctcattaaaaaaaaaaaaaaaaaaaaaaaaaaagaccaagaaaaagcctattccctatattatttaaaacaaaatgatggtaaaatacagtcctgacttctcagatatgcaaggttctgaggattttcagctttataatttgagacttctgagctttctctcttttgtgttatgagnttcatcattctccttcctctgctcatcctcaccttcacttctctcctgtgtcaagttttagaaactgattatgtcctgccaaaaattggactttgggaatagagaaaagagatggaggttgtgcttcactgtttctcaaggacatcatagcaatatgttttgcttaatattccaaagatattttcacctacaatattaacagccctctctatgggtaaaatttggcataattttaagacctttctggttcagagcacaacatgagaacaacagtaccaatgtttattatagaatttactacaaatatgcaagtgctttggctactggttgtgtgttggaagtcagaatctactgaattaagtataacccttttgcttccagcagaaacaaaaaaatttatacacacacacacacacacacacacacacacacacacacaatggatgttttttcacagaataattagaaaaacagcttttaaaaaactcagaccaagtagaaccagaaagccacatgaattttcagggctttggttaggtttacctgaaagtgtaggtgaatataaaagctttatcaaagctttacaaaagcataacgcatggcaatatgatgcactgtttgcgggagtcctgcgagggcacattgttccgtgcagtaatttcaatgtgcctaagttcttgtgtcttcactaattatgtatcttgacattcacttgctttgttgtaaccctcagagtctgttcaactatgtcgatagtctgtagcatctccagatctgcagcttttagttatcttgggccacatgtaatttatgtagacataactgaagatcatcagtttgggatgagattattgggttacgttgaggctcaacaagaaaaaccataatctttcctaaagagacggaacaggaggcaaatacaattcatttccttctttagaaatgaattcccttacaccctatcacttctgttttggacctcaaattaatactaggcgacagaaagattaaattcatttcacaagacagttttgtgatataagttattttgtgtaaaattttttaacacaaaattaaattcgtgaaaaccctagtttctgtatagatgagtgttttcagttgtccttattgttttattaacataagaagtgggagagctctcactgttttctcatgtgtgggtatagtattgaagaagtgttgcaattgtccccctggtatttgggtgcagctttttgtgattcccacagtagccctcagaggtcccctgtgcttttgaattttacttgcgtgttgctgttttgcaccaccaggggacactcagtttccacagaggggtgctatgctctaccaaaatggtgcagattctttttcctgtcaggggtggactccaaaaagattttgtcctggattttacagctttaggtggatccagtattgggtttagatgagttgacagagccctttctgagatgaagctaatagccagattttcactgaaacaggaaaaataaaaatttcaaaaaaattaaaacaaaatggagttaaaaactaaatatgttgccagagacccaaagataggcagctctagcaacttggggggcatgcaagtatccatccagggagctgagttccacccatgcggcggaggtgggaagagaggattctgggaaggtcccggttggaatggccttttttctgcctcagccatattattcagtggaaattcagaaaagaccccaaaacatttgtagtgcctttccctttctccccacccccagttccttcttcagtagccttccttgctaattaacactggctctgcagggatatttaccttttctctgctggattcctgtggttttgaaagaattcaggtacttgctggttgccaaggaattcagattacctcacaggctgcacactgtccagaatctgccacagcagcaagtaggggggaagagacaccaacaagggggagaaaaccctttccagtgctcattgtcaccctccctggcaggcccttgctgtttgtgaagtttgagtcatttctggctctaaagacaagggatcaggctggtaatcccctcccagacggctctgtagggcgctgcctagtcactgcagcgctttggcagtctcccggctgcagctggttgacagcagatcagagagctcttgggcctcttgttctcttccataagatttttctgggtcaggccaggatgaaacccagtggctcctggcaaggctgcctgaggtgctgtctcttcattgtccaggcctctctgactcaaaatgcctacacctgttgaaggataactcatgtgccacagcgaggtcgaggctggccttctcttttcttggtacatttgtagtgaatgtttgtcagaaaatataactaccaaagaggatgttaagcttctacatctagaatgcctgtgactctgaccataagaagatattggtatcaaaaaaaagtttttaagaaaacagcaggaca

SEQ ID NO: 424980 - DNA, 557 bp, Homo sapiens
agcactgaacttggcaggaaaatcagtaggagtaagtggcggaggcatgggactggcagagatacggcagcccctgtggagaggctgtctacagataacataacaataaccacaggatctgcggggttcctgcatgcgtgttggcttcactggagaaactaatcaagtggtgcagtttggacacagagactgacacacaggaagaataccatgtgaagactggagttttgcatagagaagccaaggagctaccagaagctaggagaatggcctggaacagacctttccttagtgccttcagagagagcatggcgctgccaacatcttgatctcagacttccagcatcctgaattgtgagataaatttctgctgtttaaaccatataatttgtgatactttgctatggcaactgtcacagctattataagcacctaaccctttttttaatcttttaagaaactttttgctttcatctactttttttgttctggttattccatattttactttaagatttagtcttctgtcaataaagcaataatttcagatcaatttc

SEQ ID NO: 424981 - DNA, 777 bp, Homo sapiens
agcactgaacttggcaggaaaatcagtaggagtaagtggcggaggcatgggactggcagagatacggcagcccctgtggagaggctgtctacagataacataacaataaccacaggatctgcggggttcctgcatgcgtgttggcttcactggagaaactaatcaagtggtctgagtcattcaagttatagtctatttgaagacgagttgaatctgaaacaatgagtaagatgatgagagctcgatacttatggtttaaatataaaaggggtatcccaactcagaaagagagaggagatctggaaaaatcctgctttctgaagcttttgacggtattttcatactgcctgactaaagtgcaacagctacatattgacaggcggtggaaggtgcagtttggacacagagactgacacacaggaagaataccatgtgaagactggagttttgcatagagaagccaaggagctaccagaagctaggagaatggcctggaacagacctttccttagtgccttcagagagagcatggcgctgccaacatcttgatctcagacttccagcatcctgaattgtgagataaatttctgctgtttaaaccatataatttgtgatactttgctatggcaactgtcacagctattataagcacctaaccctttttttaatcttttaagaaactttttgctttcatctactttttttgttctggttattccatattttactttaagatttagtcttctgtcaataaagcaataatttcagatcaatttc

SEQ ID NO: 424982 - DNA, 666 bp, Homo sapiens
agcactgaacttggcaggaaaatcagtaggagtaagtggcggaggcatgggactggcagagatacggcagcccctgtggagaggctgtctacagataacataacaataaccacaggatctgcggggttcctgcatgcgtgttggcttcactggagaaactaatcaagtggtgcagtttggacacagagactgacacacaggaagaataccatgtgaagactggagttttgcatagagaagccaaggagctaccagaagctaggagaatggcctggaacagacctttccttagtgccttcagagagagcatggcgctgccaacatcttgatctcagacttccagcatcctgaattgccctgaaaaaatgggataatgcctacctacattggtgagagtgatgtttactcagtctactgaatcaaataccaatctcttctggaaatactatcagagacacaccaagaaacaacattttaccagcgatcggagcatcccttagcccagtcaaattgacccattaaataagccctcacactctgctataaggcatctgcactacacataaattgatattgttatatgaaggtaggcttatatttgttaaaaatgtacaaaatttacattatagatttgatggtaaataccaaaagatttaataaggaaac

SEQ ID NO: 424983 - DNA, 719 bp, Homo sapiens
tagtgagaaatgttttagatgatgataatgataatgttgggcaacccaatgagtatgacctgaacgacagctttctagatgatgaggaagaagactatgagccaacagatgaagattctgactgggaaccaggaaaggaagatgaagagaaggaagatggggaagagcttttgaaagaagcaaaaagagactcacattgacaatctaaggcttgtaaagaagcaccataacattacagaaacagacatgagatacgacgctgtagtgaagaacctccatattccatcaatccagattggaagaagacaaagaacacaagaccgaaactgaatccttgggtatgttctggaataaacctggattcctagggagaaaagagatccctgaaatgaaaattgccgtaaggagccctgaaaaaatgggataatgcctacctacattggtgagagtgatgtttactcagtctactgaatcaaataccaatctcttctggaaatactatcagagacacaccaagaaacaacattttaccagcgatcggagcatcccttagcccagtcaaattgacccattaaataagccctcacactctgctataaggcatctgcactacacataaattgatattgttatatgaaggtaggcttatatttgttaaaaatgtacaaaatttacattatagatttgatggtaaataccaaaagatttaataaggaaac

SEQ ID NO: 424984 - DNA, 1405 bp, Homo sapiens
ggtttatagtacaaaatcatcagttgcctgtcctaccctctcttctgccactttctagcccctaggggcaacacttaactcttccggccttttcttctggtgttttacctccctattttttgtaatacggtaatactgctatttataatttttcactttttgatgttatttattccttctaaggaagatagtgatttacttctcttatgccatacactctttccttctatgcatttttccagtgtatttatatcacaattataactttcttaaattatcttccaatatttacactattattactgtacagtgttcacagctaagccattagtatactataattgcatcctttcttttttttttttttttgagatggagtctcactctgttgcctaggctggagtgcagtggcgtgatctcggctcactgcaacctctgcctcccaggttcaagcaattctccggtctcagcctcccgagtcgctggaactacaggcacacaccaccacacttggctaattttttacatttttagtagagatggggtttcactgtgttagccaggatggtcttgatctcctgacctcgtgatccgcccaccttggcctcccaaagtgctgggattacaggcgtgagccaccacacctggcctcatttcctttctttatataaatttaaagacagaattttatggttctgacagagccatataacagaaccatcttaaacataccctctaaactgcccttcatcctcctgtttgaattctaacttgttttcagctgtcatcctagtactgcattcagcattatgctgggcattgccattgcttctctcttgtgttggcatccattttcctgcattttacaccgcctggtttcctagtttatttcttcattttggtggagcacatcattcaggagcttcctaagaaaggatgctgagagataagttggttgagatcttgtatatctgaaaatatctattctaccatcatatgtaattgataatttggcaggatatatcattctagcttgaaaaatcattttccctcagatttggaaggtttatcttcagtgttgctagtctccagtgttgttgagcaacccaaagacattctttagtcctttgtgacctttttttttttttttccccttgtgatagattttaggaccttctcttttcccccagtgttgtgaaattccacaggggtgtagcttgatggatctttttcattcattgtgtggcatactctgtgggcattttcattcaggaaatgtgtgtccttcagttctgaaaattttttcttatttattttaatgtttctcttcctgctttctggaacttctattagtttgatgctggatcttctgagttgatcctctgattctcttatctttctccta

SEQ ID NO: 424985 - DNA, 228 bp, Homo sapiens
acaaggtgtggcaggaaatccaggccagccaggaataccaggtcctaaaggggatccaggtcagacttagcgcctcagctggcggtgacagccggcccagcgtggcgccaccacacaccgcagagctgtccaggcacagctccgtccccagcgctcatggtgttgaaactgtctgtcatgcaccacggtgtctgtgtccacacagtaataaacggtttactgtccgca

SEQ ID NO: 424986 - DNA, 1995 bp, Homo sapiens
  misc_feature (19)..(19): n is a, c, g, or t
  misc_feature (22)..(22): n is a, c, g, or t
  misc_feature (27)..(27): n is a, c, g, or t
  misc_feature (37)..(37): n is a, c, g, or t
  misc_feature (44)..(44): n is a, c, g, or t
  misc_feature (66)..(66): n is a, c, g, or t
  misc_feature (70)..(70): n is a, c, g, or t
cgatcttccttccggagcncgncagcntatatatcantcaagtnactccttctgacatggctccgnaagnaagatcgcgagtccggaggatggacaaagtaaggaagatgccacgggaatatggcggcggcggcggcgagtccggactaggcccgaagcgcgcgaccgcctgatcaacataggctggtgggagtacaggactcgcctcctcagggttccctgtgctgccacttttcagccatggccacaagtgaacagagtatctgccaagcccgggcttccgtgatggtctacgatgacaccagtaagaaatgggtaccaatcaaacctggccagcagggattcagccggatcaacatctaccacaacactgccagcaacaccttcagagtcgttggagtcaagttgcaggatcagcaggttgtgatcaattattcaatcgtgaaagggctgaagtacaatcaggccacgccaaccttccaccagtggcgagatgcccgccaggtctacggcttaaactttgcaagtaaagaagaggcaaccacgttctccaatgcaatgctgtttgccctgaacatcatgaattcccaagaaggaggcccctccagccagcgtcaggtgcagaatggcccctctcctgatgagatggacatccagagaagacaagtgatggagcagcaccagcagcagcgtcaggaatctctagaaagaagaacctcggccacagggcccatcctcccaccaggacatccttcatctgcagccagcgcccccgtctcatgtagtgggcctccaccgccccccccacccccagtcccacctccacccactggggctaccccacctcccccacccccactgccagccggaggagcccaggggtccagccacgacgagagctccatgtcaggactggccgctgccatagctggggccaagctgagaagagtccaacggccagaagacgcatctggaggctccagtcccagtgggacctcaaagtccgatgccaaccgggcaagcagcgggggtggcggaggaggcctcatggaggaaatgaacaaactgctggccaagaggagaaaagcagcctcccagtcagacaagccagccgagaagaaggaagatgaaagccaaatggaagatcctagtacctccccctctccggggacccgagcagccagccagccacctaactcctcagaggctggccggaagccctgggagcggagcaactcggtggagaagcctgtgtcctcgattctgtccagaaccccgtctgtggcaaagagccccgaagctaagagcccccttcagtcgcagcctcactctaggatgaagcctgctgggagcgtgaatgacatggccctggatgccttcgacttggaccggatgaagcaggagatcctagaggaggtggtgagagagctccacaaggtgaaggaggagatcatcgacgccatcaggcaggagctgagtgggatcagcaccacgtaaggggccggcctcgctgcgctgattcgtcgagcccatccggcgacagaggacagccagaagcccagccagccccagactccagtgcaccagagcacgcacaggagcctgggcgcgctgctgtgaaacgtcctgacctgtgatcacacatgacagtgaggaaaccaagtgcaactcctgggtttttttagattctgcctgacacggaacaccaggtctgctcgtcttttttgtgttttatatttgcttatttaaggtacatttctttgggtttctagagacgcccctaagtcacctgcttcattagacggtttccaggttttctcccaggtgacgctgttagcgcctcagctggcggtgacagccggcccagcgtggcgccaccacacaccgcagagctgtccaggcacagctccgtccccagcgctcatggtgttgaaactgtctgtcatgcaccacggtgtctgtgtccacacagtaataaacggtttactgtccgca

SEQ ID NO: 424987 - DNA, 5319 bp, Homo sapiens
  misc_feature (19)..(19): n is a, c, g, or t
  misc_feature (22)..(22): n is a, c, g, or t
  misc_feature (27)..(27): n is a, c, g, or t
  misc_feature (37)..(37): n is a, c, g, or t
  misc_feature (44)..(44): n is a, c, g, or t
  misc_feature (66)..(66): n is a, c, g, or t
  misc_feature (70)..(70): n is a, c, g, or t
cgatcttccttccggagcncgncagcntatatatcantcaagtnactccttctgacatggctccgnaagnaagatcgcgagtccggaggatggacaaagtaaggaagatgccacgggaatatggcggcggcggcggcgagtccggactaggcccgaagcgcgcgaccgcctgatcaacataggctggtgggagtacaggactcgcctcctcagggttccctgtgctgccacttttcagccatggccacaagtgaacagagtatctgccaagcccgggcttccgtgatggtctacgatgacaccagtaagaaatgggtaccaatcaaacctggccagcagggattcagccggatcaacatctaccacaacactgccagcaacaccttcagagtcgttggagtcaagttgcaggatcagcaggttgtgatcaattattcaatcgtgaaagggctgaagtacaatcaggccacgccaaccttccaccagtggcgagatgcccgccaggtctacggcttaaactttgcaagtaaagaagaggcaaccacgttctccaatgcaatgctgtttgccctgaacatcatgaattcccaagaaggaggcccctccagccagcgtcaggtgcagaatggcccctctcctgatgagatggacatccagagaagacaagtgatggagcagcaccagcagcagcgtcaggaatctctagaaagaagaacctcggccacagggcccatcctcccaccaggacatccttcatctgcagccagcgcccccgtctcatgtagtgggcctccaccgccccccccacccccagtcccacctccacccactggggctaccccacctcccccacccccactgccagccggaggagcccaggggtccagccacgacgagagctccatgtcaggactggccgctgccatagctggggccaagctgagaagagtccaacggccagaagacgcatctggaggctccagtcccagtgggacctcaaagtccgatgccaaccgggcaagcagcgggggtggcggaggaggcctcatggaggaaatgaacaaactgctggccaagaggagaaaagcagcctcccagtcagacaagccagccgagaagaaggaagatgaaagccaaatggaagatcctagtacctccccctctccggggacccgagcagccagccagccacctaactcctcagaggctggccggaagccctgggagcggagcaactcggtggagaagcctgtgtcctcgattctgtccagaaccccgtctgtggcaaagagccccgaagctaagagcccccttcagtcgcagcctcactctaggtaccgaacaaccctcctgctcacatgtcccccagggtttggggctcctctgtcccccgtcccgtgactaacacccttgcacgctgtctcacgtcctggcatttaacaacttgctctgcgaaggtggtctgttctttcagacccaggacctcggggtcctgtcagtcagctgctccgtcttttccctctgagagagagaccaagggcaaggagggcagtgacctgtccacagaggtagtgcaggggggggccaacatggagtcccagctctggactcactacgtgtgacagtgggcaagttaggggacctctccaagcctctgttttccccccacaaagtgaggtctgttaacccctgctgcacagggtggtggtggggacagctgtgagcaacagctggacatggggtgtggtcactagccagggctgcaccctacagttcaaccagtcctagcactggcgctgagccctacccctttcctccagcccagagtccttcctctgcggccggcacacagaatcagtttccccacagacatactgaccatatttcccaagccaaaagctggcatgacaacatgatagaatatttggaactgagattgcccaaaaaggcagaggcagccagccacatagtatctggaggtacatgtggcctgaattggaaggcctctagaacctgcgtcaagaatgtctccatcgccaccacaaattgaagggaaaccacccttatcacagagcaggaggcattgaaactggccttgcagagctgaacaggtggtgagagcagagcagtgcaggtggacagagatgaggaagtcttagcagtcagctggggtttgtccaaggcttgtggtcagccaggccgtgtgctggggacagtccctgcctgcaaagagcaccgtgtgaacaaggccactgtggtcctgaggggtgctctggacagggtgcagggccacatggtggaagggacagggtgctttgcggagtggggtggggcaagcctctgtcgggagctggcattttcgttgacccggacgaggaggagtctgctctgcggagatcatggggacagcctcccaagctgaaggaagggtaagtgccagggccctgagcctgcagccacccgccaagctcccccgcacctccacctggaagcagacaggccatggggcaggggaacgggaagggtgaggaagagggtgtgggggagcgcggagttagaagtttgcattgtgttcatgcgcagggcccagtcatggaacttgaggcacagggtgccatggtggaggctgggaaggggaaggcaaccagagtgggcaaaacgagggccctggagcagacacggcagcaaggggagcctgcagcgctcccagcggactccgccacgtcctgctggtggagcaaaggcgggctgccatgttgtgagtggccaagggtcgctcactgggcaggaacattgtcaaggccattcatgcttggaatagggtctctcttcagctctgaggcaaatctgttctctaattttcagatgacttcaaggggaacgtgtaccaccacccctctggtgcgtcacattgcttaggaagcctgctgtgtttatcactgggtggctgtcagggctgagatggagagggccagggcctggcgaggtggagcagtcggcccaggtgtcccagcaattgttgctggaacagggtctggaacccacaggagaggcctgaaggacccagggccctctggctggatgcgtttgcctatcaggacccagaattacttacagacctgtttagggctaggcttggcctctttcttgagctcatctggaggggtgtggcaacactcattcttcatccttattctccctggctgtgggcaacactggtcctcagtgtcaccagatggtcctcctctgtgcccatgacccctcagcagccaaggctggccctgccagataaatgtgtgtgcccatgatcacacccaggggcacaggccacatacgtttccctgaaaccttgggctccagcctccatcccgtccatgtgggagggaacttgggtcccagcagtgtgtctttcagcaccaagtcatgtttaaaagaccagagagacaagcattttgccaagatcttccagggaagatgcatgtgtgacacattaacattcaaatcaggccagcgcggtgctcatgcctgtcatcccagcactttgggaggccgaggcgggaggatcacttgagcccaggacttggagaccagtctgggcaacacagtgagaccccatctctacaaaaagttaaaaaagaaaaaaaaaagggcacatgtctgtagtcccagctactcgggaggctcacttgagcctgggaggttgaggctgcagtgaggcatgatacgcctctgtactccagcctggttgacagagtgagaccctgtctcaaataagtaaaaataaaattcaaatcggttaccttagtttggaaacttttcaaagaagtagtccacgagaactaccttgaaagagcaaaaccagccaggtgcagtggctcacgcccataatcccagcactctgggaggcccaggtgggtggatctcgtgaggtcaggagttcaagaccagcttggccaacatggtgaaaccccatctctgctgaaaatacaaaagttagctgaaaatacaaaagtggcacatgcctgtaatgccagctactggggaggctgaggtaggagaattgcttgaacctgggaggcagaggttgcagtgagccaagattgcgccattgcactccaatctggggaacaagagcaaaactctgtctgaaaaaaacaggctccagcaccaggggcgctggtgtgtcaggagcgcgcctccaggccggtgtgaactctgcaacttcacattgtgcctcctgccgccgctgctgcttccccgagccccaagctcaacctggagcatgagctcccaccctgaggaggaggctgtcaatactgtgtttctttccagggaggcaacgggtgggtgcgatgttgtcacttaagttgccacctctgcataagagctctctgatcagaaagcagtttctttgttgaccccagccagccttggctctcgggttgggaaatacagtcacggtatccatggagacctcttgaggtggagacgggcgttaaacccttctcaggcagtctgaggtggccagagtctgaagcaagcagcctctatggagcgaggggagcaggtgggcccagcctgagcggggcctctgcacagccagctttcccccacacctgtctccagccagggcacccacaggccctttctctcccagggatgaagcctgctgggagcgtgaatgacatggccctggatgccttcgacttggaccggatgaagcaggagatcctagaggaggtggtgagagagctccacaaggtgaaggaggagatcatcgacgccatcaggcaggagctgagtgggatcagcaccacgtaaggggccggcctcgctgcgctgattcgtcgagcccatccggcgacagaggacagccagaagcccagccagccccagactccagtgcaccagagcacgcacaggagcctgggcgcgctgctgtgaaacgtcctgacctgtgatcacacatgacagtgaggaaaccaagtgcaactcctgggtttttttagattctgcctgacacggaacaccaggtctgctcgtcttttttgtgttttatatttgcttatttaaggtacatttctttgggtttctagagacgcccctaagtcacctgcttcattagacggtttccaggttttctcccaggtgacgctgttagcgcctcagctggcggtgacagccggcccagcgtggcgccaccacacaccgcagagctgtccaggcacagctccgtccccagcgctcatggtgttgaaactgtctgtcatgcaccacggtgtctgtgtccacacagtaataaacggtttactgtccgca

SEQ ID NO: 424988 - DNA, 5218 bp, Homo sapiens
cgccaagatggcaggggccggggcccagctgtcagtccgccgccgccgccgggtcgcccctggcccggcgcgcccgtccccggcagcgacaatgagtgaacagagtatctgccaagcccgggcttccgtgatggtctacgatgacaccagtaagaaatgggtaccaatcaaacctggccagcagggattcagccggatcaacatctaccacaacactgccagcaacaccttcagagtcgttggagtcaagttgcaggatcagcaggttgtgatcaattattcaatcgtgaaagggctgaagtacaatcaggccacgccaaccttccaccagtggcgagatgcccgccaggtctacggcttaaactttgcaagtaaagaagaggcaaccacgttctccaatgcaatgctgtttgccctgaacatcatgaattcccaagaaggaggcccctccagccagcgtcaggtgcagaatggcccctctcctgatgagatggacatccagagaagacaagtgatggagcagcaccagcagcagcgtcaggaatctctagaaagaagaacctcggccacagggcccatcctcccaccaggacatccttcatctgcagccagcgcccccgtctcatgtagtgggcctccaccgccccccccacccccagtcccacctccacccactggggctaccccacctcccccacccccactgccagccggaggagcccaggggtccagccacgacgagagctccatgtcaggactggccgctgccatagctggggccaagctgagaagagtccaacggccagaagacgcatctggaggctccagtcccagtgggacctcaaagtccgatgccaaccgggcaagcagcgggggtggcggaggaggcctcatggaggaaatgaacaaactgctggccaagaggagaaaagcagcctcccagtcagacaagccagccgagaagaaggaagatgaaagccaaatggaagatcctagtacctccccctctccggggacccgagcagccagccagccacctaactcctcagaggctggccggaagccctgggagcggagcaactcggtggagaagcctgtgtcctcgattctgtccagaaccccgtctgtggcaaagagccccgaagctaagagcccccttcagtcgcagcctcactctaggtaccgaacaaccctcctgctcacatgtcccccagggtttggggctcctctgtcccccgtcccgtgactaacacccttgcacgctgtctcacgtcctggcatttaacaacttgctctgcgaaggtggtctgttctttcagacccaggacctcggggtcctgtcagtcagctgctccgtcttttccctctgagagagagaccaagggcaaggagggcagtgacctgtccacagaggtagtgcaggggggggccaacatggagtcccagctctggactcactacgtgtgacagtgggcaagttaggggacctctccaagcctctgttttccccccacaaagtgaggtctgttaacccctgctgcacagggtggtggtggggacagctgtgagcaacagctggacatggggtgtggtcactagccagggctgcaccctacagttcaaccagtcctagcactggcgctgagccctacccctttcctccagcccagagtccttcctctgcggccggcacacagaatcagtttccccacagacatactgaccatatttcccaagccaaaagctggcatgacaacatgatagaatatttggaactgagattgcccaaaaaggcagaggcagccagccacatagtatctggaggtacatgtggcctgaattggaaggcctctagaacctgcgtcaagaatgtctccatcgccaccacaaattgaagggaaaccacccttatcacagagcaggaggcattgaaactggccttgcagagctgaacaggtggtgagagcagagcagtgcaggtggacagagatgaggaagtcttagcagtcagctggggtttgtccaaggcttgtggtcagccaggccgtgtgctggggacagtccctgcctgcaaagagcaccgtgtgaacaaggccactgtggtcctgaggggtgctctggacagggtgcagggccacatggtggaagggacagggtgctttgcggagtggggtggggcaagcctctgtcgggagctggcattttcgttgacccggacgaggaggagtctgctctgcggagatcatggggacagcctcccaagctgaaggaagggtaagtgccagggccctgagcctgcagccacccgccaagctcccccgcacctccacctggaagcagacaggccatggggcaggggaacgggaagggtgaggaagagggtgtgggggagcgcggagttagaagtttgcattgtgttcatgcgcagggcccagtcatggaacttgaggcacagggtgccatggtggaggctgggaaggggaaggcaaccagagtgggcaaaacgagggccctggagcagacacggcagcaaggggagcctgcagcgctcccagcggactccgccacgtcctgctggtggagcaaaggcgggctgccatgttgtgagtggccaagggtcgctcactgggcaggaacattgtcaaggccattcatgcttggaatagggtctctcttcagctctgaggcaaatctgttctctaattttcagatgacttcaaggggaacgtgtaccaccacccctctggtgcgtcacattgcttaggaagcctgctgtgtttatcactgggtggctgtcagggctgagatggagagggccagggcctggcgaggtggagcagtcggcccaggtgtcccagcaattgttgctggaacagggtctggaacccacaggagaggcctgaaggacccagggccctctggctggatgcgtttgcctatcaggacccagaattacttacagacctgtttagggctaggcttggcctctttcttgagctcatctggaggggtgtggcaacactcattcttcatccttattctccctggctgtgggcaacactggtcctcagtgtcaccagatggtcctcctctgtgcccatgacccctcagcagccaaggctggccctgccagataaatgtgtgtgcccatgatcacacccaggggcacaggccacatacgtttccctgaaaccttgggctccagcctccatcccgtccatgtgggagggaacttgggtcccagcagtgtgtctttcagcaccaagtcatgtttaaaagaccagagagacaagcattttgccaagatcttccagggaagatgcatgtgtgacacattaacattcaaatcaggccagcgcggtgctcatgcctgtcatcccagcactttgggaggccgaggcgggaggatcacttgagcccaggacttggagaccagtctgggcaacacagtgagaccccatctctacaaaaagttaaaaaagaaaaaaaaaagggcacatgtctgtagtcccagctactcgggaggctcacttgagcctgggaggttgaggctgcagtgaggcatgatacgcctctgtactccagcctggttgacagagtgagaccctgtctcaaataagtaaaaataaaattcaaatcggttaccttagtttggaaacttttcaaagaagtagtccacgagaactaccttgaaagagcaaaaccagccaggtgcagtggctcacgcccataatcccagcactctgggaggcccaggtgggtggatctcgtgaggtcaggagttcaagaccagcttggccaacatggtgaaaccccatctctgctgaaaatacaaaagttagctgaaaatacaaaagtggcacatgcctgtaatgccagctactggggaggctgaggtaggagaattgcttgaacctgggaggcagaggttgcagtgagccaagattgcgccattgcactccaatctggggaacaagagcaaaactctgtctgaaaaaaaaaaagcgacaccacatgggaggatgtttcttgggggaggtgtgctatgcccgagcaggctccagcaccaggggcgctggtgtgtcaggagcgcgcctccaggccggtgtgaactctgcaacttcacattgtgcctcctgccgccgctgctgcttccccgagccccaagctcaacctggagcatgagctcccaccctgaggaggaggctgtcaatactgtgtttctttccagggaggcaacgggtgggtgcgatgttgtcacttaagttgccacctctgcataagagctctctgatcagaaagcagtttctttgttgaccccagccagccttggctctcgggttgggaaatacagtcacggtatccatggagacctcttgaggtggagacgggcgttaaacccttctcaggcagtctgaggtggccagagtctgaagcaagcagcctctatggagcgaggggagcaggtgggcccagcctgagcggggcctctgcacagccagctttcccccacacctgtctccagccagggcacccacaggccctttctctcccagggatgaagcctgctgggagcgtgaatgacatggccctggatgccttcgacttggaccggatgaagcaggagatcctagaggaggtggtgagagagctccacaaggtgaaggaggagatcatcgacgccatcaggcaggagctgagtgggatcagcaccacgtaaggggccggcctcgctgcgctgattcgtcgagcccatccggcgacagaggacagccagaagcccagccagccccagactccagtgcaccagagcacgcacaggagcctgggcgcgctgctgtgaaacgtcctgacctgtgatcacacatgacagtgaggaaaccaagtgcaactcctgggtttttttagattctgcctgacacggaacaccaggtctgctcgtcttttttgtgttttatatttgcttatttaaggtacatttctttgggtttctagagacgcccctaagtcacctgcttcattagacggtttccaggttttctcccaggtgacgctgttagcgcctcagctggcggtgacagccggcccagcgtggcgccaccacacaccgcagagctgtccaggcacagctccgtccccagcgctcatggtgttgaaactgtctgtcatgcaccacggtgtctgtgtccacacagtaataaacggtttactgtccgca

SEQ ID NO: 424989 - DNA, 5375 bp, Homo sapiens
cgccaagatggcaggggccggggcccagctgtcagtcgccgccgccgcggcccttccccgcagctagcggccccgacgcccacccggagaagatgagcccccgctgccccccgcagcccagtcagacgcggagccgccgcgcccggggccggctcccccgctagcgcccgcgtcccgcgccccgccgccgccgccgccgccgccgccgggtcgcccctggcccggcgcgcccgtccccggcagcgacaatgagtgaacagagtatctgccaagcccgggcttccgtgatggtctacgatgacaccagtaagaaatgggtaccaatcaaacctggccagcagggattcagccggatcaacatctaccacaacactgccagcaacaccttcagagtcgttggagtcaagttgcaggatcagcaggttgtgatcaattattcaatcgtgaaagggctgaagtacaatcaggccacgccaaccttccaccagtggcgagatgcccgccaggtctacggcttaaactttgcaagtaaagaagaggcaaccacgttctccaatgcaatgctgtttgccctgaacatcatgaattcccaagaaggaggcccctccagccagcgtcaggtgcagaatggcccctctcctgatgagatggacatccagagaagacaagtgatggagcagcaccagcagcagcgtcaggaatctctagaaagaagaacctcggccacagggcccatcctcccaccaggacatccttcatctgcagccagcgcccccgtctcatgtagtgggcctccaccgccccccccacccccagtcccacctccacccactggggctaccccacctcccccacccccactgccagccggaggagcccaggggtccagccacgacgagagctccatgtcaggactggccgctgccatagctggggccaagctgagaagagtccaacggccagaagacgcatctggaggctccagtcccagtgggacctcaaagtccgatgccaaccgggcaagcagcgggggtggcggaggaggcctcatggaggaaatgaacaaactgctggccaagaggagaaaagcagcctcccagtcagacaagccagccgagaagaaggaagatgaaagccaaatggaagatcctagtacctccccctctccggggacccgagcagccagccagccacctaactcctcagaggctggccggaagccctgggagcggagcaactcggtggagaagcctgtgtcctcgattctgtccagaaccccgtctgtggcaaagagccccgaagctaagagcccccttcagtcgcagcctcactctaggtaccgaacaaccctcctgctcacatgtcccccagggtttggggctcctctgtcccccgtcccgtgactaacacccttgcacgctgtctcacgtcctggcatttaacaacttgctctgcgaaggtggtctgttctttcagacccaggacctcggggtcctgtcagtcagctgctccgtcttttccctctgagagagagaccaagggcaaggagggcagtgacctgtccacagaggtagtgcaggggggggccaacatggagtcccagctctggactcactacgtgtgacagtgggcaagttaggggacctctccaagcctctgttttccccccacaaagtgaggtctgttaacccctgctgcacagggtggtggtggggacagctgtgagcaacagctggacatggggtgtggtcactagccagggctgcaccctacagttcaaccagtcctagcactggcgctgagccctacccctttcctccagcccagagtccttcctctgcggccggcacacagaatcagtttccccacagacatactgaccatatttcccaagccaaaagctggcatgacaacatgatagaatatttggaactgagattgcccaaaaaggcagaggcagccagccacatagtatctggaggtacatgtggcctgaattggaaggcctctagaacctgcgtcaagaatgtctccatcgccaccacaaattgaagggaaaccacccttatcacagagcaggaggcattgaaactggccttgcagagctgaacaggtggtgagagcagagcagtgcaggtggacagagatgaggaagtcttagcagtcagctggggtttgtccaaggcttgtggtcagccaggccgtgtgctggggacagtccctgcctgcaaagagcaccgtgtgaacaaggccactgtggtcctgaggggtgctctggacagggtgcagggccacatggtggaagggacagggtgctttgcggagtggggtggggcaagcctctgtcgggagctggcattttcgttgacccggacgaggaggagtctgctctgcggagatcatggggacagcctcccaagctgaaggaagggtaagtgccagggccctgagcctgcagccacccgccaagctcccccgcacctccacctggaagcagacaggccatggggcaggggaacgggaagggtgaggaagagggtgtgggggagcgcggagttagaagtttgcattgtgttcatgcgcagggcccagtcatggaacttgaggcacagggtgccatggtggaggctgggaaggggaaggcaaccagagtgggcaaaacgagggccctggagcagacacggcagcaaggggagcctgcagcgctcccagcggactccgccacgtcctgctggtggagcaaaggcgggctgccatgttgtgagtggccaagggtcgctcactgggcaggaacattgtcaaggccattcatgcttggaatagggtctctcttcagctctgaggcaaatctgttctctaattttcagatgacttcaaggggaacgtgtaccaccacccctctggtgcgtcacattgcttaggaagcctgctgtgtttatcactgggtggctgtcagggctgagatggagagggccagggcctggcgaggtggagcagtcggcccaggtgtcccagcaattgttgctggaacagggtctggaacccacaggagaggcctgaaggacccagggccctctggctggatgcgtttgcctatcaggacccagaattacttacagacctgtttagggctaggcttggcctctttcttgagctcatctggaggggtgtggcaacactcattcttcatccttattctccctggctgtgggcaacactggtcctcagtgtcaccagatggtcctcctctgtgcccatgacccctcagcagccaaggctggccctgccagataaatgtgtgtgcccatgatcacacccaggggcacaggccacatacgtttccctgaaaccttgggctccagcctccatcccgtccatgtgggagggaacttgggtcccagcagtgtgtctttcagcaccaagtcatgtttaaaagaccagagagacaagcattttgccaagatcttccagggaagatgcatgtgtgacacattaacattcaaatcaggccagcgcggtgctcatgcctgtcatcccagcactttgggaggccgaggcgggaggatcacttgagcccaggacttggagaccagtctgggcaacacagtgagaccccatctctacaaaaagttaaaaaagaaaaaaaaaagggcacatgtctgtagtcccagctactcgggaggctcacttgagcctgggaggttgaggctgcagtgaggcatgatacgcctctgtactccagcctggttgacagagtgagaccctgtctcaaataagtaaaaataaaattcaaatcggttaccttagtttggaaacttttcaaagaagtagtccacgagaactaccttgaaagagcaaaaccagccaggtgcagtggctcacgcccataatcccagcactctgggaggcccaggtgggtggatctcgtgaggtcaggagttcaagaccagcttggccaacatggtgaaaccccatctctgctgaaaatacaaaagttagctgaaaatacaaaagtggcacatgcctgtaatgccagctactggggaggctgaggtaggagaattgcttgaacctgggaggcagaggttgcagtgagccaagattgcgccattgcactccaatctggggaacaagagcaaaactctgtctgaaaaaaaaaaagcgacaccacatgggaggatgtttcttgggggaggtgtgctatgcccgagcaggctccagcaccaggggcgctggtgtgtcaggagcgcgcctccaggccggtgtgaactctgcaacttcacattgtgcctcctgccgccgctgctgcttccccgagccccaagctcaacctggagcatgagctcccaccctgaggaggaggctgtcaatactgtgtttctttccagggaggcaacgggtgggtgcgatgttgtcacttaagttgccacctctgcataagagctctctgatcagaaagcagtttctttgttgaccccagccagccttggctctcgggttgggaaatacagtcacggtatccatggagacctcttgaggtggagacgggcgttaaacccttctcaggcagtctgaggtggccagagtctgaagcaagcagcctctatggagcgaggggagcaggtgggcccagcctgagcggggcctctgcacagccagctttcccccacacctgtctccagccagggcacccacaggccctttctctcccagggatgaagcctgctgggagcgtgaatgacatggccctggatgccttcgacttggaccggatgaagcaggagatcctagaggaggtggtgagagagctccacaaggtgaaggaggagatcatcgacgccatcaggcaggagctgagtgggatcagcaccacgtaaggggccggcctcgctgcgctgattcgtcgagcccatccggcgacagaggacagccagaagcccagccagccccagactccagtgcaccagagcacgcacaggagcctgggcgcgctgctgtgaaacgtcctgacctgtgatcacacatgacagtgaggaaaccaagtgcaactcctgggtttttttagattctgcctgacacggaacaccaggtctgctcgtcttttttgtgttttatatttgcttatttaaggtacatttctttgggtttctagagacgcccctaagtcacctgcttcattagacggtttccaggttttctcccaggtgacgctgttagcgcctcagctggcggtgacagccggcccagcgtggcgccaccacacaccgcagagctgtccaggcacagctccgtccccagcgctcatggtgttgaaactgtctgtcatgcaccacggtgtctgtgtccacacagtaataaacggtttactgtccgca

SEQ ID NO: 424990 - DNA, 5449 bp, Homo sapiens
  misc_feature (19)..(19): n is a, c, g, or t
  misc_feature (22)..(22): n is a, c, g, or t
  misc_feature (27)..(27): n is a, c, g, or t
  misc_feature (37)..(37): n is a, c, g, or t
  misc_feature (44)..(44): n is a, c, g, or t
  misc_feature (66)..(66): n is a, c, g, or t
  misc_feature (70)..(70): n is a, c, g, or t
cgatcttccttccggagcncgncagcntatatatcantcaagtnactccttctgacatggctccgnaagnaagatcgcgagtccggaggatggacaaagtaaggaagatgccacgggaatatggcggcggcggcggcgagtccggactaggcccgaagcgcgcgaccgcctgatcaacataggctggtgggagtacaggactcgcctcctcagggttccctgtgctgccacttttcagccatggccacaagtgaacagagtatctgccaagcccgggcttccgtgatggtctacgatgacaccagtaagaaatgggtaccaatcaaacctggccagcagggattcagccggatcaacatctaccacaacactgccagcaacaccttcagagtcgttggagtcaagttgcaggatcagcaggttgtgatcaattattcaatcgtgaaagggctgaagtacaatcaggccacgccaaccttccaccagtggcgagatgcccgccaggtctacggcttaaactttgcaagtaaagaagaggcaaccacgttctccaatgcaatgctgtttgccctgaacatcatgaattcccaagaaggaggtgcgtgcatcctctaatgacaaagcaaccttgtatttccttccacaaatgaatggaggcagcctaacgtcatgtggcccctccagccagcgtcaggtgcagaatggcccctctcctgatgagatggacatccagagaagacaagtgatggagcagcaccagcagcagcgtcaggaatctctagaaagaagaacctcggccacagggcccatcctcccaccaggacatccttcatctgcagccagcgcccccgtctcatgtagtgggcctccaccgccccccccacccccagtcccacctccacccactggggctaccccacctcccccacccccactgccagccggaggagcccaggggtccagccacgacgagagctccatgtcaggactggccgctgccatagctggggccaagctgagaagagtccaacggccagaagacgcatctggaggctccagtcccagtgggacctcaaagtccgatgccaaccgggcaagcagcgggggtggcggaggaggcctcatggaggaaatgaacaaactgctggccaagaggagaaaagcagcctcccagtcagacaagccagccgagaagaaggaagatgaaagccaaatggaagatcctagtacctccccctctccggggacccgagcagccagccagccacctaactcctcagaggctggccggaagccctgggagcggagcaactcggtggagaagcctgtgtcctcgattctgtccagaaccccgtctgtggcaaagagccccgaagctaagagcccccttcagtcgcagcctcactctaggtaccgaacaaccctcctgctcacatgtcccccagggtttggggctcctctgtcccccgtcccgtgactaacacccttgcacgctgtctcacgtcctggcatttaacaacttgctctgcgaaggtggtctgttctttcagacccaggacctcggggtcctgtcagtcagctgctccgtcttttccctctgagagagagaccaagggcaaggagggcagtgacctgtccacagaggtagtgcaggggggggccaacatggagtcccagctctggactcactacgtgtgacagtgggcaagttaggggacctctccaagcctctgttttccccccacaaagtgaggtctgttaacccctgctgcacagggtggtggtggggacagctgtgagcaacagctggacatggggtgtggtcactagccagggctgcaccctacagttcaaccagtcctagcactggcgctgagccctacccctttcctccagcccagagtccttcctctgcggccggcacacagaatcagtttccccacagacatactgaccatatttcccaagccaaaagctggcatgacaacatgatagaatatttggaactgagattgcccaaaaaggcagaggcagccagccacatagtatctggaggtacatgtggcctgaattggaaggcctctagaacctgcgtcaagaatgtctccatcgccaccacaaattgaagggaaaccacccttatcacagagcaggaggcattgaaactggccttgcagagctgaacaggtggtgagagcagagcagtgcaggtggacagagatgaggaagtcttagcagtcagctggggtttgtccaaggcttgtggtcagccaggccgtgtgctggggacagtccctgcctgcaaagagcaccgtgtgaacaaggccactgtggtcctgaggggtgctctggacagggtgcagggccacatggtggaagggacagggtgctttgcggagtggggtggggcaagcctctgtcgggagctggcattttcgttgacccggacgaggaggagtctgctctgcggagatcatggggacagcctcccaagctgaaggaagggtaagtgccagggccctgagcctgcagccacccgccaagctcccccgcacctccacctggaagcagacaggccatggggcaggggaacgggaagggtgaggaagagggtgtgggggagcgcggagttagaagtttgcattgtgttcatgcgcagggcccagtcatggaacttgaggcacagggtgccatggtggaggctgggaaggggaaggcaaccagagtgggcaaaacgagggccctggagcagacacggcagcaaggggagcctgcagcgctcccagcggactccgccacgtcctgctggtggagcaaaggcgggctgccatgttgtgagtggccaagggtcgctcactgggcaggaacattgtcaaggccattcatgcttggaatagggtctctcttcagctctgaggcaaatctgttctctaattttcagatgacttcaaggggaacgtgtaccaccacccctctggtgcgtcacattgcttaggaagcctgctgtgtttatcactgggtggctgtcagggctgagatggagagggccagggcctggcgaggtggagcagtcggcccaggtgtcccagcaattgttgctggaacagggtctggaacccacaggagaggcctgaaggacccagggccctctggctggatgcgtttgcctatcaggacccagaattacttacagacctgtttagggctaggcttggcctctttcttgagctcatctggaggggtgtggcaacactcattcttcatccttattctccctggctgtgggcaacactggtcctcagtgtcaccagatggtcctcctctgtgcccatgacccctcagcagccaaggctggccctgccagataaatgtgtgtgcccatgatcacacccaggggcacaggccacatacgtttccctgaaaccttgggctccagcctccatcccgtccatgtgggagggaacttgggtcccagcagtgtgtctttcagcaccaagtcatgtttaaaagaccagagagacaagcattttgccaagatcttccagggaagatgcatgtgtgacacattaacattcaaatcaggccagcgcggtgctcatgcctgtcatcccagcactttgggaggccgaggcgggaggatcacttgagcccaggacttggagaccagtctgggcaacacagtgagaccccatctctacaaaaagttaaaaaagaaaaaaaaaagggcacatgtctgtagtcccagctactcgggaggctcacttgagcctgggaggttgaggctgcagtgaggcatgatacgcctctgtactccagcctggttgacagagtgagaccctgtctcaaataagtaaaaataaaattcaaatcggttaccttagtttggaaacttttcaaagaagtagtccacgagaactaccttgaaagagcaaaaccagccaggtgcagtggctcacgcccataatcccagcactctgggaggcccaggtgggtggatctcgtgaggtcaggagttcaagaccagcttggccaacatggtgaaaccccatctctgctgaaaatacaaaagttagctgaaaatacaaaagtggcacatgcctgtaatgccagctactggggaggctgaggtaggagaattgcttgaacctgggaggcagaggttgcagtgagccaagattgcgccattgcactccaatctggggaacaagagcaaaactctgtctgaaaaaaaaaaagcgacaccacatgggaggatgtttcttgggggaggtgtgctatgcccgagcaggctccagcaccaggggcgctggtgtgtcaggagcgcgcctccaggccggtgtgaactctgcaacttcacattgtgcctcctgccgccgctgctgcttccccgagccccaagctcaacctggagcatgagctcccaccctgaggaggaggctgtcaatactgtgtttctttccagggaggcaacgggtgggtgcgatgttgtcacttaagttgccacctctgcataagagctctctgatcagaaagcagtttctttgttgaccccagccagccttggctctcgggttgggaaatacagtcacggtatccatggagacctcttgaggtggagacgggcgttaaacccttctcaggcagtctgaggtggccagagtctgaagcaagcagcctctatggagcgaggggagcaggtgggcccagcctgagcggggcctctgcacagccagctttcccccacacctgtctccagccagggcacccacaggccctttctctcccagggatgaagcctgctgggagcgtgaatgacatggccctggatgccttcgacttggaccggatgaagcaggagatcctagaggaggtggtgagagagctccacaaggtgaaggaggagatcatcgacgccatcaggcaggagctgagtgggatcagcaccacgtaaggggccggcctcgctgcgctgattcgtcgagcccatccggcgacagaggacagccagaagcccagccagccccagactccagtgcaccagagcacgcacaggagcctgggcgcgctgctgtgaaacgtcctgacctgtgatcacacatgacagtgaggaaaccaagtgcaactcctgggtttttttagattctgcctgacacggaacaccaggtctgctcgtcttttttgtgttttatatttgcttatttaaggtacatttctttgggtttctagagacgcccctaagtcacctgcttcattagacggtttccaggttttctcccaggtgacgctgttagcgcctcagctggcggtgacagccggcccagcgtggcgccaccacacaccgcagagctgtccaggcacagctccgtccccagcgctcatggtgttgaaactgtctgtcatgcaccacggtgtctgtgtccacacagtaataaacggtttactgtccgca

SEQ ID NO: 424991 - DNA, 5295 bp, Homo sapiens
  misc_feature (19)..(19): n is a, c, g, or t
  misc_feature (22)..(22): n is a, c, g, or t
  misc_feature (27)..(27): n is a, c, g, or t
  misc_feature (37)..(37): n is a, c, g, or t
  misc_feature (44)..(44): n is a, c, g, or t
  misc_feature (66)..(66): n is a, c, g, or t
  misc_feature (70)..(70): n is a, c, g, or t
cgatcttccttccggagcncgncagcntatatatcantcaagtnactccttctgacatggctccgnaagnaagatcgcgagtccggaggatggacaaagtaaggaagatgccacgggaatatggcggcggcggcggcgagtccggactaggcccgaagcgcgcgaccgcctgatcaacataggctggtgggagtacaggactcgcctcctcagggttccctgtgctgccacttttcagccatggccacaagtgaacagagtatctgccaagcccgggcttccgtgatggtctacgatgacaccagtaagaaatgggtaccaatcaaacctggccagcagggattcagccggatcaacatctaccacaacactgccagcaacaccttcagagtcgttggagtcaagttgcaggatcagcaggttgtgatcaattattcaatcgtgaaagggctgaagtacaatcaggccacgccaaccttccaccagtggcgagatgcccgccaggtctacggcttaaactttgcaagtaaagaagaggcaaccacgttctccaatgcaatgctgtttgccctgaacatcatgaattcccaagaaggaggcccctccagccagcgtcaggtgcagaatggcccctctcctgatgagatggacatccagagaagacaagtgatggagcagcaccagcagcagcgtcaggaatctctagaaagaagaacctcggccacagggcccatcctcccaccaggacatccttcatctgcagccagcgcccccgtctcatgtagtgggcctccaccgccccccccacccccagtcccacctccacccactggggctaccccacctcccccacccccactgccagccggaggagcccaggggtccagccacgacgagagctccatgtcaggactggccgctgccatagctggggccaagctgagaagagtccaacggccagaagacgcatctggaggctccagtcccagtgggacctcaaagtccgatgccaaccgggcaagcagcgggggtggcggaggaggcctcatggaggaaatgaacaaactgctggccaagagagaaaagcagcctcccagtcagacaagccagccacctaactcctcagaggctggccggaagccctgggagcggagcaactcggtggagaagcctgtgtcctcgattctgtccagaaccccgtctgtggcaaagagccccgaagctaagagcccccttcagtcgcagcctcactctaggtaccgaacaaccctcctgctcacatgtcccccagggtttggggctcctctgtcccccgtcccgtgactaacacccttgcacgctgtctcacgtcctggcatttaacaacttgctctgcgaaggtggtctgttctttcagacccaggacctcggggtcctgtcagtcagctgctccgtcttttccctctgagagagagaccaagggcaaggagggcagtgacctgtccacagaggtagtgcaggggggggccaacatggagtcccagctctggactcactacgtgtgacagtgggcaagttaggggacctctccaagcctctgttttccccccacaaagtgaggtctgttaacccctgctgcacagggtggtggtggggacagctgtgagcaacagctggacatggggtgtggtcactagccagggctgcaccctacagttcaaccagtcctagcactggcgctgagccctacccctttcctccagcccagagtccttcctctgcggccggcacacagaatcagtttccccacagacatactgaccatatttcccaagccaaaagctggcatgacaacatgatagaatatttggaactgagattgcccaaaaaggcagaggcagccagccacatagtatctggaggtacatgtggcctgaattggaaggcctctagaacctgcgtcaagaatgtctccatcgccaccacaaattgaagggaaaccacccttatcacagagcaggaggcattgaaactggccttgcagagctgaacaggtggtgagagcagagcagtgcaggtggacagagatgaggaagtcttagcagtcagctggggtttgtccaaggcttgtggtcagccaggccgtgtgctggggacagtccctgcctgcaaagagcaccgtgtgaacaaggccactgtggtcctgaggggtgctctggacagggtgcagggccacatggtggaagggacagggtgctttgcggagtggggtggggcaagcctctgtcgggagctggcattttcgttgacccggacgaggaggagtctgctctgcggagatcatggggacagcctcccaagctgaaggaagggtaagtgccagggccctgagcctgcagccacccgccaagctcccccgcacctccacctggaagcagacaggccatggggcaggggaacgggaagggtgaggaagagggtgtgggggagcgcggagttagaagtttgcattgtgttcatgcgcagggcccagtcatggaacttgaggcacagggtgccatggtggaggctgggaaggggaaggcaaccagagtgggcaaaacgagggccctggagcagacacggcagcaaggggagcctgcagcgctcccagcggactccgccacgtcctgctggtggagcaaaggcgggctgccatgttgtgagtggccaagggtcgctcactgggcaggaacattgtcaaggccattcatgcttggaatagggtctctcttcagctctgaggcaaatctgttctctaattttcagatgacttcaaggggaacgtgtaccaccacccctctggtgcgtcacattgcttaggaagcctgctgtgtttatcactgggtggctgtcagggctgagatggagagggccagggcctggcgaggtggagcagtcggcccaggtgtcccagcaattgttgctggaacagggtctggaacccacaggagaggcctgaaggacccagggccctctggctggatgcgtttgcctatcaggacccagaattacttacagacctgtttagggctaggcttggcctctttcttgagctcatctggaggggtgtggcaacactcattcttcatccttattctccctggctgtgggcaacactggtcctcagtgtcaccagatggtcctcctctgtgcccatgacccctcagcagccaaggctggccctgccagataaatgtgtgtgcccatgatcacacccaggggcacaggccacatacgtttccctgaaaccttgggctccagcctccatcccgtccatgtgggagggaacttgggtcccagcagtgtgtctttcagcaccaagtcatgtttaaaagaccagagagacaagcattttgccaagatcttccagggaagatgcatgtgtgacacattaacattcaaatcaggccagcgcggtgctcatgcctgtcatcccagcactttgggaggccgaggcgggaggatcacttgagcccaggacttggagaccagtctgggcaacacagtgagaccccatctctacaaaaagttaaaaaagaaaaaaaaaagggcacatgtctgtagtcccagctactcgggaggctcacttgagcctgggaggttgaggctgcagtgaggcatgatacgcctctgtactccagcctggttgacagagtgagaccctgtctcaaataagtaaaaataaaattcaaatcggttaccttagtttggaaacttttcaaagaagtagtccacgagaactaccttgaaagagcaaaaccagccaggtgcagtggctcacgcccataatcccagcactctgggaggcccaggtgggtggatctcgtgaggtcaggagttcaagaccagcttggccaacatggtgaaaccccatctctgctgaaaatacaaaagttagctgaaaatacaaaagtggcacatgcctgtaatgccagctactggggaggctgaggtaggagaattgcttgaacctgggaggcagaggttgcagtgagccaagattgcgccattgcactccaatctggggaacaagagcaaaactctgtctgaaaaaaaaaaagcgacaccacatgggaggatgtttcttgggggaggtgtgctatgcccgagcaggctccagcaccaggggcgctggtgtgtcaggagcgcgcctccaggccggtgtgaactctgcaacttcacattgtgcctcctgccgccgctgctgcttccccgagccccaagctcaacctggagcatgagctcccaccctgaggaggaggctgtcaatactgtgtttctttccagggaggcaacgggtgggtgcgatgttgtcacttaagttgccacctctgcataagagctctctgatcagaaagcagtttctttgttgaccccagccagccttggctctcgggttgggaaatacagtcacggtatccatggagacctcttgaggtggagacgggcgttaaacccttctcaggcagtctgaggtggccagagtctgaagcaagcagcctctatggagcgaggggagcaggtgggcccagcctgagcggggcctctgcacagccagctttcccccacacctgtctccagccagggcacccacaggccctttctctcccagggatgaagcctgctgggagcgtgaatgacatggccctggatgccttcgacttggaccggatgaagcaggagatcctagaggaggtggtgagagagctccacaaggtgaaggaggagatcatcgacgccatcaggcaggagctgagtgggatcagcaccacgtaaggggccggcctcgctgcgctgattcgtcgagcccatccggcgacagaggacagccagaagcccagccagccccagactccagtgcaccagagcacgcacaggagcctgggcgcgctgctgtgaaacgtcctgacctgtgatcacacatgacagtgaggaaaccaagtgcaactcctgggtttttttagattctgcctgacacggaacaccaggtctgctcgtcttttttgtgttttatatttgcttatttaaggtacatttctttgggtttctagagacgcccctaagtcacctgcttcattagacggtttccaggttttctcccaggtgacgctgttagcgcctcagctggcggtgacagccggcccagcgtggcgccaccacacaccgcagagctgtccaggcacagctccgtccccagcgctcatggtgttgaaactgtctgtcatgcaccacggtgtctgtgtccacacagtaataaacggtttactgtccgca

SEQ ID NO: 424992 - DNA, 4682 bp, Homo sapiens
cggcagcacatatactaaaattgggaacgatacagagaagattagcatggcccctgcgcaaggatgacacgcaaattcgtgaagcgttccatattttgcctccaccgccccccccacccccagtcccacctccacccactggggctaccccacctcccccacccccactgccagccggaggagcccaggggtccagccacgacgagagctccatgtcaggactggccgctgccatagctggggccaagctgagaagagtccaacggccagaagacgcatctggaggctccagtcccagtgggacctcaaagtccgatgccaaccgggcaagcagcgggggtggcggaggaggcctcatggaggaaatgaacaaactgctggccaagaggagaaaagcagcctcccagtcagacaagccagccgagaagaaggaagatgaaagccaaatggaagatcctagtacctccccctctccggggacccgagcagccagccagccacctaactcctcagaggctggccggaagccctgggagcggagcaactcggtggagaagcctgtgtcctcgattctgtccagaaccccgtctgtggcaaagagccccgaagctaagagcccccttcagtcgcagcctcactctaggtaccgaacaaccctcctgctcacatgtcccccagggtttggggctcctctgtcccccgtcccgtgactaacacccttgcacgctgtctcacgtcctggcatttaacaacttgctctgcgaaggtggtctgttctttcagacccaggacctcggggtcctgtcagtcagctgctccgtcttttccctctgagagagagaccaagggcaaggagggcagtgacctgtccacagaggtagtgcaggggggggccaacatggagtcccagctctggactcactacgtgtgacagtgggcaagttaggggacctctccaagcctctgttttccccccacaaagtgaggtctgttaacccctgctgcacagggtggtggtggggacagctgtgagcaacagctggacatggggtgtggtcactagccagggctgcaccctacagttcaaccagtcctagcactggcgctgagccctacccctttcctccagcccagagtccttcctctgcggccggcacacagaatcagtttccccacagacatactgaccatatttcccaagccaaaagctggcatgacaacatgatagaatatttggaactgagattgcccaaaaaggcagaggcagccagccacatagtatctggaggtacatgtggcctgaattggaaggcctctagaacctgcgtcaagaatgtctccatcgccaccacaaattgaagggaaaccacccttatcacagagcaggaggcattgaaactggccttgcagagctgaacaggtggtgagagcagagcagtgcaggtggacagagatgaggaagtcttagcagtcagctggggtttgtccaaggcttgtggtcagccaggccgtgtgctggggacagtccctgcctgcaaagagcaccgtgtgaacaaggccactgtggtcctgaggggtgctctggacagggtgcagggccacatggtggaagggacagggtgctttgcggagtggggtggggcaagcctctgtcgggagctggcattttcgttgacccggacgaggaggagtctgctctgcggagatcatggggacagcctcccaagctgaaggaagggtaagtgccagggccctgagcctgcagccacccgccaagctcccccgcacctccacctggaagcagacaggccatggggcaggggaacgggaagggtgaggaagagggtgtgggggagcgcggagttagaagtttgcattgtgttcatgcgcagggcccagtcatggaacttgaggcacagggtgccatggtggaggctgggaaggggaaggcaaccagagtgggcaaaacgagggccctggagcagacacggcagcaaggggagcctgcagcgctcccagcggactccgccacgtcctgctggtggagcaaaggcgggctgccatgttgtgagtggccaagggtcgctcactgggcaggaacattgtcaaggccattcatgcttggaatagggtctctcttcagctctgaggcaaatctgttctctaattttcagatgacttcaaggggaacgtgtaccaccacccctctggtgcgtcacattgcttaggaagcctgctgtgtttatcactgggtggctgtcagggctgagatggagagggccagggcctggcgaggtggagcagtcggcccaggtgtcccagcaattgttgctggaacagggtctggaacccacaggagaggcctgaaggacccagggccctctggctggatgcgtttgcctatcaggacccagaattacttacagacctgtttagggctaggcttggcctctttcttgagctcatctggaggggtgtggcaacactcattcttcatccttattctccctggctgtgggcaacactggtcctcagtgtcaccagatggtcctcctctgtgcccatgacccctcagcagccaaggctggccctgccagataaatgtgtgtgcccatgatcacacccaggggcacaggccacatacgtttccctgaaaccttgggctccagcctccatcccgtccatgtgggagggaacttgggtcccagcagtgtgtctttcagcaccaagtcatgtttaaaagaccagagagacaagcattttgccaagatcttccagggaagatgcatgtgtgacacattaacattcaaatcaggccagcgcggtgctcatgcctgtcatcccagcactttgggaggccgaggcgggaggatcacttgagcccaggacttggagaccagtctgggcaacacagtgagaccccatctctacaaaaagttaaaaaagaaaaaaaaaagggcacatgtctgtagtcccagctactcgggaggctcacttgagcctgggaggttgaggctgcagtgaggcatgatacgcctctgtactccagcctggttgacagagtgagaccctgtctcaaataagtaaaaataaaattcaaatcggttaccttagtttggaaacttttcaaagaagtagtccacgagaactaccttgaaagagcaaaaccagccaggtgcagtggctcacgcccataatcccagcactctgggaggcccaggtgggtggatctcgtgaggtcaggagttcaagaccagcttggccaacatggtgaaaccccatctctgctgaaaatacaaaagttagctgaaaatacaaaagtggcacatgcctgtaatgccagctactggggaggctgaggtaggagaattgcttgaacctgggaggcagaggttgcagtgagccaagattgcgccattgcactccaatctggggaacaagagcaaaactctgtctgaaaaaaaaaaagcgacaccacatgggaggatgtttcttgggggaggtgtgctatgcccgagcaggctccagcaccaggggcgctggtgtgtcaggagcgcgcctccaggccggtgtgaactctgcaacttcacattgtgcctcctgccgccgctgctgcttccccgagccccaagctcaacctggagcatgagctcccaccctgaggaggaggctgtcaatactgtgtttctttccagggaggcaacgggtgggtgcgatgttgtcacttaagttgccacctctgcataagagctctctgatcagaaagcagtttctttgttgaccccagccagccttggctctcgggttgggaaatacagtcacggtatccatggagacctcttgaggtggagacgggcgttaaacccttctcaggcagtctgaggtggccagagtctgaagcaagcagcctctatggagcgaggggagcaggtgggcccagcctgagcggggcctctgcacagccagctttcccccacacctgtctccagccagggcacccacaggccctttctctcccagggatgaagcctgctgggagcgtgaatgacatggccctggatgccttcgacttggaccggatgaagcaggagatcctagaggaggtggtgagagagctccacaaggtgaaggaggagatcatcgacgccatcaggcaggagctgagtgggatcagcaccacgtaaggggccggcctcgctgcgctgattcgtcgagcccatccggcgacagaggacagccagaagcccagccagccccagactccagtgcaccagagcacgcacaggagcctgggcgcgctgctgtgaaacgtcctgacctgtgatcacacatgacagtgaggaaaccaagtgcaactcctgggtttttttagattctgcctgacacggaacaccaggtctgctcgtcttttttgtgttttatatttgcttatttaaggtacatttctttgggtttctagagacgcccctaagtcacctgcttcattagacggtttccaggttttctcccaggtgacgctgttagcgcctcagctggcggtgacagccggcccagcgtggcgccaccacacaccgcagagctgtccaggcacagctccgtccccagcgctcatggtgttgaaactgtctgtcatgcaccacggtgtctgtgtccacacagtaataaacggtttactgtccgca

SEQ ID NO: 424993 - DNA, 3562 bp, Homo sapiens
  misc_feature (19)..(19): n is a, c, g, or t
  misc_feature (22)..(22): n is a, c, g, or t
  misc_feature (27)..(27): n is a, c, g, or t
  misc_feature (37)..(37): n is a, c, g, or t
  misc_feature (44)..(44): n is a, c, g, or t
  misc_feature (66)..(66): n is a, c, g, or t
  misc_feature (70)..(70): n is a, c, g, or t
cgatcttccttccggagcncgncagcntatatatcantcaagtnactccttctgacatggctccgnaagnaagatcgcgagtccggaggatggacaaagtaaggaagatgccacgggaatatggcggcggcggcggcgagtccggactaggcccgaagcgcgcgaccgcctgatcaacataggctggtgggagtacaggactcgcctcctcagggttccctgtgctgccacttttcagccatggccacaagtgaacagagtatctgccaagcccgggcttccgtgatggtctacgatgacaccagtaagaaatgggtaccaatcaaacctggccagcagggattcagccggatcaacatctaccacaacactgccagcaacaccttcagagtcgttggagtcaagttgcaggatcagcaggttgtgatcaattattcaatcgtgaaagggctgaagtacaatcaggccacgccaaccttccaccagtggcgagatgcccgccaggtctacggcttaaactttgcaagtaaagaagaggcaaccacgttctccaatgcaatgctgtttgccctgaacatcatgaattcccaagaaggaggcccctccagccagcgtcaggtgcagaatggcccctctcctgatgagatggacatccagagaagacaagtgatggagcagcaccagcagcagcgtcaggaatctctagaaagaagaacctcggccacagggcccatcctcccaccaggacatccttcatctgcagccagcgcccccgtctcatgtagtgggcctccaccgccccccccacccccagtcccacctccacccactggggctaccccacctcccccacccccactgccagccggaggagcccaggggtccagccacgacgagagctccatgtcaggactggccgctgccatagctggggccaagctgagaagagtccaacggccagaagacgcatctggaggctccagtcccagtgggacctcaaagtccgatgccaaccgggcaagcagcgggggtggcggaggaggcctcatggaggaaatgaacaaactgctggccaagaggagaaaagcagcctcccagtcagacaagccagccgagaagaaggaagatgaaagccaaatggaagatcctagtacctccccctctccggggacccgagcagccagccagccacctaactcctcagaggctggccggaagccctgggagcggagcaactcggtggagaagcctgtgtcctcgattctgtccagaaccccgtctgtggcaaagagccccgaagctaagagcccccttcagtcgcagcctcactctaggtaccgaacaaccctcctgctcacatgtcccccagggtttggggctcctctgtcccccgtcccgtgactaacacccttgcacgctgtctcacgtcctggcatttaacaacttgctctgcgaaggtggtctgttctttcagacccaggacctcggggtcctgtcagtcagctgctccgtcttttccctctgagagagagaccaagggcaaggagggcagtgacctgtccacagaggtagtgcaggggggggccaacatggagtcccagctctggactcactacgtgtgacagtgggcaagttaggggacctctccaagcctctgttttccccccacaaagtgaggtctgttaacccctgctgcacagggtggtggtggggacagctgtgagcaacagctggacatggggtgtggtcactagccagggctgcaccctacagttcaaccagtcctagcactggcgctgagccctacccctttcctccagcccagagtccttcctctgcggccggcacacagaatcagtttccccacagacatactgaccatatttcccaagccaaaagctggcatgacaacatgatagaatatttggaactgagattgcccaaaaaggcagaggcagccagccacatagtatctggaggtacatgtggcctgaattggaaggcctctagaacctgcgtcaagaatgtctccatcgccaccacaaattgaagggaaaccacccttatcacagagcaggaggcattgaaactggccttgcagagctgaacaggtggtgagagcagagcagtgcaggtggacagagatgaggaagtcttagcagtcagctggggtttgtccaaggcttgtggtcagccaggccgtgtgctggggacagtccctgcctgcaaagagcaccgtgtgaacaaggccactgtggtcctgaggggtgctctggacagggtgcagggccacatggtggaagggacagggtgctttgcggagtggggtggggcaagcctctgtcgggagctggcattttcgttgacccggacgaggaggagtctgctctgcggagatcatggggacagcctcccaagctgaaggaagggtaagtgccagggccctgagcctgcagccacccgccaagctcccccgcacctccacctggaagcagacaggccatggggcaggggaacgggaagggtgaggaagagggtgtgggggagcgcggagttagaagtttgcattgtgttcatgcgcagggcccagtcatggaacttgaggcacagggtgccatggtggaggctgggaaggggaaggcaaccagagtgggcaaaacgagggccctggagcagacacggcagcaaggggagcctgcagcgctcccagcggactccgccacgtcctgctggtggagcaaaggcgggctgccatgttgtgagtggccaagggtcgctcactgggcaggaacattgtcaaggccattcatgcttggaatagggtctctcttcagctctgaggcaaatctgttctctaattttcagatgacttcaaggggaacgtgtaccaccacccctctggatgaagcctgctgggagcgtgaatgacatggccctggatgccttcgacttggaccggatgaagcaggagatcctagaggaggtggtgagagagctccacaaggtgaaggaggagatcatcgacgccatcaggcaggagctgagtgggatcagcaccacgtaaggggccggcctcgctgcgctgattcgtcgagcccatccggcgacagaggacagccagaagcccagccagccccagactccagtgcaccagagcacgcacaggagcctgggcgcgctgctgtgaaacgtcctgacctgtgatcacacatgacagtgaggaaaccaagtgcaactcctgggtttttttagattctgcctgacacggaacaccaggtctgctcgtcttttttgtgttttatatttgcttatttaaggtacatttctttgggtttctagagacgcccctaagtcacctgcttcattagacggtttccaggttttctcccaggtgacgctgttagcgcctcagctggcggtgacagccggcccagcgtggcgccaccacacaccgcagagctgtccaggcacagctccgtccccagcgctcatggtgttgaaactgtctgtcatgcaccacggtgtctgtgtccacacagtaataaacggtttactgtccgca

SEQ ID NO: 424994 - DNA, 3090 bp, Homo sapiens
  misc_feature (19)..(19): n is a, c, g, or t
  misc_feature (22)..(22): n is a, c, g, or t
  misc_feature (27)..(27): n is a, c, g, or t
  misc_feature (37)..(37): n is a, c, g, or t
  misc_feature (44)..(44): n is a, c, g, or t
  misc_feature (66)..(66): n is a, c, g, or t
  misc_feature (70)..(70): n is a, c, g, or t
cgatcttccttccggagcncgncagcntatatatcantcaagtnactccttctgacatggctccgnaagnaagatcgcgagtccggaggatggacaaagtaaggaagatgccacgggaatatggcggcggcggcggcgagtccggactaggcccgaagcgcgcgaccgcctgatcaacataggctggtgggagtacaggactcgcctcctcagggttccctgtgctgccacttttcagccatggccacaagtgaacagagtatctgccaagcccgggcttccgtgatggtctacgatgacaccagtaagaaatgggtaccaatcaaacctggccagcagggattcagccggatcaacatctaccacaacactgccagcaacaccttcagagtcgttggagtcaagttgcaggatcagcaggttgtgatcaattattcaatcgtgaaagggctgaagtacaatcaggccacgccaaccttccaccagtggcgagatgcccgccaggtctacggcttaaactttgcaagtaaagaagaggcaaccacgttctccaatgcaatgctgtttgccctgaacatcatgaattcccaagaaggaggcccctccagccagcgtcaggtgcagaatggcccctctcctgatgagatggacatccagagaagacaagtgatggagcagcaccagcagcagcgtcaggaatctctagaaagaagaacctcggccacagggcccatcctcccaccaggacatccttcatctgcagccagcgcccccgtctcatgtagtgggcctccaccgccccccccacccccagtcccacctccacccactggggctaccccacctcccccacccccactgccagccggaggagcccaggggtccagccacgacgagagctccatgtcaggactggccgctgccatagctggggccaagctgagaagagtccaacggccagaagacgcatctggaggctccagtcccagtgggacctcaaagtccgatgccaaccgggcaagcagcgggggtggcggaggaggcctcatggaggaaatgaacaaactgctggccaagaggagaaaagcagcctcccagtcagacaagccagccgagaagaaggaagatgaaagccaaatggaagatcctagtacctccccctctccggggacccgagcagccagccagccacctaactcctcagaggctggccggaagccctgggagcggagcaactcggtggagaagcctgtgtcctcgattctgtccagaaccccgtctgtggcaaagagccccgaagctaagagcccccttcagtcgcagcctcactctaggtaccgaacaaccctcctgctcacatgtcccccagggtttggggctcctctgtcccccgtcccgtgactaacacccttgcacgctgtctcacgtcctggcatttaacaacttgctctgcgaaggtggtctgttctttcagacccaggacctcggggtcctgtcagtcagctgctccgtcttttccctctgagagagagaccaagggcaaggagggcagtgacctgtccacagaggtagtgcaggggggggccaacatggagtcccagctctggactcactacgtgtgacagtgggcaagttaggggacctctccaagcctctgttttccccccacaaagtgaggtctgttaacccctgctgcacagggtggtggtggggacagctgtgagcaacagctggacatggggtgtggtcactagccagggctgcaccctacagttcaaccagtcctagcactggcgctgagccctacccctttcctccagcccagagtccttcctctgcggccggcacacagaatcagtttccccacagacatactgaccatatttcccaagccaaaagctggcatgacaacatgatagaatatttggaactgagattgcccaaaaaggcagaggcagccagccacatagtatctggaggtacatgtggcctgaattggaaggcctctagaacctgcgtcaagaatgtctccatcgccaccacaaattgaagggaaaccacccttatcacagagcaggaggcattgaaactggccttgcagagctgaacaggtggtgagagcagagcagtgcaggtggacagagatgaggaagtcttagcagtcagctggggtttgtccaaggcttgtggtcagccaggccgtgtgctggggacagtccctgcctgcaaagagcaccgtgtgaacaaggccactgtggtcctgaggggtgctctggacagggtgcagggccacatggtggaagggacagggtgctttgcggagtggggtggggcaagcctctgtcgggagctggcattttcgttgacccggacgaggaggagtctgctctgcggagatcatggggacagcctcccaagctgaaggaagggatgaagcctgctgggagcgtgaatgacatggccctggatgccttcgacttggaccggatgaagcaggagatcctagaggaggtggtgagagagctccacaaggtgaaggaggagatcatcgacgccatcaggcaggagctgagtgggatcagcaccacgtaaggggccggcctcgctgcgctgattcgtcgagcccatccggcgacagaggacagccagaagcccagccagccccagactccagtgcaccagagcacgcacaggagcctgggcgcgctgctgtgaaacgtcctgacctgtgatcacacatgacagtgaggaaaccaagtgcaactcctgggtttttttagattctgcctgacacggaacaccaggtctgctcgtcttttttgtgttttatatttgcttatttaaggtacatttctttgggtttctagagacgcccctaagtcacctgcttcattagacggtttccaggttttctcccaggtgacgctgttagcgcctcagctggcggtgacagccggcccagcgtggcgccaccacacaccgcagagctgtccaggcacagctccgtccccagcgctcatggtgttgaaactgtctgtcatgcaccacggtgtctgtgtccacacagtaataaacggtttactgtccgca

SEQ ID NO: 424995 - DNA, 811 bp, Homo sapiens
  misc_feature (9)..(9): n is a, c, g, or t
  misc_feature (26)..(26): n is a, c, g, or t
tgttgctgnggtgactctagaggatncctttttgctttgcggagtggggtggggcaagcctctgtcgggagctggcattttcgttgacccggacgaggaggagtctgctctgcggagatcatggggacagcctcccaagctgaaggaagggatgaagcctgctgggagcgtgaatgacatggccctggatgccttcgacttggaccggatgaagcaggagatcctagaggaggtggtgagagagctccacaaggtgaaggaggagatcatcgacgccatcaggcaggagctgagtgggatcagcaccacgtaaggggccggcctcgctgcgctgattcgtcgagcccatccggcgacagaggacagccagaagcccagccagccccagactccagtgcaccagagcacgcacaggagcctgggcgcgctgctgtgaaacgtcctgacctgtgatcacacatgacagtgaggaaaccaagtgcaactcctgggtttttttagattctgcctgacacggaacaccaggtctgctcgtcttttttgtgttttatatttgcttatttaaggtacatttctttgggtttctagagacgcccctaagtcacctgcttcattagacggtttccaggttttctcccaggtgacgctgttagcgcctcagctggcggtgacagccggcccagcgtggcgccaccacacaccgcagagctgtccaggcacagctccgtccccagcgctcatggtgttgaaactgtctgtcatgcaccacggtgtctgtgtccacacagtaataaacggtttactgtccgca

SEQ ID NO: 424996 - DNA, 5532 bp, Homo sapiens
  misc_feature (19)..(19): n is a, c, g, or t
  misc_feature (22)..(22): n is a, c, g, or t
  misc_feature (27)..(27): n is a, c, g, or t
  misc_feature (37)..(37): n is a, c, g, or t
  misc_feature (44)..(44): n is a, c, g, or t
  misc_feature (66)..(66): n is a, c, g, or t
  misc_feature (70)..(70): n is a, c, g, or t
cgatcttccttccggagcncgncagcntatatatcantcaagtnactccttctgacatggctccgnaagnaagatcgcgagtccggaggatggacaaagtaaggaagatgccacgggaatatggcggcggcggcggcgagtccggactaggcccgaagcgcgcgaccgcctgatcaacataggctggtgggagtacaggactcgcctcctcagggttccctgtgctgccacttttcagccatggccacaagtgaacagagtatctgccaagcccgggcttccgtgatggtctacgatgacaccagtaagaaatgggtaccaatcaaacctggccagcagggattcagccggatcaacatctaccacaacactgccagcaacaccttcagagtcgttggagtcaagttgcaggatcagcaggttgtgatcaattattcaatcgtgaaagggctgaagtacaatcaggccacgccaaccttccaccagtggcgagatgcccgccaggtctacggcttaaactttgcaagtaaagaagaggcaaccacgttctccaatgcaatgctgtttgccctgaacatcatgaattcccaagaaggaggcccctccagccagcgtcaggtgcagaatggcccctctcctgatgagatggacatccagagaagacaagtgatggagcagcaccagcagcagcgtcaggaatctctagaaagaagaacctcggccacagggcccatcctcccaccaggacatccttcatctgcagccagcgcccccgtctcatgtagtgggcctccaccgccccccccacccccagtcccacctccacccactggggctaccccacctcccccacccccactgccagccggaggagcccaggggtccagccacgacgagagctccatgtcaggactggccgctgccatagctggggccaagctgagaagagtccaacggccagaagacgcatctggaggctccagtcccagtgggacctcaaagtccgatgccaaccgggcaagcagcgggggtggcggaggaggcctcatggaggaaatgaacaaactgctggccaagaggagaaaagcagcctcccagtcagacaagccagccgagaagaaggaagatgaaagccaaatggaagatcctagtacctccccctctccggggacccgagcagccagccagccacctaactcctcagaggctggccggaagccctgggagcggagcaactcggtggagaagcctgtgtcctcgattctgtccagaaccccgtctgtggcaaagagccccgaagctaagagcccccttcagtcgcagcctcactctaggtaccgaacaaccctcctgctcacatgtcccccagggtttggggctcctctgtcccccgtcccgtgactaacacccttgcacgctgtctcacgtcctggcatttaacaacttgctctgcgaaggtggtctgttctttcagacccaggacctcggggtcctgtcagtcagctgctccgtcttttccctctgagagagagaccaagggcaaggagggcagtgacctgtccacagaggtagtgcaggggggggccaacatggagtcccagctctggactcactacgtgtgacagtgggcaagttaggggacctctccaagcctctgttttccccccacaaagtgaggtctgttaacccctgctgcacagggtggtggtggggacagctgtgagcaacagctggacatggggtgtggtcactagccagggctgcaccctacagttcaaccagtcctagcactggcgctgagccctacccctttcctccagcccagagtccttcctctgcggccggcacacagaatcagtttccccacagacatactgaccatatttcccaagccaaaagctggcatgacaacatgatagaatatttggaactgagattgcccaaaaaggcagaggcagccagccacatagtatctggaggtacatgtggcctgaattggaaggcctctagaacctgcgtcaagaatgtctccatcgccaccacaaattgaagggaaaccacccttatcacagagcaggaggcattgaaactggccttgcagagctgaacaggtggtgagagcagagcagtgcaggtggacagagatgaggaagtcttagcagtcagctggggtttgtccaaggcttgtggtcagccaggccgtgtgctggggacagtccctgcctgcaaagagcaccgtgtgaacaaggccactgtggtcctgaggggtgctctggacagggtgcagggccacatggtggaagggacagggtgctttgcggagtggggtggggcaagcctctgtcgggagctggcattttcgttgacccggacgaggaggagtctgctctgcggagatcatggggacagcctcccaagctgaaggaagggtaagtgccagggccctgagcctgcagccacccgccaagctcccccgcacctccacctggaagcagacaggccatggggcaggggaacgggaagggtgaggaagagggtgtgggggagcgcggagttagaagtttgcattgtgttcatgcgcagggcccagtcatggaacttgaggcacagggtgccatggtggaggctgggaaggggaaggcaaccagagtgggcaaaacgagggccctggagcagacacggcagcaaggggagcctgcagcgctcccagcggactccgccacgtcctgctggtggagcaaaggcgggctgccatgttgtgagtggccaagggtcgctcactgggcaggaacattgtcaaggccattcatgcttggaatagggtctctcttcagctctgaggcaaatctgttctctaattttcagatgacttcaaggggaacgtgtaccaccacccctctggtgcgtcacattgcttaggaagcctgctgtgtttatcactgggtggctgtcagggctgagatggagagggccagggcctggcgaggtggagcagtcggcccaggtgtcccagcaattgttgctggaacagggtctggaacccacaggagaggcctgaaggacccagggccctctggctggatgcgtttgcctatcaggacccagaattacttacagacctgtttagggctaggcttggcctctttcttgagctcatctggaggggtgtggcaacactcattcttcatccttattctccctggctgtgggcaacactggtcctcagtgtcaccagatggtcctcctctgtgcccatgacccctcagcagccaaggctggccctgccagataaatgtgtgtgcccatgatcacacccaggggcacaggccacatacgtttccctgaaaccttgggctccagcctccatcccgtccatgtgggagggaacttgggtcccagcagtgtgtctttcagcaccaagtcatgtttaaaagaccagagagacaagcattttgccaagatcttccagggaagatgcatgtgtgacacattaacattcaaatcaggccagcgcggtgctcatgcctgtcatcccagcactttgggaggccgaggcgggaggatcacttgagcccaggacttggagaccagtctgggcaacacagtgagaccccatctctacaaaaagttaaaaaagaaaaaaaaaagggcacatgtctgtagtcccagctactcgggaggctcacttgagcctgggaggttgaggctgcagtgaggcatgatacgcctctgtactccagcctggttgacagagtgagaccctgtctcaaataagtaaaaataaaattcaaatcggttaccttagtttggaaacttttcaaagaagtagtccacgagaactaccttgaaagagcaaaaccagccaggtgcagtggctcacgcccataatcccagcactctgggaggcccaggtgggtggatctcgtgaggtcaggagttcaagaccagcttggccaacatggtgaaaccccatctctgctgaaaatacaaaagttagctgaaaatacaaaagtggcacatgcctgtaatgccagctactggggaggctgaggtaggagaattgcttgaacctgggaggcagaggttgcagtgagccaagattgcgccattgcactccaatctggggaacaagagcaaaactctgtctgaaaaaaaaaaagcgacaccacatgggaggatgtttcttgggggaggtgtgctatgcccgagcaggctccagcaccaggggcgctggtgtgtcaggagcgcgcctccaggccggtgtgaactctgcaacttcacattgtgcctcctgccgccgctgctgcttccccgagccccaagctcaacctggagcatgagctcccaccctgaggaggaggctgtcaatactgtgtttctttccagggaggcaacgggtgggtgcgatgttgtcacttaagttgccacctctgcataagagctctctgatcagaaagcagtttctttgttgaccccagccagccttggctctcgggttgggaaatacagtcacggtatccatggagacctcttgaggtggagacgggcgttaaacccttctcaggcagtctgaggtggccagagtctgaagcaagcagcctctatggagcgaggggagcaggtgggcccagcctgagcggggcctctgcacagccagctttcccccacacctgtctccagccagggcacccacaggccctttctctcccagggatgaagcctgctgggagcgtgaatgacatggccctggatgccttcgacttggaccggatgaagcaggagatcctagaggaggtggtgagagagctccacaaggtgaaggaggagatcatcgacgccatcaggcaggagctgagtgggatcagcaccacgtaaggggccggcctcgctgcgctgattcgtcgagcccatccggcgacagaggacagccagaagcccagccagccccagactccagtgcaccagagcacgcacaggagcctgggcgcgctgctgtgaaacgtcctgacctgtgatcacacatgacagtgaggaaaccaagtgcaactcctgggtttttttagattctgcctgacacggaacaccaggtctgctcgtcttttttgtgttttatatttgcttatttaaggtacatttctttgggtttctagagacgcccctaagtcacctgcttcattagacggtttccaggttttctcccaggtgacgctgttagcgcctcagctggcggtgacagccggcccagcgtggcgccaccacacaccgcagagctgtccaggcacagctccgtccccagcgctcatggtgttgaaactgtctgtcatgcaccacggtgtctgtgtccacacagtaataaacggtttactgtccgcaccctcgggctcaggccctcgcattggtccatcacgctccgggctggggatgccccttttcagagaagggcccgggaccacggtgaccaggagtcgtaggagcaagatggcggtcttcgacaggaagctgggctcagaacattcccaagccccgggaagg

SEQ ID NO: 424997 - DNA, 5250 bp, Homo sapiens
  misc_feature (19)..(19): n is a, c, g, or t
  misc_feature (22)..(22): n is a, c, g, or t
  misc_feature (27)..(27): n is a, c, g, or t
  misc_feature (37)..(37): n is a, c, g, or t
  misc_feature (44)..(44): n is a, c, g, or t
  misc_feature (66)..(66): n is a, c, g, or t
  misc_feature (70)..(70): n is a, c, g, or t
cgatcttccttccggagcncgncagcntatatatcantcaagtnactccttctgacatggctccgnaagnaagatcgcgagtccggaggatggacaaagtaaggaagatgccacgggaatatggcggcggcggcggcgagtccggactaggcccgaagcgcgcgaccgcctgatcaacataggctggtgggagtacaggactcgcctcctcagggttccctgtgctgccacttttcagccatggccacaagtgaacagagtatctgccaagcccgggcttccgtgatggtctacgatgacaccagtaagaaatgggtaccaatcaaacctggccagcagggattcagccggatcaacatctaccacaacactgccagcaacaccttcagagtcgttggagtcaagttgcaggatcagcaggttgtgatcaattattcaatcgtgaaagggctgaagtacaatcaggccacgccaaccttccaccagtggcgagatgcccgccaggtctacggcttaaactttgcaagtaaagaagaggcaaccacgttctccaatgcaatgctgtttgccctgaacatcatgaattcccaagaaggaggcccctccagccagcgtcaggtgcagaatggcccctctcctgatgagatggacatccagagaagacaagtgatggagcagcaccagcagcagcgtcaggaatctctagaaagaagaacctcggccacagggcccatcctcccaccaggacatccttcatctgcagccagcgcccccgtctcatgtagtgggcctccaccgccccccccacccccagtcccacctccacccactggggctaccccacctcccccacccccactgccagccggaggagcccaggggtccagccacgacgagagctccatgtcaggactggccgctgccatagctggggccaagctgagaagagtccaacggccagaagacgcatctggaggctccagtcccagtgggacctcaaagtccgatgccaaccgggcaagcagcgggggtggcggaggaggcctcatggaggaaatgaacaaactgctggccaagaggagaaaagcagcctcccagtcagacaagccagccgagaagaaggaagatgaaagccaaatggaagatcctagtacctccccctctccggggacccgagcagccagccagccacctaactcctcagaggctggccggaagccctgggagcggagcaactcggtggagaagcctgtgtcctcgattctgtccagaaccccgtctgtggcaaagagccccgaagctaagagcccccttcagtcgcagcctcactctaggtaccgaacaaccctcctgctcacatgtcccccagggtttggggctcctctgtcccccgtcccgtgactaacacccttgcacgctgtctcacgtcctggcatttaacaacttgctctgcgaaggtggtctgttctttcagacccaggacctcggggtcctgtcagtcagctgctccgtcttttccctctgagagagagaccaagggcaaggagggcagtgacctgtccacagaggtagtgcaggggggggccaacatggagtcccagctctggactcactacgtgtgacagtgggcaagttaggggacctctccaagcctctgttttccccccacaaagtgaggtctgttaacccctgctgcacagggtggtggtggggacagctgtgagcaacagctggacatggggtgtggtcactagccagggctgcaccctacagttcaaccagtcctagcactggcgctgagccctacccctttcctccagcccagagtccttcctctgcggccggcacacagaatcagtttccccacagacatactgaccatatttcccaagccaaaagctggcatgacaacatgatagaatatttggaactgagattgcccaaaaaggcagaggcagccagccacatagtatctggaggtacatgtggcctgaattggaaggcctctagaacctgcgtcaagaatgtctccatcgccaccacaaattgaagggaaaccacccttatcacagagcaggaggcattgaaactggccttgcagagctgaacaggtggtgagagcagagcagtgcaggtggacagagatgaggaagtcttagcagtcagctggggtttgtccaaggcttgtggtcagccaggccgtgtgctggggacagtccctgcctgcaaagagcaccgtgtgaacaaggccactgtggtcctgaggggtgctctggacagggtgcagggccacatggtggaagggacagggtgctttgcggagtggggtggggcaagcctctgtcgggagctggcattttcgttgacccggacgaggaggagtctgctctgcggagatcatggggacagcctcccaagctgaaggaagggtaagtgccagggccctgagcctgcagccacccgccaagctcccccgcacctccacctggaagcagacaggccatggggcaggggaacgggaagggtgaggaagagggtgtgggggagcgcggagttagaagtttgcattgtgttcatgcgcagggcccagtcatggaacttgaggcacagggtgccatggtggaggctgggaaggggaaggcaaccagagtgggcaaaacgagggccctggagcagacacggcagcaaggggagcctgcagcgctcccagcggactccgccacgtcctgctggtggagcaaaggcgggctgccatgttgtgagtggccaagggtcgctcactgggcaggaacattgtcaaggccattcatgcttggaatagggtctctcttcagctctgaggcaaatctgttctctaattttcagatgacttcaaggggaacgtgtaccaccacccctctggtgcgtcacattgcttaggaagcctgctgtgtttatcactgggtggctgtcagggctgagatggagagggccagggcctggcgaggtggagcagtcggcccaggtgtcccagcaattgttgctggaacagggtctggaacccacaggagaggcctgaaggacccagggccctctggctggatgcgtttgcctatcaggacccagaattacttacagacctgtttagggctaggcttggcctctttcttgagctcatctggaggggtgtggcaacactcattcttcatccttattctccctggctgtgggcaacactggtcctcagtgtcaccagatggtcctcctctgtgcccatgacccctcagcagccaaggctggccctgccagataaatgtgtgtgcccatgatcacacccaggggcacaggccacatacgtttccctgaaaccttgggctccagcctccatcccgtccatgtgggagggaacttgggtcccagcagtgtgtctttcagcaccaagtcatgtttaaaagaccagagagacaagcattttgccaagatcttccagggaagatgcatgtgtgacacattaacattcaaatcaggccagcgcggtgctcatgcctgtcatcccagcactttgggaggccgaggcgggaggatcacttgagcccaggacttggagaccagtctgggcaacacagtgagaccccatctctacaaaaagttaaaaaagaaaaaaaaaagggcacatgtctgtagtcccagctactcgggaggctcacttgagcctgggaggttgaggctgcagtgaggcatgatacgcctctgtactccagcctggttgacagagtgagaccctgtctcaaataagtaaaaataaaattcaaatcggttaccttagtttggaaacttttcaaagaagtagtccacgagaactaccttgaaagagcaaaaccagccaggtgcagtggctcacgcccataatcccagcactctgggaggcccaggtgggtggatctcgtgaggtcaggagttcaagaccagcttggccaacatggtgaaaccccatctctgctgaaaatacaaaagttagctgaaaatacaaaagtggcacatgcctgtaatgccagctactggggaggctgaggtaggagaattgcttgaacctgggaggcagaggttgcagtgagccaagattgcgccattgcactccaatctggggaacaagagcaaaactctgtctgaaaaaaaaaaagcgacaccacatgggaggatgtttcttgggggaggtgtgctatgcccgagcaggctccagcaccaggggcgctggtgtgtcaggagcgcgcctccaggccggtgtgaactctgcaacttcacattgtgcctcctgccgccgctgctgcttccccgagccccaagctcaacctggagcatgagctcccaccctgaggaggaggctgtcaatactgtgtttctttccagggaggcaacgggtgggtgcgatgttgtcacttaagttgccacctctgcataagagctctctgatcagaaagcagtttctttgttgaccccagccagccttggctctcgggttgggaaatacagtcacggtatccatggagacctcttgaggtggagacgggcgttaaacccttctcaggcagtctgaggtggccagagtctgaagcaagcagcctctatggagcgaggggagcaggtgggcccagcctgagcggggcctctgcacagccagctttcccccacacctgtctccagccagggcacccacaggccctttctctcccagggatgaagcctgctgggagcgtgaatgacatggccctggatgccttcgacttggaccggatgaagcaggagatcctagaggaggtggtgagagagctccacaaggtgaaggaggagatcatcgacgccatcaggcaggagctgagtgggatcagcaccacgtaaggggccggcctcgctgcgctgattcgtcgagcccatccggcgacagaggacagccagaagcccagccagccccagactccagtgcaccagagcacgcacaggagcctgggcgcgctgctgtgaaacgtcctgacctgtgatcacacatgacaagacgcccctaagtcacctgcttcattagacggtttccaggttttctcccaggtgacgctgttagcgcctcagctggcggtgacagccggcccagcgtggcgccaccacacaccgcagagctgtccaggcacagctccgtccccagcgctcatggtgttgaaactgtctgtcatgcaccacggtgtctgtgtccacacagtaataaacggtttactgtccgca

SEQ ID NO: 424998 - DNA, 2187 bp, Homo sapiens
  misc_feature (19)..(19): n is a, c, g, or t
  misc_feature (22)..(22): n is a, c, g, or t
  misc_feature (27)..(27): n is a, c, g, or t
  misc_feature (37)..(37): n is a, c, g, or t
  misc_feature (44)..(44): n is a, c, g, or t
  misc_feature (66)..(66): n is a, c, g, or t
  misc_feature (70)..(70): n is a, c, g, or t
cgatcttccttccggagcncgncagcntatatatcantcaagtnactccttctgacatggctccgnaagnaagatcgcgagtccggaggatggacaaagtaaggaagatgccacgggaatatggcggcggcggcggcgagtccggactaggcccgaagcgcgcgaccgcctgatcaacataggctggtgggagtacaggactcgcctcctcagggttccctgtgctgccacttttcagccatggccacaagtgaacagagtatctgccaagcccgggcttccgtgatggtctacgatgacaccagtaagaaatgggtaccaatcaaacctggccagcagggattcagccggatcaacatctaccacaacactgccagcaacaccttcagagtcgttggagtcaagttgcaggatcagcaggttgtgatcaattattcaatcgtgaaagggctgaagtacaatcaggccacgccaaccttccaccagtggcgagatgcccgccaggtctacggcttaaactttgcaagtaaagaagaggcaaccacgttctccaatgcaatgctgtttgccctgaacatcatgaattcccaagaaggaggcccctccagccagcgtcaggtgcagaatggcccctctcctgatgagatggacatccagagaagacaagtgatggagcagcaccagcagcagcgtcaggaatctctagaaagaagaacctcggccacagggcccatcctcccaccaggacatccttcatctgcagccagcgcccccgtctcatgtagtgggcctccaccgccccccccacccccagtcccacctccacccactggggctaccccacctcccccacccccactgccagccggaggagcccaggggtccagccacgacgagagctccatgtcaggactggccgctgccatagctggggccaagctgagaagagtccaacggccagaagacgcatctggaggctccagtcccagtgggacctcaaagtccgatgccaaccgggcaagcagcgggggtggcggaggaggcctcatggaggaaatgaacaaactgctggccaagaggagaaaagcagcctcccagtcagacaagccagccgagaagaaggaagatgaaagccaaatggaagatcctagtacctccccctctccggggacccgagcagccagccagccacctaactcctcagaggctggccggaagccctgggagcggagcaactcggtggagaagcctgtgtcctcgattctgtccagaaccccgtctgtggcaaagagccccgaagctaagagcccccttcagtcgcagcctcactctaggatgaagcctgctgggagcgtgaatgacatggccctggatgccttcgacttggaccggatgaagcaggagatcctagaggaggtggtgagagagctccacaaggtgaaggaggagatcatcgacgccatcaggcaggagctgagtgggatcagcaccacgtaaggggccggcctcgctgcgctgattcgtcgagcccatccggcgacagaggacagccagaagcccagccagccccagactccagtgcaccagagcacgcacaggagcctgggcgcgctgctgtgaaacgtcctgacctgtgatcacacatgacagtgaggaaaccaagtgcaactcctgggtttttttagattctgcctgacacggaacaccaggtctgctcgtcttttttgtgttttatatttgcttatttaaggtacatttctttgggtttctagagacgcccctaagtcacctgcttcattagacggtttccaggttttctcccaggtgacgctgttagcgcctcagctggcggtgacagccggcccagcgtggcgccaccacacaccgcagagctgtccaggcacagctccgtccccagcgctcatggtgttgaaactgtctgtcatgcaccacggtgtctgtgtccacacagtaataaacggtttactgtccgcaaaaaaactacaaaaaatctccgagggcatcctattgccggagcgcgcgcgacacaaccaggcacatgaacctggcgcccatttgcaagaggctggtccctggacccgagcttcctttgtccacagggtgcacgatctcccgggtctcccttatgggaagccgattaacttcagataagcagtgtacccggta

SEQ ID NO: 424999 - DNA, 3224 bp, Homo sapiens
  misc_feature (19)..(19): n is a, c, g, or t
  misc_feature (22)..(22): n is a, c, g, or t
  misc_feature (27)..(27): n is a, c, g, or t
  misc_feature (37)..(37): n is a, c, g, or t
  misc_feature (44)..(44): n is a, c, g, or t
  misc_feature (66)..(66): n is a, c, g, or t
  misc_feature (70)..(70): n is a, c, g, or t
  misc_feature (3097)..(3097): n is a, c, g, or t
cgatcttccttccggagcncgncagcntatatatcantcaagtnactccttctgacatggctccgnaagnaagatcgcgagtccggaggatggacaaagtaaggaagatgccacgggaatatggcggcggcggcggcgagtccggactaggcccgaagcgcgcgaccgcctgatcaacataggctggtgggagtacaggactcgcctcctcagggttccctgtgctgccacttttcagccatggccacaagtgaacagagtatctgccaagcccgggcttccgtgatggtctacgatgacaccagtaagaaatgggtaccaatcaaacctggccagcagggattcagccggatcaacatctaccacaacactgccagcaacaccttcagagtcgttggagtcaagttgcaggatcagcaggttgtgatcaattattcaatcgtgaaagggctgaagtacaatcaggccacgccaaccttccaccagtggcgagatgcccgccaggtctacggcttaaactttgcaagtaaagaagaggcaaccacgttctccaatgcaatgctgtttgccctgaacatcatgaattcccaagaaggaggcccctccagccagcgtcaggtgcagaatggcccctctcctgatgagatggacatccagagaagacaagtgatggagcagcaccagcagcagcgtcaggaatctctagaaagaagaacctcggccacagggcccatcctcccaccaggacatccttcatctgcagccagcgcccccgtctcatgtagtgggcctccaccgccccccccacccccagtcccacctccacccactggggctaccccacctcccccacccccactgccagccggaggagcccaggggtccagccacgacgagagctccatgtcaggactggccgctgccatagctggggccaagctgagaagagtccaacggccagaagacgcatctggaggctccagtcccagtgggacctcaaagtccgatgccaaccgggcaagcagcgggggtggcggaggaggcctcatggaggaaatgaacaaactgctggccaagaggagaaaagcagcctcccagtcagacaagccagccgagaagaaggaagatgaaagccaaatggaagatcctagtacctccccctctccggggacccgagcagccagccagccacctaactcctcagaggctggccggaagccctgggagcggagcaactcggtggagaagcctgtgtcctcgattctgtccagaaccccgtctgtggcaaagagccccgaagctaagagcccccttcagtcgcagcctcactctaggtaccgaacaaccctcctgctcacatgtcccccagggtttggggctcctctgtcccccgtcccgtgactaacacccttgcacgctgtctcacgtcctggcatttaacaacttgctctgcgaaggtggtctgttctttcagacccaggacctcggggtcctgtcagtcagctgctccgtcttttccctctgagagagagaccaagggcaaggagggcagtgacctgtccacagaggtagtgcaggggggggccaacatggagtcccagctctggactcactacgtgtgacagtgggcaagttaggggacctctccaagcctctgttttccccccacaaagtgaggtctgttaacccctgctgcacagggtggtggtggggacagctgtgagcaacagctggacatggggtgtggtcactagccagggctgcaccctacagttcaaccagtcctagcactggcgctgagccctacccctttcctccagcccagagtccttcctctgcggccggcacacagaatcagtttccccacagacatactgaccatatttcccaagccaaaagctggcatgacaacatgatagaatatttggaactgagattgcccaaaaaggcagaggcagccagccacatagtatctggaggtacatgtggcctgaattggaaggcctctagaacctgcgtcaagaatgtctccatcgccaccacaaattgaagggaaaccacccttatcacagagcaggaggcattgaaactggccttgcagagctgaacaggtggtgagagcagagcagtgcaggtggacagagatgaggaagtcttagcagtcagctggggtttgtccaaggcttgtggtcagccaggccgtgtgctggggacagtccctgcctgcaaagagcaccgtgtgaacaaggccactgtggtcctgaggggtgctctggacagggtgcagggccacatggtggaagggacagggtgctttgcggagtggggtggggcaagcctctgtcgggagctggcattttcgttgacccggacgaggaggagtctgctctgcggagatcatggggacagcctcccaagctgaaggaagggatgaagcctgctgggagcgtgaatgacatggccctggatgccttcgacttggaccggatgaagcaggagatcctagaggaggtggtgagagagctccacaaggtgaaggaggagatcatcgacgccatcaggcaggagctgagtgggatcagcaccacgtaaggggccggcctcgctgcgctgattcgtcgagcccatccggcgacagaggacagccagaagcccagccagccccagactccagtgcaccagagcacgcacaggagcctgggcgcgctgctgtgaaacgtcctgacctgtgatcacacatgacagtgaggaaaccaagtgcaactcctgggtttttttagattctgcctgacacggaacaccaggtctgctcgtcttttttgtgttttatatttgcttatttaaggtacatttctttgggtttctagagacgcccctaagtcacctgcttcattagacggtttccaggttttctcccaggtgacgctgttagcgcctcagctggcggtgacagccggcccagcgtggcgccaccacacaccgcagagctgtccaggcacagctccgtccccagcgctcatggtgttgaaactgtctgtcatgcaccacggtgtctgtgtccacacagtaataaacggtttactgtccgcaaaaaaangaaaaaaaaaaaaggggggtttagtggggggggggaaaagaggagtaaagggccgggcatgggtttcggaccgttttgtaaagggggaaaggggggcccaaagggaggggaaaaagaaacgggaccg

SEQ ID NO: 425000 - DNA, 1246 bp, Homo sapiens
  misc_feature (19)..(19): n is a, c, g, or t
  misc_feature (22)..(22): n is a, c, g, or t
  misc_feature (27)..(27): n is a, c, g, or t
  misc_feature (37)..(37): n is a, c, g, or t
  misc_feature (44)..(44): n is a, c, g, or t
  misc_feature (66)..(66): n is a, c, g, or t
  misc_feature (70)..(70): n is a, c, g, or t
cgatcttccttccggagcncgncagcntatatatcantcaagtnactccttctgacatggctccgnaagnaagatcgcgagtccggaggatggacaaagtaaggaagatgccacgggaatatggcggcggcggcggcgagtccggactaggcccgaagcgcgcgaccgcctgatcaacataggctggtgggagtacaggactcgcctcctcagggttccctgtgctgccacttttcagccatggccacaagtgaacagagtatctgccaagcccgggcttccgtgatggtctacgatgacaccagtaagaaatgggtaccaatcaaacctggccagcagggattcagccggatcaacatctaccacaacactgccagcaacaccttcagagtcgttggagtcaagttgcaggatcagcaggttgtgatcaattattcaatcgtgaaagggctgaagtacaatcaggccacgccaaccttccaccagtggcgagatgcccgccaggtctacggcttaaactttgcaagtaaagaagaggcaaccacgttctccaatgcaatgctgtttgccctgaacatcatgaattcccaagaaggaggcccctccagccagcgtcaggtgcagaatggcccctctcctgatgagatggacatccagagaagacaagtgatggagcagcaccagcagcagcgtcaggaatctctagaaagaagaacctcggccacagggcccatcctcccaccaggacatccttcatctgcagccagcgcccccgtctcatgtagtgggcctccaccgccccccccacccccagtcccacctccacccactggggctaccccacctcccccacccccactgccagccggaggagcccaggggtccagccacgacgagagctccatgtcaggactggccgctgccatagctggggccaagctgagaagagtccaacggccagaagacgcatctggaggctccagtcccagtgggacctcaaagtccgatgccaaccgggcaagcagcgggggtggcggaggaggcctcatggaggaaatgaacaaactgctggccaagagagaaaagcagcctcccagtcagacaagccagccacctaactcctcagaggctggccggaagccctgggagcgaagcagctccgtccccagcgctcatggtgttgaaactgtctgtcatgcaccacggtgtctgtgtccacacagtaataaacggtttactgtccgca

SEQ ID NO: 425001 - DNA, 2357 bp, Homo sapiens
  misc_feature (19)..(19): n is a, c, g, or t
  misc_feature (22)..(22): n is a, c, g, or t
  misc_feature (27)..(27): n is a, c, g, or t
  misc_feature (37)..(37): n is a, c, g, or t
  misc_feature (44)..(44): n is a, c, g, or t
  misc_feature (66)..(66): n is a, c, g, or t
  misc_feature (70)..(70): n is a, c, g, or t
cgatcttccttccggagcncgncagcntatatatcantcaagtnactccttctgacatggctccgnaagnaagatcgcgagtccggaggatggacaaagtaaggaagatgccacgggaatatggcggcggcggcggcgagtccggactaggcccgaagcgcgcgaccgcctgatcaacataggctggtgggagtacaggactcgcctcctcagggttccctgtgctgccacttttcagccatggccacaagtgaacagagtatctgccaagcccgggcttccgtgatggtctacgatgacaccagtaagaaatgggtaccaatcaaacctggccagcagggattcagccggatcaacatctaccacaacactgccagcaacaccttcagagtcgttggagtcaagttgcaggatcagcaggttgtgatcaattattcaatcgtgaaagggctgaagtacaatcaggccacgccaaccttccaccagtggcgagatgcccgccaggtctacggcttaaactttgcaagtaaagaagaggcaaccacgttctccaatgcaatgctgtttgccctgaacatcatgaattcccaagaaggaggcccctccagccagcgtcaggtgcagaatggcccctctcctgatgagatggacatccagagaagacaagtgatggagcagcaccagcagcagcgtcaggaatctctagaaagaagaacctcggccacagggcccatcctcccaccaggacatccttcatctgcagccagcgcccccgtctcatgtagtggacacaccaaagacagaaaaacagagaaaaaagaaaagagagaagaaacaaaaaaaggaaagggaaaaaagaaaggaagaaaaagaaaaagggaaaagaagaaacgacagaagaacagagaagagaaaggagaaagagaagaaagaagcgagacaagacaaagaaaaacaaagaaacagcagaaaacacagaggagcaaagagaagacaaaagcaagagaaaaaacagaccaaaaagaagaagaacacaaaacagagaggcacagaacacacaccagacaccaacaaacgagaagacgaagacaacgaacgagaaggaagacagcgagagaggcagcaaaggcgaagagagcaagaagaagacaaaaaaagagaggcgcagagagagggagaaggaggagacacgaagaccccaacgagagcgaagagacgaagagacagagaagaaaaggaaaaagaggcacaggcaagcaaaacagaaaaaagagaaggaaaagacaacaaaaaagaaaacagaagacgaaacagaaggagagacaaggagcaagagaagaacgagaagaaaggaagaagaacggagagacagcagagaggaggacaagacacaaaaacagaaaggagaagaagaagagaggggagggggaaggacagagacgagaggacgaatcaggaaagcacagaggaagagggccagagaacgaagcacgaaggcaggaggagcagggagagaagaggaagacacgagcaaggcacgaagaggaaagagaggcaggacaacacgaaggaggaggagaacgacagaaaaagacgagaagaagagcacgcacgacagacgcgccgagtgagagaagacgaggcgacgacagcagcaaagacagcgctcagaaagctgcgacaagggagacagcagagcagcacgagagagaggagaagaaacagcaagaggacggaacaaggagaggcgagagcagagaaaggccacaacgacaagaggaagacgagaaactgagagaggagaggaacagagaagggcacaagacgagcgaaaagcgagagagacagatgagcgccacgaacgagaggacgagagcgcgcggtgcgagcaggaaggagagagaggagaagcggagcggacgggcgaagcaaacagaccgggagagcagaacctgagaggacgacgagcgaagacgggagaggagcgaagagcacggcaacgaccagcagcggaaggaaagacagggagaagagcacagagacaaacgacgaaagaccgacagaagcagaacacgagaagcagacgaagcgcgaacaggagagagaaggacaagaagcagagccagcacagagcagacgcaagaaccaagagagagaagcagacacagcggaaagaacacaagagagaagaggaagaaaaagacgaaagacgaaagagaaacgaagagagagaaccacggacgaggaaggaccacacaacagcgtagggacacaacagcaatgaagcagcagcgacgacagagggcaaaagtccacgcaagtgcgcaggacagagcgcgacgagggaggacgacaca

SEQ ID NO: 425002 - DNA, 897 bp, Homo sapiens
  misc_feature (19)..(19): n is a, c, g, or t
  misc_feature (22)..(22): n is a, c, g, or t
  misc_feature (27)..(27): n is a, c, g, or t
  misc_feature (37)..(37): n is a, c, g, or t
  misc_feature (44)..(44): n is a, c, g, or t
  misc_feature (66)..(66): n is a, c, g, or t
  misc_feature (70)..(70): n is a, c, g, or t
  misc_feature (790)..(792): n is a, c, g, or t
cgatcttccttccggagcncgncagcntatatatcantcaagtnactccttctgacatggctccgnaagnaagatcgcgagtccggaggatggacaaagtaaggaagatgccacgggaatatggcggcggcggcggcgagtccggactaggcccgaagcgcgcgaccgcctgatcaacataggctggtgggagtacaggactcgcctcctcagggttccctgtgctgccacttttcagccatggccacaagtgaacagagtatctgccaagcccgggcttccgtgatggtctacgatgacaccagtaagaaatgggtaccaatcaaacctggccagcagggattcagccggatcaacatctaccacaacactgccagcaacaccttcagagtcgttggagtcaagttgcaggatcagcaggttgtgatcaattattcaatcgtgaaagggctgaagtacaatcaggccacgccaaccttccaccagtggcgagatgcccgccaggtctacggcttaaactttgcaagtaaagaagaggcaaccacgttctccaatgcaatgctgtttgccctgaacatcatgaattcccaagaaggaggcccctccagccagcgtcaggtgcagaatggcccctctcctgatgagatggacatccagagaagacaagtgatggagcagcaccagcagcagcgtcaggaatctctagaaagaagaacctcggccacagggcccatcctcccaccaggacatccttcatctgcagccagcgcccccgtctcatgtagtggtnnntatggcattccgaagcatacacggtttgcagcacaaccggagtttcatgcaggacctgtcgctgacatgcctgtctcctgtcatatcagaccgttgggcagattt

SEQ ID NO: 425003 - DNA, 2202 bp, Homo sapiens
cgccaagatggcaggggccggggcccagctgtcagtccgccgccgccgccgggtcgcccctggcccggcgcgcccgtccccggcagcgacaatgagtgaacagagtatctgccaagcccgggcttccgtgatggtctacgatgacaccagtaagaaatgggtaccaatcaaacctggccagcagggattcagccggatcaacatctaccacaacactgccagcaacaccttcagagtcgttggagtcaagttgcaggatcagcaggttgtgatcaattattcaatcgtgaaagggctgaagtacaatcaggccacgccaaccttccaccagtggcgagatgcccgccaggtctacggcttaaactttgcaagtaaagaagaggcaaccacgttctccaatgcaatgctgtttgccctgaacatcatgaattcccaagaaggaggcccctccagccagcgtcaggtgcagaatggcccctctcctgatgagatggacatccagagaagacaagtgatggagcagcaccagcagcagcgtcaggaatctctagaaagaagaacctcggccacagggcccatcctcccaccaggacatccttcatctgcagccagcgcccccgtctcatgtagtggacacaccaaagacagaaaaacagagaaaaaagaaaagagagaagaaacaaaaaaaggaaagggaaaaaagaaaggaagaaaaagaaaaagggaaaagaagaaacgacagaagaacagagaagagaaaggagaaagagaagaaagaagcgagacaagacaaagaaaaacaaagaaacagcagaaaacacagaggagcaaagagaagacaaaagcaagagaaaaaacagaccaaaaagaagaagaacacaaaacagagaggcacagaacacacaccagacaccaacaaacgagaagacgaagacaacgaacgagaaggaagacagcgagagaggcagcaaaggcgaagagagcaagaagaagacaaaaaaagagaggcgcagagagagggagaaggaggagacacgaagaccccaacgagagcgaagagacgaagagacagagaagaaaaggaaaaagaggcacaggcaagcaaaacagaaaaaagagaaggaaaagacaacaaaaaagaaaacagaagacgaaacagaaggagagacaaggagcaagagaagaacgagaagaaaggaagaagaacggagagacagcagagaggaggacaagacacaaaaacagaaaggagaagaagaagagaggggagggggaaggacagagacgagaggacgaatcaggaaagcacagaggaagagggccagagaacgaagcacgaaggcaggaggagcagggagagaagaggaagacacgagcaaggcacgaagaggaaagagaggcaggacaacacgaaggaggaggagaacgacagaaaaagacgagaagaagagcacgcacgacagacgcgccgagtgagagaagacgaggcgacgacagcagcaaagacagcgctcagaaagctgcgacaagggagacagcagagcagcacgagagagaggagaagaaacagcaagaggacggaacaaggagaggcgagagcagagaaaggccacaacgacaagaggaagacgagaaactgagagaggagaggaacagagaagggcacaagacgagcgaaaagcgagagagacagatgagcgccacgaacgagaggacgagagcgcgcggtgcgagcaggaaggagagagaggagaagcggagcggacgggcgaagcaaacagaccgggagagcagaacctgagaggacgacgagcgaagacgggagaggagcgaagagcacggcaacgaccagcagcggaaggaaagacagggagaagagcacagagacaaacgacgaaagaccgacagaagcagaacacgagaagcagacgaagcgcgaacaggagagagaaggacaagaagcagagccagcacagagcagacgcaagaaccaagagagagaagcagacacagcggaaagaacacaagagagaagaggaagaaaaagacgaaagacgaaagagaaacgaagagagagaaccacggacgaggaaggaccacacaacagcgtagggacacaacagcaatgaagcagcagcgacgacagagggcaaaagtccacgcaagtgcgcaggacagagcgcgacgagggaggacgacaca

SEQ ID NO: 425004 - DNA, 193 bp, Homo sapiens
tcacttttaaatatttaatgttttgctaattataaaagtcatatgtgttcattgggaacatttggaaaactgaggttttatgaagtgtccaatgatgtcctgccctggccccaggtggccttcctaaacagactcccttcttctccattttaggaagatcctagtacctccccctctccggggacccgagcag

SEQ ID NO: 425005 - DNA, 446 bp, Homo sapiens
ctttgacaagtgcagcgcagcatagaggaacacagcctccttgcaccttttgctatatctgcataatttccctctccccaggtgcgtgcatcctctaatgacaaagcaaccttgtatttccttccacaaatgaatggaggcagcctaacgtcatgtggtatgttccaggctcatgatagaggataagtacacctccttggctgtcaggtgacatctacattgtctacattttaggagttgttattgttattcgtgtttgtcattccttggacctttccttctgctggagaaacttcttgtttagcttctagagccatgttggtgggtcacagattccttggctcttcctcgtctggcttctgaaagagacgccatctggtgtaatgatggggaagggagagctagcagctaagagacctagattcctccagaagtgccagagggag

SEQ ID NO: 425006 - DNA, 475 bp, Homo sapiens
agcctgggtggggctcccaggagatggaacagggacacataccaggcaggtccacgccaggggtgcggggccctgatgaggaaccgggctgcactggtcatggctgcacctgagccgccgccacctgtcccgcagccatcaggcaggagctgagtgggatcagcaccacgtaaggggccggcctcgctgcgctgattcgtcgagcccatccggcgacagaggacagccagaagcccagccagccccagactccagtgcaccagagcacgcacaggagcctgggcgcgctgctgtgaaacgtcctgacctgtgatcacacatgacagtgaggaaaccaagtgcaactcctgggtttttttagattctgcctgacacggaacaccaggtctgctcgtcttttttgtgttttatatttgcttatttaaggtacatttctttgggtttctagagacgcccctaagtcacctgcttcatt

SEQ ID NO: 425007 - DNA, 5373 bp, Homo sapiens
  misc_feature (19)..(19): n is a, c, g, or t
  misc_feature (22)..(22): n is a, c, g, or t
  misc_feature (27)..(27): n is a, c, g, or t
  misc_feature (37)..(37): n is a, c, g, or t
  misc_feature (44)..(44): n is a, c, g, or t
  misc_feature (66)..(66): n is a, c, g, or t
  misc_feature (70)..(70): n is a, c, g, or t
cgatcttccttccggagcncgncagcntatatatcantcaagtnactccttctgacatggctccgnaagnaagatcgcgagtccggaggatggacaaagtaaggaagatgccacgggaatatggcggcggcggcggcgagtccggactaggcccgaagcgcgcgaccgcctgatcaacataggctggtgggagtacaggactcgcctcctcagggttccctgtgctgccacttttcagccatggccacaagtgaacagagtatctgccaagcccgggcttccgtgatggtctacgatgacaccagtaagaaatgggtaccaatcaaacctggccagcagggattcagccggatcaacatctaccacaacactgccagcaacaccttcagagtcgttggagtcaagttgcaggatcagcaggttgtgatcaattattcaatcgtgaaagggctgaagtacaatcaggccacgccaaccttccaccagtggcgagatgcccgccaggtctacggcttaaactttgcaagtaaagaagaggcaaccacgttctccaatgcaatgctgtttgccctgaacatcatgaattcccaagaaggaggcccctccagccagcgtcaggtgcagaatggcccctctcctgatgagatggacatccagagaagacaagtgatggagcagcaccagcagcagcgtcaggaatctctagaaagaagaacctcggccacagggcccatcctcccaccaggacatccttcatctgcagccagcgcccccgtctcatgtagtgggcctccaccgccccccccacccccagtcccacctccacccactggggctaccccacctcccccacccccactgccagccggaggagcccaggggtccagccacgacgagagctccatgtcaggactggccgctgccatagctggggccaagctgagaagagtccaacggccagaagacgcatctggaggctccagtcccagtgggacctcaaagtccgatgccaaccgggcaagcagcgggggtggcggaggaggcctcatggaggaaatgaacaaactgctggccaagaggagaaaagcagcctcccagtcagacaagccagccgagaagaaggaagatgaaagccaaatggaagatcctagtacctccccctctccggggacccgagcagccagccagccacctaactcctcagaggctggccggaagccctgggagcggagcaactcggtggagaagcctgtgtcctcgattctgtccagaaccccgtctgtggcaaagagccccgaagctaagagcccccttcagtcgcagcctcactctaggtaccgaacaaccctcctgctcacatgtcccccagggtttggggctcctctgtcccccgtcccgtgactaacacccttgcacgctgtctcacgtcctggcatttaacaacttgctctgcgaaggtggtctgttctttcagacccaggacctcggggtcctgtcagtcagctgctccgtcttttccctctgagagagagaccaagggcaaggagggcagtgacctgtccacagaggtagtgcaggggggggccaacatggagtcccagctctggactcactacgtgtgacagtgggcaagttaggggacctctccaagcctctgttttccccccacaaagtgaggtctgttaacccctgctgcacagggtggtggtggggacagctgtgagcaacagctggacatggggtgtggtcactagccagggctgcaccctacagttcaaccagtcctagcactggcgctgagccctacccctttcctccagcccagagtccttcctctgcggccggcacacagaatcagtttccccacagacatactgaccatatttcccaagccaaaagctggcatgacaacatgatagaatatttggaactgagattgcccaaaaaggcagaggcagccagccacatagtatctggaggtacatgtggcctgaattggaaggcctctagaacctgcgtcaagaatgtctccatcgccaccacaaattgaagggaaaccacccttatcacagagcaggaggcattgaaactggccttgcagagctgaacaggtggtgagagcagagcagtgcaggtggacagagatgaggaagtcttagcagtcagctggggtttgtccaaggcttgtggtcagccaggccgtgtgctggggacagtccctgcctgcaaagagcaccgtgtgaacaaggccactgtggtcctgaggggtgctctggacagggtgcagggccacatggtggaagggacagggtgctttgcggagtggggtggggcaagcctctgtcgggagctggcattttcgttgacccggacgaggaggagtctgctctgcggagatcatggggacagcctcccaagctgaaggaagggtaagtgccagggccctgagcctgcagccacccgccaagctcccccgcacctccacctggaagcagacaggccatggggcaggggaacgggaagggtgaggaagagggtgtgggggagcgcggagttagaagtttgcattgtgttcatgcgcagggcccagtcatggaacttgaggcacagggtgccatggtggaggctgggaaggggaaggcaaccagagtgggcaaaacgagggccctggagcagacacggcagcaaggggagcctgcagcgctcccagcggactccgccacgtcctgctggtggagcaaaggcgggctgccatgttgtgagtggccaagggtcgctcactgggcaggaacattgtcaaggccattcatgcttggaatagggtctctcttcagctctgaggcaaatctgttctctaattttcagatgacttcaaggggaacgtgtaccaccacccctctggtgcgtcacattgcttaggaagcctgctgtgtttatcactgggtggctgtcagggctgagatggagagggccagggcctggcgaggtggagcagtcggcccaggtgtcccagcaattgttgctggaacagggtctggaacccacaggagaggcctgaaggacccagggccctctggctggatgcgtttgcctatcaggacccagaattacttacagacctgtttagggctaggcttggcctctttcttgagctcatctggaggggtgtggcaacactcattcttcatccttattctccctggctgtgggcaacactggtcctcagtgtcaccagatggtcctcctctgtgcccatgacccctcagcagccaaggctggccctgccagataaatgtgtgtgcccatgatcacacccaggggcacaggccacatacgtttccctgaaaccttgggctccagcctccatcccgtccatgtgggagggaacttgggtcccagcagtgtgtctttcagcaccaagtcatgtttaaaagaccagagagacaagcattttgccaagatcttccagggaagatgcatgtgtgacacattaacattcaaatcaggccagcgcggtgctcatgcctgtcatcccagcactttgggaggccgaggcgggaggatcacttgagcccaggacttggagaccagtctgggcaacacagtgagaccccatctctacaaaaagttaaaaaagaaaaaaaaaagggcacatgtctgtagtcccagctactcgggaggctcacttgagcctgggaggttgaggctgcagtgaggcatgatacgcctctgtactccagcctggttgacagagtgagaccctgtctcaaataagtaaaaataaaattcaaatcggttaccttagtttggaaacttttcaaagaagtagtccacgagaactaccttgaaagagcaaaaccagccaggtgcagtggctcacgcccataatcccagcactctgggaggcccaggtgggtggatctcgtgaggtcaggagttcaagaccagcttggccaacatggtgaaaccccatctctgctgaaaatacaaaagttagctgaaaatacaaaagtggcacatgcctgtaatgccagctactggggaggctgaggtaggagaattgcttgaacctgggaggcagaggttgcagtgagccaagattgcgccattgcactccaatctggggaacaagagcaaaactctgtctgaaaaaaaaaaagcgacaccacatgggaggatgtttcttgggggaggtgtgctatgcccgagcaggctccagcaccaggggcgctggtgtgtcaggagcgcgcctccaggccggtgtgaactctgcaacttcacattgtgcctcctgccgccgctgctgcttccccgagccccaagctcaacctggagcatgagctcccaccctgaggaggaggctgtcaatactgtgtttctttccagggaggcaacgggtgggtgcgatgttgtcacttaagttgccacctctgcataagagctctctgatcagaaagcagtttctttgttgaccccagccagccttggctctcgggttgggaaatacagtcacggtatccatggagacctcttgaggtggagacgggcgttaaacccttctcaggcagtctgaggtggccagagtctgaagcaagcagcctctatggagcgaggggagcaggtgggcccagcctgagcggggcctctgcacagccagctttcccccacacctgtctccagccagggcacccacaggccctttctctcccagggatgaagcctgctgggagcgtgaatgacatggccctggatgccttcgacttggaccggatgaagcaggagatcctagaggaggtggtgagagagctccacaaggtgaaggaggagatcatcgacgccatcaggcaggagctgagtgggatcagcaccacgtaaggggccggcctcgctgcgctgattcgtcgagcccatccggcgacagaggacagccagaagcccagccagccccagactccagtgcaccagagcacgcacaggagcctgggcgcgctgctgtgaaacgtcctgacctgtgatcacacatgacagtgaggaaaccaagtgcaactcctgggtttttttagattctgcctgacacggaacaccaggtctgctcgtcttttttgtgttttatatttgcttatttaaggtacatttctttgggtttctagagacgcccctaagtcacctgcttcattagacggtttccaggttttctcccaggtgacgctgttagcgcctcagctggcggtgacagccggcccagcgtggcgccaccacacaccgcagagctgtccaggcacagctccgtccccagcgctcatggtgttgaaactgtctgtcatgcaccacggtgtctgtgtccacacagtaataaacggtttactgtccgca

SEQ ID NO: 425008 - DNA, 5145 bp, Homo sapiens
cacaggcgcagaagcagcttgcatgaacagagtatctgccaagcccgggcttccgtgatggtctacgatgacaccagtaagaaatgggtaccaatcaaacctggccagcagggattcagccggatcaacatctaccacaacactgccagcaacaccttcagagtcgttggagtcaagttgcaggatcagcaggttgtgatcaattattcaatcgtgaaagggctgaagtacaatcaggccacgccaaccttccaccagtggcgagatgcccgccaggtctacggcttaaactttgcaagtaaagaagaggcaaccacgttctccaatgcaatgctgtttgccctgaacatcatgaattcccaagaaggaggcccctccagccagcgtcaggtgcagaatggcccctctcctgatgagatggacatccagagaagacaagtgatggagcagcaccagcagcagcgtcaggaatctctagaaagaagaacctcggccacagggcccatcctcccaccaggacatccttcatctgcagccagcgcccccgtctcatgtagtgggcctccaccgccccccccacccccagtcccacctccacccactggggctaccccacctcccccacccccactgccagccggaggagcccaggggtccagccacgacgagagctccatgtcaggactggccgctgccatagctggggccaagctgagaagagtccaacggccagaagacgcatctggaggctccagtcccagtgggacctcaaagtccgatgccaaccgggcaagcagcgggggtggcggaggaggcctcatggaggaaatgaacaaactgctggccaagaggagaaaagcagcctcccagtcagacaagccagccgagaagaaggaagatgaaagccaaatggaagatcctagtacctccccctctccggggacccgagcagccagccagccacctaactcctcagaggctggccggaagccctgggagcggagcaactcggtggagaagcctgtgtcctcgattctgtccagaaccccgtctgtggcaaagagccccgaagctaagagcccccttcagtcgcagcctcactctaggtaccgaacaaccctcctgctcacatgtcccccagggtttggggctcctctgtcccccgtcccgtgactaacacccttgcacgctgtctcacgtcctggcatttaacaacttgctctgcgaaggtggtctgttctttcagacccaggacctcggggtcctgtcagtcagctgctccgtcttttccctctgagagagagaccaagggcaaggagggcagtgacctgtccacagaggtagtgcaggggggggccaacatggagtcccagctctggactcactacgtgtgacagtgggcaagttaggggacctctccaagcctctgttttccccccacaaagtgaggtctgttaacccctgctgcacagggtggtggtggggacagctgtgagcaacagctggacatggggtgtggtcactagccagggctgcaccctacagttcaaccagtcctagcactggcgctgagccctacccctttcctccagcccagagtccttcctctgcggccggcacacagaatcagtttccccacagacatactgaccatatttcccaagccaaaagctggcatgacaacatgatagaatatttggaactgagattgcccaaaaaggcagaggcagccagccacatagtatctggaggtacatgtggcctgaattggaaggcctctagaacctgcgtcaagaatgtctccatcgccaccacaaattgaagggaaaccacccttatcacagagcaggaggcattgaaactggccttgcagagctgaacaggtggtgagagcagagcagtgcaggtggacagagatgaggaagtcttagcagtcagctggggtttgtccaaggcttgtggtcagccaggccgtgtgctggggacagtccctgcctgcaaagagcaccgtgtgaacaaggccactgtggtcctgaggggtgctctggacagggtgcagggccacatggtggaagggacagggtgctttgcggagtggggtggggcaagcctctgtcgggagctggcattttcgttgacccggacgaggaggagtctgctctgcggagatcatggggacagcctcccaagctgaaggaagggtaagtgccagggccctgagcctgcagccacccgccaagctcccccgcacctccacctggaagcagacaggccatggggcaggggaacgggaagggtgaggaagagggtgtgggggagcgcggagttagaagtttgcattgtgttcatgcgcagggcccagtcatggaacttgaggcacagggtgccatggtggaggctgggaaggggaaggcaaccagagtgggcaaaacgagggccctggagcagacacggcagcaaggggagcctgcagcgctcccagcggactccgccacgtcctgctggtggagcaaaggcgggctgccatgttgtgagtggccaagggtcgctcactgggcaggaacattgtcaaggccattcatgcttggaatagggtctctcttcagctctgaggcaaatctgttctctaattttcagatgacttcaaggggaacgtgtaccaccacccctctggtgcgtcacattgcttaggaagcctgctgtgtttatcactgggtggctgtcagggctgagatggagagggccagggcctggcgaggtggagcagtcggcccaggtgtcccagcaattgttgctggaacagggtctggaacccacaggagaggcctgaaggacccagggccctctggctggatgcgtttgcctatcaggacccagaattacttacagacctgtttagggctaggcttggcctctttcttgagctcatctggaggggtgtggcaacactcattcttcatccttattctccctggctgtgggcaacactggtcctcagtgtcaccagatggtcctcctctgtgcccatgacccctcagcagccaaggctggccctgccagataaatgtgtgtgcccatgatcacacccaggggcacaggccacatacgtttccctgaaaccttgggctccagcctccatcccgtccatgtgggagggaacttgggtcccagcagtgtgtctttcagcaccaagtcatgtttaaaagaccagagagacaagcattttgccaagatcttccagggaagatgcatgtgtgacacattaacattcaaatcaggccagcgcggtgctcatgcctgtcatcccagcactttgggaggccgaggcgggaggatcacttgagcccaggacttggagaccagtctgggcaacacagtgagaccccatctctacaaaaagttaaaaaagaaaaaaaaaagggcacatgtctgtagtcccagctactcgggaggctcacttgagcctgggaggttgaggctgcagtgaggcatgatacgcctctgtactccagcctggttgacagagtgagaccctgtctcaaataagtaaaaataaaattcaaatcggttaccttagtttggaaacttttcaaagaagtagtccacgagaactaccttgaaagagcaaaaccagccaggtgcagtggctcacgcccataatcccagcactctgggaggcccaggtgggtggatctcgtgaggtcaggagttcaagaccagcttggccaacatggtgaaaccccatctctgctgaaaatacaaaagttagctgaaaatacaaaagtggcacatgcctgtaatgccagctactggggaggctgaggtaggagaattgcttgaacctgggaggcagaggttgcagtgagccaagattgcgccattgcactccaatctggggaacaagagcaaaactctgtctgaaaaaaaaaaagcgacaccacatgggaggatgtttcttgggggaggtgtgctatgcccgagcaggctccagcaccaggggcgctggtgtgtcaggagcgcgcctccaggccggtgtgaactctgcaacttcacattgtgcctcctgccgccgctgctgcttccccgagccccaagctcaacctggagcatgagctcccaccctgaggaggaggctgtcaatactgtgtttctttccagggaggcaacgggtgggtgcgatgttgtcacttaagttgccacctctgcataagagctctctgatcagaaagcagtttctttgttgaccccagccagccttggctctcgggttgggaaatacagtcacggtatccatggagacctcttgaggtggagacgggcgttaaacccttctcaggcagtctgaggtggccagagtctgaagcaagcagcctctatggagcgaggggagcaggtgggcccagcctgagcggggcctctgcacagccagctttcccccacacctgtctccagccagggcacccacaggccctttctctcccagggatgaagcctgctgggagcgtgaatgacatggccctggatgccttcgacttggaccggatgaagcaggagatcctagaggaggtggtgagagagctccacaaggtgaaggaggagatcatcgacgccatcaggcaggagctgagtgggatcagcaccacgtaaggggccggcctcgctgcgctgattcgtcgagcccatccggcgacagaggacagccagaagcccagccagccccagactccagtgcaccagagcacgcacaggagcctgggcgcgctgctgtgaaacgtcctgacctgtgatcacacatgacagtgaggaaaccaagtgcaactcctgggtttttttagattctgcctgacacggaacaccaggtctgctcgtcttttttgtgttttatatttgcttatttaaggtacatttctttgggtttctagagacgcccctaagtcacctgcttcattagacggtttccaggttttctcccaggtgacgctgttagcgcctcagctggcggtgacagccggcccagcgtggcgccaccacacaccgcagagctgtccaggcacagctccgtccccagcgctcatggtgttgaaactgtctgtcatgcaccacggtgtctgtgtccacacagtaataaacggtttactgtccgca

SEQ ID NO: 425009 - DNA, 4836 bp, Homo sapiens
tagctagtagaggctgggtgttgaatcggccgaggctgaacatcatgaattcccaagaagggcccctccagccagcgtcaggtgcagaatggcccctctcctgatgagatggacatccagagaagacaagtgatggagcagcaccagcagcagcgtcaggaatctctagaaagaagaacctcggccacagggcccatcctcccaccaggacatccttcatctgcagccagcgcccccgtctcatgtagtgggcctccaccgccccccccacccccagtcccacctccacccactggggctaccccacctcccccacccccactgccagccggaggagcccaggggtccagccacgacgagagctccatgtcaggactggccgctgccatagctggggccaagctgagaagagtccaacggccagaagacgcatctggaggctccagtcccagtgggacctcaaagtccgatgccaaccgggcaagcagcgggggtggcggaggaggcctcatggaggaaatgaacaaactgctggccaagaggagaaaagcagcctcccagtcagacaagccagccgagaagaaggaagatgaaagccaaatggaagatcctagtacctccccctctccggggacccgagcagccagccagccacctaactcctcagaggctggccggaagccctgggagcggagcaactcggtggagaagcctgtgtcctcgattctgtccagaaccccgtctgtggcaaagagccccgaagctaagagcccccttcagtcgcagcctcactctaggtaccgaacaaccctcctgctcacatgtcccccagggtttggggctcctctgtcccccgtcccgtgactaacacccttgcacgctgtctcacgtcctggcatttaacaacttgctctgcgaaggtggtctgttctttcagacccaggacctcggggtcctgtcagtcagctgctccgtcttttccctctgagagagagaccaagggcaaggagggcagtgacctgtccacagaggtagtgcaggggggggccaacatggagtcccagctctggactcactacgtgtgacagtgggcaagttaggggacctctccaagcctctgttttccccccacaaagtgaggtctgttaacccctgctgcacagggtggtggtggggacagctgtgagcaacagctggacatggggtgtggtcactagccagggctgcaccctacagttcaaccagtcctagcactggcgctgagccctacccctttcctccagcccagagtccttcctctgcggccggcacacagaatcagtttccccacagacatactgaccatatttcccaagccaaaagctggcatgacaacatgatagaatatttggaactgagattgcccaaaaaggcagaggcagccagccacatagtatctggaggtacatgtggcctgaattggaaggcctctagaacctgcgtcaagaatgtctccatcgccaccacaaattgaagggaaaccacccttatcacagagcaggaggcattgaaactggccttgcagagctgaacaggtggtgagagcagagcagtgcaggtggacagagatgaggaagtcttagcagtcagctggggtttgtccaaggcttgtggtcagccaggccgtgtgctggggacagtccctgcctgcaaagagcaccgtgtgaacaaggccactgtggtcctgaggggtgctctggacagggtgcagggccacatggtggaagggacagggtgctttgcggagtggggtggggcaagcctctgtcgggagctggcattttcgttgacccggacgaggaggagtctgctctgcggagatcatggggacagcctcccaagctgaaggaagggtaagtgccagggccctgagcctgcagccacccgccaagctcccccgcacctccacctggaagcagacaggccatggggcaggggaacgggaagggtgaggaagagggtgtgggggagcgcggagttagaagtttgcattgtgttcatgcgcagggcccagtcatggaacttgaggcacagggtgccatggtggaggctgggaaggggaaggcaaccagagtgggcaaaacgagggccctggagcagacacggcagcaaggggagcctgcagcgctcccagcggactccgccacgtcctgctggtggagcaaaggcgggctgccatgttgtgagtggccaagggtcgctcactgggcaggaacattgtcaaggccattcatgcttggaatagggtctctcttcagctctgaggcaaatctgttctctaattttcagatgacttcaaggggaacgtgtaccaccacccctctggtgcgtcacattgcttaggaagcctgctgtgtttatcactgggtggctgtcagggctgagatggagagggccagggcctggcgaggtggagcagtcggcccaggtgtcccagcaattgttgctggaacagggtctggaacccacaggagaggcctgaaggacccagggccctctggctggatgcgtttgcctatcaggacccagaattacttacagacctgtttagggctaggcttggcctctttcttgagctcatctggaggggtgtggcaacactcattcttcatccttattctccctggctgtgggcaacactggtcctcagtgtcaccagatggtcctcctctgtgcccatgacccctcagcagccaaggctggccctgccagataaatgtgtgtgcccatgatcacacccaggggcacaggccacatacgtttccctgaaaccttgggctccagcctccatcccgtccatgtgggagggaacttgggtcccagcagtgtgtctttcagcaccaagtcatgtttaaaagaccagagagacaagcattttgccaagatcttccagggaagatgcatgtgtgacacattaacattcaaatcaggccagcgcggtgctcatgcctgtcatcccagcactttgggaggccgaggcgggaggatcacttgagcccaggacttggagaccagtctgggcaacacagtgagaccccatctctacaaaaagttaaaaaagaaaaaaaaaagggcacatgtctgtagtcccagctactcgggaggctcacttgagcctgggaggttgaggctgcagtgaggcatgatacgcctctgtactccagcctggttgacagagtgagaccctgtctcaaataagtaaaaataaaattcaaatcggttaccttagtttggaaacttttcaaagaagtagtccacgagaactaccttgaaagagcaaaaccagccaggtgcagtggctcacgcccataatcccagcactctgggaggcccaggtgggtggatctcgtgaggtcaggagttcaagaccagcttggccaacatggtgaaaccccatctctgctgaaaatacaaaagttagctgaaaatacaaaagtggcacatgcctgtaatgccagctactggggaggctgaggtaggagaattgcttgaacctgggaggcagaggttgcagtgagccaagattgcgccattgcactccaatctggggaacaagagcaaaactctgtctgaaaaaaaaaaagcgacaccacatgggaggatgtttcttgggggaggtgtgctatgcccgagcaggctccagcaccaggggcgctggtgtgtcaggagcgcgcctccaggccggtgtgaactctgcaacttcacattgtgcctcctgccgccgctgctgcttccccgagccccaagctcaacctggagcatgagctcccaccctgaggaggaggctgtcaatactgtgtttctttccagggaggcaacgggtgggtgcgatgttgtcacttaagttgccacctctgcataagagctctctgatcagaaagcagtttctttgttgaccccagccagccttggctctcgggttgggaaatacagtcacggtatccatggagacctcttgaggtggagacgggcgttaaacccttctcaggcagtctgaggtggccagagtctgaagcaagcagcctctatggagcgaggggagcaggtgggcccagcctgagcggggcctctgcacagccagctttcccccacacctgtctccagccagggcacccacaggccctttctctcccagggatgaagcctgctgggagcgtgaatgacatggccctggatgccttcgacttggaccggatgaagcaggagatcctagaggaggtggtgagagagctccacaaggtgaaggaggagatcatcgacgccatcaggcaggagctgagtgggatcagcaccacgtaaggggccggcctcgctgcgctgattcgtcgagcccatccggcgacagaggacagccagaagcccagccagccccagactccagtgcaccagagcacgcacaggagcctgggcgcgctgctgtgaaacgtcctgacctgtgatcacacatgacagtgaggaaaccaagtgcaactcctgggtttttttagattctgcctgacacggaacaccaggtctgctcgtcttttttgtgttttatatttgcttatttaaggtacatttctttgggtttctagagacgcccctaagtcacctgcttcattagacggtttccaggttttctcccaggtgacgctgttagcgcctcagctggcggtgacagccggcccagcgtggcgccaccacacaccgcagagctgtccaggcacagctccgtccccagcgctcatggtgttgaaactgtctgtcatgcaccacggtgtctgtgtccacacagtaataaacggtttactgtccgca

SEQ ID NO: 425010 - DNA, 5588 bp, Homo sapiens
  misc_feature (19)..(19): n is a, c, g, or t
  misc_feature (22)..(22): n is a, c, g, or t
  misc_feature (27)..(27): n is a, c, g, or t
  misc_feature (37)..(37): n is a, c, g, or t
  misc_feature (44)..(44): n is a, c, g, or t
  misc_feature (66)..(66): n is a, c, g, or t
  misc_feature (70)..(70): n is a, c, g, or t
cgatcttccttccggagcncgncagcntatatatcantcaagtnactccttctgacatggctccgnaagnaagatcgcgagtccggaggatggacaaagtaaggaagatgccacgggaatatggcggcggcggcggcgagtccggactaggcccgaagcgcgcgaccgcctgatcaacataggctggtgggagtacaggactcgcctcctcagggttccctgtgctgccacttttcagccatggccacaagtgaacagagtatctgccaagcccgggcttccgtgatggtctacgatgacaccagtaagaaatgggtaccaatcaaacctggccagcagggattcagccggatcaacatctaccacaacactgccagcaacaccttcagagtcgttggagtcaagttgcaggatcagcaggttgtgatcaattattcaatcgtgaaagggctgaagtacaatcaggccacgccaaccttccaccagtggcgagatgcccgccaggtctacggcttaaactttgcaagtaaagaagaggcaaccacgttctccaatgcaatgctgtttgccctgaacatcatgaattcccaagaaggaggcccctccagccagcgtcaggtgcagaatggcccctctcctgatgagatggacatccagagaagacaagtgatggagcagcaccagcagcagcgtcaggaatctctagaaagaagaacctcggccacagggcccatcctcccaccaggacatccttcatctgcagccagcgcccccgtctcatgtagtgggcctccaccgccccccccacccccagtcccacctccacccactggggctaccccacctcccccacccccactgccagccggaggagcccaggggtccagccacgacgagagctccatgtcaggactggccgctgccatagctggggccaagctgagaagagtccaacggccagaagacgcatctggaggctccagtcccagtgggacctcaaagtccgatgccaaccgggcaagcagcgggggtggcggaggaggcctcatggaggaaatgaacaaactgctggccaagaggagaaaagcagcctcccagtcagacaagccagccgagaagaaggaagatgaaagccaaatgtgaacatgcactaagtttatcattaacagagaagaaagaaggcttatttgaaagacgaaaagagccccaaatgtggagtccggtgacttgggcaggccctctgccatggcagagctggccctgggccaatggagttactgctccgaggaccagttccaccacctgaaaacctgcacccaggcatggccgcctcacagactgtgcgactgccagaggaagatcctagtacctccccctctccggggacccgagcagccagccagccacctaactcctcagaggctggccggaagccctgggagcggagcaactcggtggagaagcctgtgtcctcgattctgtccagaaccccgtctgtggcaaagagccccgaagctaagagcccccttcagtcgcagcctcactctaggtaccgaacaaccctcctgctcacatgtcccccagggtttggggctcctctgtcccccgtcccgtgactaacacccttgcacgctgtctcacgtcctggcatttaacaacttgctctgcgaaggtggtctgttctttcagacccaggacctcggggtcctgtcagtcagctgctccgtcttttccctctgagagagagaccaagggcaaggagggcagtgacctgtccacagaggtagtgcaggggggggccaacatggagtcccagctctggactcactacgtgtgacagtgggcaagttaggggacctctccaagcctctgttttccccccacaaagtgaggtctgttaacccctgctgcacagggtggtggtggggacagctgtgagcaacagctggacatggggtgtggtcactagccagggctgcaccctacagttcaaccagtcctagcactggcgctgagccctacccctttcctccagcccagagtccttcctctgcggccggcacacagaatcagtttccccacagacatactgaccatatttcccaagccaaaagctggcatgacaacatgatagaatatttggaactgagattgcccaaaaaggcagaggcagccagccacatagtatctggaggtacatgtggcctgaattggaaggcctctagaacctgcgtcaagaatgtctccatcgccaccacaaattgaagggaaaccacccttatcacagagcaggaggcattgaaactggccttgcagagctgaacaggtggtgagagcagagcagtgcaggtggacagagatgaggaagtcttagcagtcagctggggtttgtccaaggcttgtggtcagccaggccgtgtgctggggacagtccctgcctgcaaagagcaccgtgtgaacaaggccactgtggtcctgaggggtgctctggacagggtgcagggccacatggtggaagggacagggtgctttgcggagtggggtggggcaagcctctgtcgggagctggcattttcgttgacccggacgaggaggagtctgctctgcggagatcatggggacagcctcccaagctgaaggaagggtaagtgccagggccctgagcctgcagccacccgccaagctcccccgcacctccacctggaagcagacaggccatggggcaggggaacgggaagggtgaggaagagggtgtgggggagcgcggagttagaagtttgcattgtgttcatgcgcagggcccagtcatggaacttgaggcacagggtgccatggtggaggctgggaaggggaaggcaaccagagtgggcaaaacgagggccctggagcagacacggcagcaaggggagcctgcagcgctcccagcggactccgccacgtcctgctggtggagcaaaggcgggctgccatgttgtgagtggccaagggtcgctcactgggcaggaacattgtcaaggccattcatgcttggaatagggtctctcttcagctctgaggcaaatctgttctctaattttcagatgacttcaaggggaacgtgtaccaccacccctctggtgcgtcacattgcttaggaagcctgctgtgtttatcactgggtggctgtcagggctgagatggagagggccagggcctggcgaggtggagcagtcggcccaggtgtcccagcaattgttgctggaacagggtctggaacccacaggagaggcctgaaggacccagggccctctggctggatgcgtttgcctatcaggacccagaattacttacagacctgtttagggctaggcttggcctctttcttgagctcatctggaggggtgtggcaacactcattcttcatccttattctccctggctgtgggcaacactggtcctcagtgtcaccagatggtcctcctctgtgcccatgacccctcagcagccaaggctggccctgccagataaatgtgtgtgcccatgatcacacccaggggcacaggccacatacgtttccctgaaaccttgggctccagcctccatcccgtccatgtgggagggaacttgggtcccagcagtgtgtctttcagcaccaagtcatgtttaaaagaccagagagacaagcattttgccaagatcttccagggaagatgcatgtgtgacacattaacattcaaatcaggccagcgcggtgctcatgcctgtcatcccagcactttgggaggccgaggcgggaggatcacttgagcccaggacttggagaccagtctgggcaacacagtgagaccccatctctacaaaaagttaaaaaagaaaaaaaaaagggcacatgtctgtagtcccagctactcgggaggctcacttgagcctgggaggttgaggctgcagtgaggcatgatacgcctctgtactccagcctggttgacagagtgagaccctgtctcaaataagtaaaaataaaattcaaatcggttaccttagtttggaaacttttcaaagaagtagtccacgagaactaccttgaaagagcaaaaccagccaggtgcagtggctcacgcccataatcccagcactctgggaggcccaggtgggtggatctcgtgaggtcaggagttcaagaccagcttggccaacatggtgaaaccccatctctgctgaaaatacaaaagttagctgaaaatacaaaagtggcacatgcctgtaatgccagctactggggaggctgaggtaggagaattgcttgaacctgggaggcagaggttgcagtgagccaagattgcgccattgcactccaatctggggaacaagagcaaaactctgtctgaaaaaaaaaaagcgacaccacatgggaggatgtttcttgggggaggtgtgctatgcccgagcaggctccagcaccaggggcgctggtgtgtcaggagcgcgcctccaggccggtgtgaactctgcaacttcacattgtgcctcctgccgccgctgctgcttccccgagccccaagctcaacctggagcatgagctcccaccctgaggaggaggctgtcaatactgtgtttctttccagggaggcaacgggtgggtgcgatgttgtcacttaagttgccacctctgcataagagctctctgatcagaaagcagtttctttgttgaccccagccagccttggctctcgggttgggaaatacagtcacggtatccatggagacctcttgaggtggagacgggcgttaaacccttctcaggcagtctgaggtggccagagtctgaagcaagcagcctctatggagcgaggggagcaggtgggcccagcctgagcggggcctctgcacagccagctttcccccacacctgtctccagccagggcacccacaggccctttctctcccagggatgaagcctgctgggagcgtgaatgacatggccctggatgccttcgacttggaccggatgaagcaggagatcctagaggaggtggtgagagagctccacaaggtgaaggaggagatcatcgacgccatcaggcaggagctgagtgggatcagcaccacgtaaggggccggcctcgctgcgctgattcgtcgagcccatccggcgacagaggacagccagaagcccagccagccccagactccagtgcaccagagcacgcacaggagcctgggcgcgctgctgtgaaacgtcctgacctgtgatcacacatgacagtgaggaaaccaagtgcaactcctgggtttttttagattctgcctgacacggaacaccaggtctgctcgtcttttttgtgttttatatttgcttatttaaggtacatttctttgggtttctagagacgcccctaagtcacctgcttcattagacggtttccaggttttctcccaggtgacgctgttagcgcctcagctggcggtgacagccggcccagcgtggcgccaccacacaccgcagagctgtccaggcacagctccgtccccagcgctcatggtgttgaaactgtctgtcatgcaccacggtgtctgtgtccacacagtaataaacggtttactgtccgca

SEQ ID NO: 425011 - DNA, 2210 bp, Homo sapiens
  misc_feature (19)..(19): n is a, c, g, or t
  misc_feature (22)..(22): n is a, c, g, or t
  misc_feature (27)..(27): n is a, c, g, or t
  misc_feature (37)..(37): n is a, c, g, or t
  misc_feature (44)..(44): n is a, c, g, or t
  misc_feature (66)..(66): n is a, c, g, or t
  misc_feature (70)..(70): n is a, c, g, or t
cgatcttccttccggagcncgncagcntatatatcantcaagtnactccttctgacatggctccgnaagnaagatcgcgagtccggaggatggacaaagtaaggaagatgccacgggaatatggcggcggcggcggcgagtccggactaggcccgaagcgcgcgaccgcctgatcaacataggctggtgggagtacaggactcgcctcctcagggttccctgtgctgccacttttcagccatggccacaagtgaacagagtatctgccaagcccgggcttccgtgatggtctacgatgacaccagtaagaaatgggtaccaatcaaacctggccagcagggattcagccggatcaacatctaccacaacactgccagcaacaccttcagagtcgttggagtcaagttgcaggatcagcaggttgtgatcaattattcaatcgtgaaagggctgaagtacaatcaggccacgccaaccttccaccagtggcgagatgcccgccaggtctacggcttaaactttgcaagtaaagaagaggcaaccacgttctccaatgcaatgctgtttgccctgaacatcatgaattcccaagaaggaggcccctccagccagcgtcaggtgcagaatggcccctctcctgatgagatggacatccagagaagacaagtgatggagcagcaccagcagcagcgtcaggaatctctagaaagaagaacctcggccacagggcccatcctcccaccaggacatccttcatctgcagccagcgcccccgtctcatgtagtgggcctccaccgccccccccacccccagtcccacctccacccactggggctaccccacctcccccacccccactgccagccggaggagcccaggggtccagccacgacgagagctccatgtcaggactggccgctgccatagctggggccaagctgagaagagtccaacggccagaagacgcatctggaggctccagtcccagtgggacctcaaagtccgatgccaaccgggcaagcagcgggggtggcggaggaggcctcatggaggaaatgaacaaactgctggccaagaggagaaaagcagcctcccagtcagacaagccagccgagaagaaggaagatgaaagccaaatgtgaacatgcactaagtttatcattaacagagaagaaagaaggcttatttgaaagacgaaaagagccccaaatgtggagtccggtgacttgggcaggccctctgccatggcagagctggccctgggccaatggagttactgctccgaggaccagttccaccacctgaaaacctgcacccaggcatggccgcctcacagactgtgcgactgccagaggaagatcctagtacctccccctctccggggacccgagcagccagccagccacctaactcctcagaggctggccggaagccctgggagcggagcaactcggtggagaagcctgtgtcctcgattctgtccagaaccccgtctgtggcaaagagccccgaagctaagagcccccttcagtcgcagcctcactctaggatgaagcctgctgggagcgtgaatgacatggccctggatgccttcgacttggaccggatgaagcaggagatcctagaggaggtggtgagagagctccacaaggtgaaggaggagatcatcgacgccatcaggcaggagctgagtgggatcagcaccacgtaaggggccggcctcgctgcgctgattcgtcgagcccatccggcgacagaggacagccagaagcccagccagccccagactccagtgcaccagagcacgcacaggagcctgggcgcgctgctgtgaaacgtcctgacctgtgatcacacatgacagtgaggaaaccaagtgcaactcctgggtttttttagattctgcctgacacggaacaccaggtctgctcgtcttttttgtgttttatatttgcttatttaaggtacatttctttgggtttctagagacgcccctaagtcacctgcttcattagacggtttccaggttttctcccaggtgacgctgttagcgcctcagctggcggtgacagccggcccagcgtggcgccaccacacaccgcagagctgtccaggcacagctccgtccccagcgctcatggtgttgaaactgtctgtcatgcaccacggtgtctgtgtccacacagtaataaacggtttactgtccgca

SEQ ID NO: 425012 - DNA, 5565 bp, Homo sapiens
  misc_feature (19)..(19): n is a, c, g, or t
  misc_feature (22)..(22): n is a, c, g, or t
  misc_feature (27)..(27): n is a, c, g, or t
  misc_feature (37)..(37): n is a, c, g, or t
  misc_feature (44)..(44): n is a, c, g, or t
  misc_feature (66)..(66): n is a, c, g, or t
  misc_feature (70)..(70): n is a, c, g, or t
cgatcttccttccggagcncgncagcntatatatcantcaagtnactccttctgacatggctccgnaagnaagatcgcgagtccggaggatggacaaagtaaggaagatgccacgggaatatggcggcggcggcggcgagtccggactaggcccgaagcgcgcgaccgcctgatcaacataggctggtgggagtacaggactcgcctcctcagggttccctgtgctgccacttttcagccatggccacaagtgaacagagtatctgccaagcccgggcttccgtgatggtctacgatgacaccagtaagaaatgggtaccaatcaaacctggccagcagggattcagccggatcaacatctaccacaacactgccagcaacaccttcagagtcgttggagtcaagttgcaggatcagcaggttgtgatcaattattcaatcgtgaaagggctgaagtacaatcaggccacgccaaccttccaccagtggcgagatgcccgccaggtctacggcttaaactttgcaagtaaagaagaggcaaccacgttctccaatgcaatgctgtttgccctgaacatcatgaattcccaagaaggaggcccctccagccagcgtcaggtgcagaatggcccctctcctgatgagatggacatccagagaagacaagtgatggagcagcaccagcagcagcgtcaggaatctctagaaagaagaacctcggccacagggcccatcctcccaccaggacatccttcatctgcagccagcgcccccgtctcatgtagtgggcctccaccgccccccccacccccagtcccacctccacccactggggctaccccacctcccccacccccactgccagccggaggagcccaggggtccagccacgacgagagctccatgtcaggactggccgctgccatagctggggccaagctgagaagagtccaacggccagaagacgcatctggaggctccagtcccagtgggacctcaaagtccgatgccaaccgggcaagcagcgggggtggcggaggaggcctcatggaggaaatgaacaaactgctggccaagaggagaaaagcagcctcccagtcagacaagccagccgagaagaaggaagatgaaagccaaatggaagatcctagtacctccccctctccggggacccgagcagccagccagccacctaactcctcagaggctggccggaagccctgggagcggagcaactcggtggagaagcctgtgtcctcgattctgtccagaaccccgtctgtggcaaagagccccgaagctaagagcccccttcagtcgcagcctcactctaggtaccgaacaaccctcctgctcacatgtcccccagggtttggggctcctctgtcccccgtcccgtgactaacacccttgcacgctgtctcacgtcctggcatttaacaacttgctctgcgaaggtggtctgttctttcagacccaggacctcggggtcctgtcagtcagctgctccgtcttttccctctgagagagagaccaagggcaaggagggcagtgacctgtccacagaggtagtgcaggggggggccaacatggagtcccagctctggactcactacgtgtgacagtgggcaagttaggggacctctccaagcctctgttttccccccacaaagtgaggtctgttaacccctgctgcacagggtggtggtggggacagctgtgagcaacagctggacatggggtgtggtcactagccagggctgcaccctacagttcaaccagtcctagcactggcgctgagccctacccctttcctccagcccagagtccttcctctgcggccggcacacagaatcagtttccccacagacatactgaccatatttcccaagccaaaagctggcatgacaacatgatagaatatttggaactgagattgcccaaaaaggcagaggcagccagccacatagtatctggaggtacatgtggcctgaattggaaggcctctagaacctgcgtcaagaatgtctccatcgccaccacaaattgaagggaaaccacccttatcacagagcaggaggcattgaaactggccttgcagagctgaacaggtggtgagagcagagcagtgcaggtggacagagatgaggaagtcttagcagtcagctggggtttgtccaaggcttgtggtcagccaggccgtgtgctggggacagtccctgcctgcaaagagcaccgtgtgaacaaggccactgtggtcctgaggggtgctctggacagggtgcagggccacatggtggaagggacagggtgctttgcggagtggggtggggcaagcctctgtcgggagctggcattttcgttgacccggacgaggaggagtctgctctgcggagatcatggggacagcctcccaagctgaaggaagggtaagtgccagggccctgagcctgcagccacccgccaagctcccccgcacctccacctggaagcagacaggccatggggcaggggaacgggaagggtgaggaagagggtgtgggggagcgcggagttagaagtttgcattgtgttcatgcgcagggcccagtcatggaacttgaggcacagggtgccatggtggaggctgggaaggggaaggcaaccagagtgggcaaaacgagggccctggagcagacacggcagcaaggggagcctgcagcgctcccagcggactccgccacgtcctgctggtggagcaaaggcgggctgccatgttgtgagtggccaagggtcgctcactgggcaggaacattgtcaaggccattcatgcttggaatagggtctctcttcagctctgaggcaaatctgttctctaattttcagatgacttcaaggggaacgtgtaccaccacccctctggtgcgtcacattgcttaggaagcctgctgtgtttatcactgggtggctgtcagggctgagatggagagggccagggcctggcgaggtggagcagtcggcccaggtgtcccagcaattgttgctggaacagggtctggaacccacaggagaggcctgaaggacccagggccctctggctggatgcgtttgcctatcaggacccagaattacttacagacctgtttagggctaggcttggcctctttcttgagctcatctggaggggtgtggcaacactcattcttcatccttattctccctggctgtgggcaacactggtcctcagtgtcaccagatggtcctcctctgtgcccatgacccctcagcagccaaggctggccctgccagataaatgtgtgtgcccatgatcacacccaggggcacaggccacatacgtttccctgaaaccttgggctccagcctccatcccgtccatgtgggagggaacttgggtcccagcagtgtgtctttcagcaccaagtcatgtttaaaagaccagagagacaagcattttgccaagatcttccagggaagatgcatgtgtgacacattaacattcaaatcaggccagcgcggtgctcatgcctgtcatcccagcactttgggaggccgaggcgggaggatcacttgagcccaggacttggagaccagtctgggcaacacagtgagaccccatctctacaaaaagttaaaaaagaaaaaaaaaagggcacatgtctgtagtcccagctactcgggaggctcacttgagcctgggaggttgaggctgcagtgaggcatgatacgcctctgtactccagcctggttgacagagtgagaccctgtctcaaataagtaaaaataaaattcaaatcggttaccttagtttggaaacttttcaaagaagtagtccacgagaactaccttgaaagagcaaaaccagccaggtgcagtggctcacgcccataatcccagcactctgggaggcccaggtgggtggatctcgtgaggtcaggagttcaagaccagcttggccaacatggtgaaaccccatctctgctgaaaatacaaaagttagctgaaaatacaaaagtggcacatgcctgtaatgccagctactggggaggctgaggtaggagaattgcttgaacctgggaggcagaggttgcagtgagccaagattgcgccattgcactccaatctggggaacaagagcaaaactctgtctgaaaaaaaaaaagcgacaccacatgggaggatgtttcttgggggaggtgtgctatgcccgagcaggctccagcaccaggggcgctggtgtgtcaggagcgcgcctccaggccggtgtgaactctgcaacttcacattgtgcctcctgccgccgctgctgcttccccgagccccaagctcaacctggagcatgagctcccaccctgaggaggaggctgtcaatactgtgtttctttccagggaggcaacgggtgggtgcgatgttgtcacttaagttgccacctctgcataagagctctctgatcagaaagcagtttctttgttgaccccagccagccttggctctcgggttgggaaatacagtcacggtatccatggagacctcttgaggtggagacgggcgttaaacccttctcaggcagtctgaggtggccagagtctgaagcaagcagcctctatggagcgaggggagcaggtgggcccagcctgagcggggcctctgcacagccagctttcccccacacctgtctccagccagggcacccacaggccctttctctcccagggatgaagcctgctgggagcgtgaatgacatggccctggatgccttcgacttggaccggatgaagcaggagatcctagaggaggtggtgagagagctccacaaggtgaaggaggagatcatcgacgccatcaggcaggagctgagtgggatcagcaccacgtaaggggccggcctcgctgcgctgattcgtcgagcccatccggcgacagaggacagccagaagcccagccagccccagactccagtgcaccagagcacgcacaggagcctgggcgcgctgctgtgaaacgtcctgacctgtgatcacacatgacagtgaggaaaccaagtgcaactcctgggtttttttagattctgcctgacacggaacaccaggtctgctcgtcttttttgtgttttatatttgcttatttaaggtacatttctttgggtttctagagacgcccctaagtcacctgcttcattagacggtttccaggttttctcccaggtgacgctgttagcgcctcagctggcggtgacagccggcccagcgtggcgccaccacacaccgcagagctgtccaggcacagctccgtccccagcgctcatggtgttgaaactgtctgtcatgcaccacggtgtctgtgtccacacagtaataaacggtttactgtccgcaaaaaaactacaaaaaatctccgagggcatcctattgccggagcgcgcgcgacacaaccaggcacatgaacctggcgcccatttgcaagaggctggtccctggacccgagcttcctttgtccacagggtgcacgatctcccgggtctcccttatgggaagccgattaacttcagataagcagtgtacccggta

SEQ ID NO: 425013 - DNA, 5507 bp, Homo sapiens
  misc_feature (19)..(19): n is a, c, g, or t
  misc_feature (22)..(22): n is a, c, g, or t
  misc_feature (27)..(27): n is a, c, g, or t
  misc_feature (37)..(37): n is a, c, g, or t
  misc_feature (44)..(44): n is a, c, g, or t
  misc_feature (66)..(66): n is a, c, g, or t
  misc_feature (70)..(70): n is a, c, g, or t
  misc_feature (5380)..(5380): n is a, c, g, or t
cgatcttccttccggagcncgncagcntatatatcantcaagtnactccttctgacatggctccgnaagnaagatcgcgagtccggaggatggacaaagtaaggaagatgccacgggaatatggcggcggcggcggcgagtccggactaggcccgaagcgcgcgaccgcctgatcaacataggctggtgggagtacaggactcgcctcctcagggttccctgtgctgccacttttcagccatggccacaagtgaacagagtatctgccaagcccgggcttccgtgatggtctacgatgacaccagtaagaaatgggtaccaatcaaacctggccagcagggattcagccggatcaacatctaccacaacactgccagcaacaccttcagagtcgttggagtcaagttgcaggatcagcaggttgtgatcaattattcaatcgtgaaagggctgaagtacaatcaggccacgccaaccttccaccagtggcgagatgcccgccaggtctacggcttaaactttgcaagtaaagaagaggcaaccacgttctccaatgcaatgctgtttgccctgaacatcatgaattcccaagaaggaggcccctccagccagcgtcaggtgcagaatggcccctctcctgatgagatggacatccagagaagacaagtgatggagcagcaccagcagcagcgtcaggaatctctagaaagaagaacctcggccacagggcccatcctcccaccaggacatccttcatctgcagccagcgcccccgtctcatgtagtgggcctccaccgccccccccacccccagtcccacctccacccactggggctaccccacctcccccacccccactgccagccggaggagcccaggggtccagccacgacgagagctccatgtcaggactggccgctgccatagctggggccaagctgagaagagtccaacggccagaagacgcatctggaggctccagtcccagtgggacctcaaagtccgatgccaaccgggcaagcagcgggggtggcggaggaggcctcatggaggaaatgaacaaactgctggccaagaggagaaaagcagcctcccagtcagacaagccagccgagaagaaggaagatgaaagccaaatggaagatcctagtacctccccctctccggggacccgagcagccagccagccacctaactcctcagaggctggccggaagccctgggagcggagcaactcggtggagaagcctgtgtcctcgattctgtccagaaccccgtctgtggcaaagagccccgaagctaagagcccccttcagtcgcagcctcactctaggtaccgaacaaccctcctgctcacatgtcccccagggtttggggctcctctgtcccccgtcccgtgactaacacccttgcacgctgtctcacgtcctggcatttaacaacttgctctgcgaaggtggtctgttctttcagacccaggacctcggggtcctgtcagtcagctgctccgtcttttccctctgagagagagaccaagggcaaggagggcagtgacctgtccacagaggtagtgcaggggggggccaacatggagtcccagctctggactcactacgtgtgacagtgggcaagttaggggacctctccaagcctctgttttccccccacaaagtgaggtctgttaacccctgctgcacagggtggtggtggggacagctgtgagcaacagctggacatggggtgtggtcactagccagggctgcaccctacagttcaaccagtcctagcactggcgctgagccctacccctttcctccagcccagagtccttcctctgcggccggcacacagaatcagtttccccacagacatactgaccatatttcccaagccaaaagctggcatgacaacatgatagaatatttggaactgagattgcccaaaaaggcagaggcagccagccacatagtatctggaggtacatgtggcctgaattggaaggcctctagaacctgcgtcaagaatgtctccatcgccaccacaaattgaagggaaaccacccttatcacagagcaggaggcattgaaactggccttgcagagctgaacaggtggtgagagcagagcagtgcaggtggacagagatgaggaagtcttagcagtcagctggggtttgtccaaggcttgtggtcagccaggccgtgtgctggggacagtccctgcctgcaaagagcaccgtgtgaacaaggccactgtggtcctgaggggtgctctggacagggtgcagggccacatggtggaagggacagggtgctttgcggagtggggtggggcaagcctctgtcgggagctggcattttcgttgacccggacgaggaggagtctgctctgcggagatcatggggacagcctcccaagctgaaggaagggtaagtgccagggccctgagcctgcagccacccgccaagctcccccgcacctccacctggaagcagacaggccatggggcaggggaacgggaagggtgaggaagagggtgtgggggagcgcggagttagaagtttgcattgtgttcatgcgcagggcccagtcatggaacttgaggcacagggtgccatggtggaggctgggaaggggaaggcaaccagagtgggcaaaacgagggccctggagcagacacggcagcaaggggagcctgcagcgctcccagcggactccgccacgtcctgctggtggagcaaaggcgggctgccatgttgtgagtggccaagggtcgctcactgggcaggaacattgtcaaggccattcatgcttggaatagggtctctcttcagctctgaggcaaatctgttctctaattttcagatgacttcaaggggaacgtgtaccaccacccctctggtgcgtcacattgcttaggaagcctgctgtgtttatcactgggtggctgtcagggctgagatggagagggccagggcctggcgaggtggagcagtcggcccaggtgtcccagcaattgttgctggaacagggtctggaacccacaggagaggcctgaaggacccagggccctctggctggatgcgtttgcctatcaggacccagaattacttacagacctgtttagggctaggcttggcctctttcttgagctcatctggaggggtgtggcaacactcattcttcatccttattctccctggctgtgggcaacactggtcctcagtgtcaccagatggtcctcctctgtgcccatgacccctcagcagccaaggctggccctgccagataaatgtgtgtgcccatgatcacacccaggggcacaggccacatacgtttccctgaaaccttgggctccagcctccatcccgtccatgtgggagggaacttgggtcccagcagtgtgtctttcagcaccaagtcatgtttaaaagaccagagagacaagcattttgccaagatcttccagggaagatgcatgtgtgacacattaacattcaaatcaggccagcgcggtgctcatgcctgtcatcccagcactttgggaggccgaggcgggaggatcacttgagcccaggacttggagaccagtctgggcaacacagtgagaccccatctctacaaaaagttaaaaaagaaaaaaaaaagggcacatgtctgtagtcccagctactcgggaggctcacttgagcctgggaggttgaggctgcagtgaggcatgatacgcctctgtactccagcctggttgacagagtgagaccctgtctcaaataagtaaaaataaaattcaaatcggttaccttagtttggaaacttttcaaagaagtagtccacgagaactaccttgaaagagcaaaaccagccaggtgcagtggctcacgcccataatcccagcactctgggaggcccaggtgggtggatctcgtgaggtcaggagttcaagaccagcttggccaacatggtgaaaccccatctctgctgaaaatacaaaagttagctgaaaatacaaaagtggcacatgcctgtaatgccagctactggggaggctgaggtaggagaattgcttgaacctgggaggcagaggttgcagtgagccaagattgcgccattgcactccaatctggggaacaagagcaaaactctgtctgaaaaaaaaaaagcgacaccacatgggaggatgtttcttgggggaggtgtgctatgcccgagcaggctccagcaccaggggcgctggtgtgtcaggagcgcgcctccaggccggtgtgaactctgcaacttcacattgtgcctcctgccgccgctgctgcttccccgagccccaagctcaacctggagcatgagctcccaccctgaggaggaggctgtcaatactgtgtttctttccagggaggcaacgggtgggtgcgatgttgtcacttaagttgccacctctgcataagagctctctgatcagaaagcagtttctttgttgaccccagccagccttggctctcgggttgggaaatacagtcacggtatccatggagacctcttgaggtggagacgggcgttaaacccttctcaggcagtctgaggtggccagagtctgaagcaagcagcctctatggagcgaggggagcaggtgggcccagcctgagcggggcctctgcacagccagctttcccccacacctgtctccagccagggcacccacaggccctttctctcccagggatgaagcctgctgggagcgtgaatgacatggccctggatgccttcgacttggaccggatgaagcaggagatcctagaggaggtggtgagagagctccacaaggtgaaggaggagatcatcgacgccatcaggcaggagctgagtgggatcagcaccacgtaaggggccggcctcgctgcgctgattcgtcgagcccatccggcgacagaggacagccagaagcccagccagccccagactccagtgcaccagagcacgcacaggagcctgggcgcgctgctgtgaaacgtcctgacctgtgatcacacatgacagtgaggaaaccaagtgcaactcctgggtttttttagattctgcctgacacggaacaccaggtctgctcgtcttttttgtgttttatatttgcttatttaaggtacatttctttgggtttctagagacgcccctaagtcacctgcttcattagacggtttccaggttttctcccaggtgacgctgttagcgcctcagctggcggtgacagccggcccagcgtggcgccaccacacaccgcagagctgtccaggcacagctccgtccccagcgctcatggtgttgaaactgtctgtcatgcaccacggtgtctgtgtccacacagtaataaacggtttactgtccgcaaaaaaangaaaaaaaaaaaaggggggtttagtggggggggggaaaagaggagtaaagggccgggcatgggtttcggaccgttttgtaaagggggaaaggggggcccaaagggaggggaaaaagaaacgggaccg

SEQ ID NO: 425014 - DNA, 5445 bp, Homo sapiens
  misc_feature (19)..(19): n is a, c, g, or t
  misc_feature (22)..(22): n is a, c, g, or t
  misc_feature (27)..(27): n is a, c, g, or t
  misc_feature (37)..(37): n is a, c, g, or t
  misc_feature (44)..(44): n is a, c, g, or t
  misc_feature (66)..(66): n is a, c, g, or t
  misc_feature (70)..(70): n is a, c, g, or t
cgatcttccttccggagcncgncagcntatatatcantcaagtnactccttctgacatggctccgnaagnaagatcgcgagtccggaggatggacaaagtaaggaagatgccacgggaatatggcggcggcggcggcgagtccggactaggcccgaagcgcgcgaccgcctgatcaacataggctggtgggagtacaggactcgcctcctcagggttccctgtgctgccacttttcagccatggccacaagtgaacagagtatctgccaagcccgggcttccgtgatggtctacgatgacaccagtaagaaatgggtaccaatcaaacctggccagcagggattcagccggatcaacatctaccacaacactgccagcaacaccttcagagtcgttggagtcaagttgcaggatcagcaggttgtgatcaattattcaatcgtgaaagggctgaagtacaatcaggccacgccaaccttccaccagtggcgagatgcccgccaggtctacggcttaaactttgcaagtaaagaagaggcaaccacgttctccaatgcaatgctgtttgccctgaacatcatgaattcccaagaaggaggcccctccagccagcgtcaggtgcagaatggcccctctcctgatgagatggacatccagagaagacaagtgatggagcagcaccagcagcagcgtcaggaatctctagaaagaagaacctcggccacagggcccatcctcccaccaggacatccttcatctgcagccagcgcccccgtctcatgtagtgggcctccaccgccccccccacccccagtcccacctccacccactggggctaccccacctcccccacccccactgccagccggaggagcccaggggtccagccacgacgagagctccatgtcaggactggccgctgccatagctggggccaagctgagaagagtccaacggccagaagacgcatctggaggctccagtcccagtgggacctcaaagtccgatgccaaccgggcaagcagcgggggtggcggaggaggcctcatggaggaaatgaacaaactgctggccaagaggagaaaagcagcctcccagtcagacaagccagccgagaagaaggaagatgaaagccaaatggaagatcctagtacctccccctctccggggacccgagcagccagccagccacctaactcctcagaggctggccggaagccctgggagcggagcaactcggtggagaagcctgtgtcctcgattctgtccagaaccccgtctgtggcaaagagccccgaagctaagagcccccttcagtcgcagcctcactctaggtaccgaacaaccctcctgctcacatgtcccccagggtttggggctcctctgtcccccgtcccgtgactaacacccttgcacgctgtctcacgtcctggcatttaacaacttgctctgcgaaggtggtctgttctttcagacccaggacctcggggtcctgtcagtcagctgctccgtcttttccctctgagagagagaccaagggcaaggagggcagtgacctgtccacagaggtagtgcaggggggggccaacatggagtcccagctctggactcactacgtgtgacagtgggcaagttaggggacctctccaagcctctgttttccccccacaaagtgaggtctgttaacccctgctgcacagggtggtggtggggacagctgtgagcaacagctggacatggggtgtggtcactagccagggctgcaccctacagttcaaccagtcctagcactggcgctgagccctacccctttcctccagcccagagtccttcctctgcggccggcacacagaatcagtttccccacagacatactgaccatatttcccaagccaaaagctggcatgacaacatgatagaatatttggaactgagattgcccaaaaaggcagaggcagccagccacatagtatctggaggtacatgtggcctgaattggaaggcctctagaacctgcgtcaagaatgtctccatcgccaccacaaattgaagggaaaccacccttatcacagagcaggaggcattgaaactggccttgcagagctgaacaggtggtgagagcagagcagtgcaggtggacagagatgaggaagtcttagcagtcagctggggtttgtccaaggcttgtggtcagccaggccgtgtgctggggacagtccctgcctgcaaagagcaccgtgtgaacaaggccactgtggtcctgaggggtgctctggacagggtgcagggccacatggtggaagggacagggtgctttgcggagtggggtggggcaagcctctgtcgggagctggcattttcgttgacccggacgaggaggagtctgctctgcggagatcatggggacagcctcccaagctgaaggaagggtaagtgccagggccctgagcctgcagccacccgccaagctcccccgcacctccacctggaagcagacaggccatggggcaggggaacgggaagggtgaggaagagggtgtgggggagcgcggagttagaagtttgcattgtgttcatgcgcagggcccagtcatggaacttgaggcacagggtgccatggtggaggctgggaaggggaaggcaaccagagtgggcaaaacgagggccctggagcagacacggcagcaaggggagcctgcagcgctcccagcggactccgccacgtcctgctggtggagcaaaggcgggctgccatgttgtgagtggccaagggtcgctcactgggcaggaacattgtcaaggccattcatgcttggaatagggtctctcttcagctctgaggcaaatctgttctctaattttcagatgacttcaaggggaacgtgtaccaccacccctctggtgcgtcacattgcttaggaagcctgctgtgtttatcactgggtggctgtcagggctgagatggagagggccagggcctggcgaggtggagcagtcggcccaggtgtcccagcaattgttgctggaacagggtctggaacccacaggagaggcctgaaggacccagggccctctggctggatgcgtttgcctatcaggacccagaattacttacagacctgtttagggctaggcttggcctctttcttgagctcatctggaggggtgtggcaacactcattcttcatccttattctccctggctgtgggcaacactggtcctcagtgtcaccagatggtcctcctctgtgcccatgacccctcagcagccaaggctggccctgccagataaatgtgtgtgcccatgatcacacccaggggcacaggccacatacgtttccctgaaaccttgggctccagcctccatcccgtccatgtgggagggaacttgggtcccagcagtgtgtctttcagcaccaagtcatgtttaaaagaccagagagacaagcattttgccaagatcttccagggaagatgcatgtgtgacacattaacattcaaatcaggccagcgcggtgctcatgcctgtcatcccagcactttgggaggccgaggcgggaggatcacttgagcccaggacttggagaccagtctgggcaacacagtgagaccccatctctacaaaaagttaaaaaagaaaaaaaaaagggcacatgtctgtagtcccagctactcgggaggctcacttgagcctgggaggttgaggctgcagtgaggcatgatacgcctctgtactccagcctggttgacagagtgagaccctgtctcaaataagtaaaaataaaattcaaatcggttaccttagtttggaaacttttcaaagaagtagtccacgagaactaccttgaaagagcaaaaccagccaggtgcagtggctcacgcccataatcccagcactctgggaggcccaggtgggtggatctcgtgaggtcaggagttcaagaccagcttggccaacatggtgaaaccccatctctgctgaaaatacaaaagttagctgaaaatacaaaagtggcacatgcctgtaatgccagctactggggaggctgaggtaggagaattgcttgaacctgggaggcagaggttgcagtgagccaagattgcgccattgcactccaatctggggaacaagagcaaaactctgtctgaaaaaaaaaaagcgacaccacatgggaggatgtttcttgggggaggtgtgctatgcccgagcaggctccagcaccaggggcgctggtgtgtcaggagcgcgcctccaggccggtgtgaactctgcaacttcacattgtgcctcctgccgccgctgctgcttccccgagccccaagctcaacctggagcatgagctcccaccctgaggaggaggctgtcaatactgtgtttctttccagggaggcaacgggtgggtgcgatgttgtcacttaagttgccacctctgcataagagctctctgatcagaaagcagtttctttgttgaccccagccagccttggctctcgggttgggaaatacagtcacggtatccatggagacctcttgaggtggagacgggcgttaaacccttctcaggcagtctgaggtggccagagtctgaagcaagcagcctctatggagcgaggggagcaggtgggcccagcctgagcggggcctctgcacagccagctttcccccacacctgtctccagccagggcacccacaggccctttctctcccagggatgaagcctgctgggagcgtgaatgacatggccctggatgccttcgacttggaccggatgaagcaggagatcctagaggaggtggtgagagagctccacaaggtgaaggaggagatcatcgacgccatcaggcaggagctgagtgggatcagcaccacgtaaggggccggcctcgctgcgctgattcgtcgagcccatccggcgacagaggacagccagaagcccagccagccccagactccagtgcaccagagcacgcacaggagcctgggcgcgctgctgtgaaacgtcctgacctgtgatcacacatgacagtgaggaaaccaagtgcaactcctgggtttttttagattctgcctgacacggaacaccaggtctgctcgtcttttttgtgttttatatttgcttatttaaggtacatttctttgggtttctagagacgcccctaagtcacctgcttcattagacggtttccaggttttctcccaggtgacgctgttagcgcctcagctggcggtgacagccggcccagcgtggcgccaccacacagtaataaacggtttactgtccgcaccctcgggctcaggccctcgcattggtccatcacgctccgggctggggatgccccttttcagagaagggcccgggaccacggtgaccaggagtcgtaggagcaagatggcggtcttcgacaggaagctgggctcagaacattcccaagccccgggaagg

SEQ ID NO: 425015 - DNA, 1858 bp, Homo sapiens
  misc_feature (19)..(19): n is a, c, g, or t
  misc_feature (22)..(22): n is a, c, g, or t
  misc_feature (27)..(27): n is a, c, g, or t
  misc_feature (37)..(37): n is a, c, g, or t
  misc_feature (44)..(44): n is a, c, g, or t
  misc_feature (66)..(66): n is a, c, g, or t
  misc_feature (70)..(70): n is a, c, g, or t
cgatcttccttccggagcncgncagcntatatatcantcaagtnactccttctgacatggctccgnaagnaagatcgcgagtccggaggatggacaaagtaaggaagatgccacgggaatatggcggcggcggcggcgagtccggactaggcccgaagcgcgcgaccgcctgatcaacataggctggtgggagtacaggactcgcctcctcagggttccctgtgctgccacttttcagccatggccacaagtgaacagagtatctgccaagcccgggcttccgtgatggtctacgatgacaccagtaagaaatgggtaccaatcaaacctggccagcagggattcagccggatcaacatctaccacaacactgccagcaacaccttcagagtcgttggagtcaagttgcaggatcagcaggttgtgatcaattattcaatcgtgaaagggctgaagtacaatcaggccacgccaaccttccaccagtggcgagatgcccgccaggtctacggcttaaactttgcaagtaaagaagaggcaaccacgttctccaatgcaatgctgtttgccctgaacatcatgaattcccaagaaggaggcccctccagccagcgtcaggtgcagaatggcccctctcctgatgagatggacatccagagaagacaagtgatggagcagcaccagcagcagcgtcaggaatctctagaaagaagaacctcggccacagggcccatcctcccaccaggacatccttcatctgcagccagcgcccccgtctcatgtagtgggcctccaccgccccccccacccccagtcccacctccacccactggggctaccccacctcccccacccccactgccagccggaggagcccaggggtccagccacgacgagagctccatgtcaggactggccgctgccatagctggggccaagctgagaagagtccaacggccagaagacgcatctggaggctccagtcccagtgggacctcaaagtccgatgccaaccgggcaagcagcgggggtggcggaggaggcctcatggaggaaatgaacaaactgctggccaagaggagaaaagcagcctcccagtcagacaagccagccgagaagaaggaagatgaaagccaaatggaagatcctagtacctccccctctccggggacccgagcagccagccagccacctaactcctcagaggctggccggaagccctgggagcggagcaactcggtggagaagcctgtgtcctcgattctgtccagaaccccgtctgtggcaaagagccccgaagctaagagcccccttcagtcgcagcctcactctaggtaccgaacaaccctcctgctcacatgtcccccagggtttggggctcctctgtcccccgtcccgtgactaacacccttgcacgctgtctcacgtcctggcatttaacaacttgctctgcgaaggtggtctgttctttcagacccaggacctcggggtcctgtcagtcagctgctccgtcttttccctctgagagagagaccaagggcaaggagggcagtgacctgtccacagaggtagtgcaggggggggccaacatggagtcccagctctggactcactacgtgtgacagtgggcaagttaggggacctctccaagcctctgttttccccccacaaagtgaggtctgttaacccctgctgcacagggtggtggtggggacagctgtgagcaacagctggacatggggtgtggtcactagccagggctgcaccctacagtttaccctttctacaccttggcgtttgactttaaaccctttcttcaattccttttttccttttttttgttgacgattaatcatct

SEQ ID NO: 425016 - DNA, 862 bp, Homo sapiens
  misc_feature (19)..(19): n is a, c, g, or t
  misc_feature (22)..(22): n is a, c, g, or t
  misc_feature (27)..(27): n is a, c, g, or t
  misc_feature (37)..(37): n is a, c, g, or t
  misc_feature (44)..(44): n is a, c, g, or t
  misc_feature (66)..(66): n is a, c, g, or t
  misc_feature (70)..(70): n is a, c, g, or t
cgatcttccttccggagcncgncagcntatatatcantcaagtnactccttctgacatggctccgnaagnaagatcgcgagtccggaggatggacaaagtaaggaagatgccacgggaatatggcggcggcggcggcgagtccggactaggcccgaagcgcgcgaccgcctgatcaacataggctggtgggagtacaggactcgcctcctcagggttccctgtgctgccacttttcagccatggccacaagtgaacagagtatctgccaagcccgggcttccgtgatggtctacgatgacaccagtaagaaatgggtaccaatcaaacctggccagcagggattcagccggatcaacatctaccacaacactgccagcaacaccttcagagtcgttggagtcaagttgcaggatcagcaggttgtgatcaattattcaatcgtgaaagggctgaagtacaatcaggccacgccaaccttccaccagtggcgagatgcccgccaggtctacggcttaaactttgcaagtaaagaagaggcaaccacgttctccaatgcaatgctgtttgccctgaacatcatgaattcccaagaaggaggcccctccagccagcgtcaggtgcagaatggcccctctcctgatgagatggacatccagagaagacaagtgatggagcagcaccagcagcagcgtcaggaatctctagaaagaagaacctcggccacagggcccatcctcccaccaggacatccttcatctgcagccagcgcccccgtctcatgtagtggaactgagcagcaaaaaacaaaagacaagcccccaacataatagaaagaaacaaaagcaccaacaaaaaacaaac

SEQ ID NO: 425017 - DNA, 823 bp, Homo sapiens
  misc_feature (19)..(19): n is a, c, g, or t
  misc_feature (22)..(22): n is a, c, g, or t
  misc_feature (27)..(27): n is a, c, g, or t
  misc_feature (37)..(37): n is a, c, g, or t
  misc_feature (44)..(44): n is a, c, g, or t
  misc_feature (66)..(66): n is a, c, g, or t
  misc_feature (70)..(70): n is a, c, g, or t
  misc_feature (793)..(793): n is a, c, g, or t
cgatcttccttccggagcncgncagcntatatatcantcaagtnactccttctgacatggctccgnaagnaagatcgcgagtccggaggatggacaaagtaaggaagatgccacgggaatatggcggcggcggcggcgagtccggactaggcccgaagcgcgcgaccgcctgatcaacataggctggtgggagtacaggactcgcctcctcagggttccctgtgctgccacttttcagccatggccacaagtgaacagagtatctgccaagcccgggcttccgtgatggtctacgatgacaccagtaagaaatgggtaccaatcaaacctggccagcagggattcagccggatcaacatctaccacaacactgccagcaacaccttcagagtcgttggagtcaagttgcaggatcagcaggttgtgatcaattattcaatcgtgaaagggctgaagtacaatcaggccacgccaaccttccaccagtggcgagatgcccgccaggtctacggcttaaactttgcaagtaaagaagaggcaaccacgttctccaatgcaatgctgtttgccctgaacatcatgaattcccaagaaggaggcccctccagccagcgtcaggtgcagaatggcccctctcctgatgagatggacatccagagaagacaagtgatggagcagcaccagcagcagcgtcaggaatctctagaaagaagaacctcggccacagggcccatcctcccaccaggacatccttcatctgcagccagcgcccccgtctcatgtagtggtcgcncctgagttgggatcctctagaacagcctca

SEQ ID NO: 425018 - DNA, 1029 bp, Homo sapiens
ggcacgaggctccgggcggccgcacctgccagttgtgctgcatggaaacaacctgttagtatttggaggtacgggcatcccatttggagagagcaacggcaatgacgtccatgtgtgtaatgtgaagtataagagatgggctttgctcagctgtcgggggaagaaacccagtcgtatatatggacaggctatggccatcatcaatggctccctttatgtctttggaggtacaaccggctatatttacagcacagacctgcacaagttagatctcaataccagagagtggacacaactgaaaccaaacaacctatcctgtgatctaccagaagagagataccgacatgaaattgcacatgacgggcagaggatttacatcttgggaggtggtacttcctggacagcatattccttaaacaagatccatgcatacaaccttgaaacgaatgcctgggaggaaattgcaacaaaaccccatgaaaaaataggctttcctgcagcccgaaggtgtcacagttgtgttcaaataaaaaatgatgtatttatttgtgggggctataatggagaggtgatcctgggagatatctggaagttgaatctgcagactttccaatgggtgaagctcccagctaccatgccagagccagtttattttcactgtgcagctgttacaccagctggttgcatgtacattcatggaggagtggtgaacatccatgaaaacaaacggactgggtcattgtttaagatctggctggtggtacctagcctgctggaactggcatgggagaagctgcttgcggccttccctaaccttgcaaacctctcccgaacacaacttctgcaccttggactcacacagggactcatcgaacgcttgaaatgaggatttctggactgttcattgatactggaaatgttaatttaaagagactcctttatttatgggcagtgtagaatgtgctacaaagaggattggttaccctgatcaaggccttatttagaaaatacatcagatgcctttctgta

SEQ ID NO: 425019 - DNA, 6429 bp, Homo sapiens
agtcattggtctctggtgggaccgggcgctgcccccttcccctgtctcctgggtctctggaggagcccaggaaggaggctccgctggttccgctgggtcaggcgctgacgggaccgggctgcggcaatcgttagcgggtcatgtcggccgcccagggctgggacaggaaccgccggaggggaggaggcgccgccggcgctggtggcggaggtagcggggccggcgggggcagtgggggcagcgggggtcgggggactggccagctcaaccgcttcgtgcaactctccgggcggccgcacctgccaggtaagaagaaaatacgatgggacccagttaggaggcgcttcattcagtcctgtcccatcataaggatccctaacaggtttttgagaggccacagacctccaccagcacgaagtggacatcgttgtgtggcagataataccaacctatatgtgtttggaggttataacccagattatgatgaatcgggagggcctgataatgaagactatcctctcttcagggaactctggaggtatcattttgctacaggagtatggcaccagatgggcacagatggctacatgccccgggaattggcatctatgtcacttgtgctgcatggaaacaacctgttagtatttggaggtacgggcatcccatttggagagagcaacggcaatgacgtccatgtgtgtaatgtgaagtataagagatgggctttgctcagctgtcgggggaagaaacccagtcgtatatatggacaggctatggccatcatcaatggctccctttatgtctttggaggtacaaccggctatatttacagcacagacctgcacaagttagatctcaataccagagagtggacacaactgaaaccaaacaacctatcctgtgatctaccagaagagagataccgacatgaaattgcacatgacgggcagaggatttacatcttgggaggtggtacttcctggacagcatattccttaaacaagatccatgcatacaaccttgaaacgaatgcctgggaggaaattgcaacaaaaccccatgaaaaaataggctttcctgcagcccgaaggtgtcacagttgtgttcaaataaaaaatgatgtatttatttgtgggggctataatggagaggtgatcctgggagatatctggaagttgaatctgcagactttccaatgggtgaagctcccagctaccatgccagagccagtttattttcactgtgcagctgttacaccagctggttgcatgtacattcatggaggagtggtgaacatccatgaaaacaaacggactgggtcattgtttaagatctggctggtggtacctagcctgctggaactggcatgggagaagctgcttgcggccttccctaaccttgcaaacctctcccgaacacaacttctgcaccttggactcacacagggactcatcgaacgcttgaaatgaggatttctggactgttcattgatactggaaatgttaatttaaagagactcctttatttatgggcagtgtagaatgtgctacaaagaggattggttaccctgatcaaggccttatttagaaaatacatcagatgcctttctgtaaattggtttttcagtttatggacatctcactttcccacgtgcttccttctttgcttctgttcctcctgacccattacatgcacatgtactcacatactccctcttccttctcgatggagttaagggaaagcctgaaagtaccttaataatgttattaatcaagacagattcctttttaaaggaattctgaatagttccatgtcatacaatattctagaaattaaaacatcatcaacataaagaaaaatgaaattaaaaaatttttacatctagcaacagcaacaaccacaaatttaggggaagctgagaaggctaaccttgggaatcttgcaggttatacttaaacctagatgtttaacttagtgttttcaagatgtgtctaactgagtagtagctgggtctgatggcagcagtgcttgccatcttgttgcacagataactcaaacctaccctttggctttgaaggaaggttaagcagcccagcaactcttggttagtgatttctttctcatcctcatggtgccagcagtggttagagttggtttgtcaaaagacttacgtgtgtgtcgtggtcgtgctctttgttgttgctcttagaaattatggcaccaagaatgtttcaaacggaaaaacttgtggtggccaaagttcttcattctggcagttttgaaactctcttatgcttattaatggttttaaatatctctttgacttcttcatggggaattgtagaccctaagtatgtggtgtaaatgccatgtaacatgaacacaagctcccgagggaggccagagaagagccaggcagagaaaacctgcatcctctgggcttgttaacttggcttccactcgggctgtggtctttggctatcatcttggccatttccttttgagaacttgtttcttttctaatctctgggccaggtacctgccattttctcaggcagttggtccttgatttttcccttagcttgttgccttcttttccgtctgctttaatgtgcatggtgctgtgaataattgtctagtaattggatacaaggtcttgggggtaaagccacaggtcatccttcctgaagaaccaagtatcatttaaaaactagcatgaggaaggaatgaaactgagtagcattcattttgtgtgtgtgaaattttagttctggtttgtttgatttgttttttttttaattctaaaaagaatgacataaattttcactcgctttgccatctggctgctaggggagctgagcaagaggctcaccatgcgcatgtgtaagccgcaggtgtactcaaggtgctgaaggcgtgcaaggggcagcgctggtcctcccggggccaactcacagcaggagactcgcatgggagagttggaacacatctttcctttaagtgcctcttttttcacctagcttttaaagttattctttgtccttcatctcagaagggatctctttagcttatgtgtggatttaaaatgacctttgagctacggttaaaaagctaccatctggtgttcagttctgggaaagagaaaaccgtagcctccagacatgctcctgatttctaggccttatcataccatcccctctgtgatgggttgagttcatggagcctgtattctgggaagtcttataataaccacgcacctgtgaacgtgggtcctttctggggagtgaggaatgtgggagagaggcagaaaaaggagcagctcctctaggggcccatcctcccacatcttgccattaccagtctgtgtagcacttaacctcctgccaccactgccaggcttgctcctccgttctctcccagagcaagtcagtctgagcagctccattagtccaaaacagagctttgctgcatgacttcagcctggcctctggatatttggtggaaatatattctaaattgaacaagccaggctgtccagggtggcaagaggatttttgacctggatttatacagggaccaaagactgaatgctcagcctctgtgcttagactttcatggtccttaggatagaagtgagtctctagccctgctacaccagagagctgaagagagatgtggtctggttccatccatacttgctggcatcctttgttaagccttctgagggcagtcttctttgaggtagaccttggaggcctgacatcgaagacctgtgtgttttattttcataaaagtatatatccttggtctaaagtgtcttcttttaatataacactagtaaaaatgacatggtatgaccagcactgagtgctatagaaccacacatgtgtacatgttctggatgccaaatgagactgtgtgtaaatgactaagtgtagataactagaaattagataggggtcatcaggcgtttcggtatacctataaccagcactcggaattcctgacactgtttacttgatttaggaaagtttatgcctgctgcttctctgcctctttgaggtactcccagccgtcttactacagtcctgtaaatttaagtgcaatatatagaaacatatggatatatacagattatatatagggtgtaactataaagcaggtagactacttttttgcatcttggggaagtgagctcattactttaggttcaaattatgccaagaattttagatgtgatcagctggcttaagccaactcatgtcatgataaagctggattttcaagtccatgttttcttactccaactcttagagactcattgttccttaggtttgttagagttgagattttttttctccctgtcatctttgtactctctcatgtttgcatgtcttacattttgttgccggagaacaaggaagtccatctgtaaggagtttcctaaacggagaattaaaacctagtatttaacactaaccattctcctatgtatatactaatttatctgggaatgtaatactttattaaatgaagaaaatgatgctttcttcatttaatattttccacatcctggaaaaactataaactgacacagaatagattgaaatcttaactggggctaaacaaaaccctttccattggcagaatctccttttttcagggccataatgacatgatgtaaaaatttgctttaaaccattcatgcccttaaatagctagattttaaagcataataagcatattaacatttttaagcaaaagatacgttaacagtgacctttggttatccacagtagcaagagtaaagcacagatcattgaaatccatagataatcagtgaatcaactttcctaccaaacaatagattcatttacatttctttttcctccctatcctttcctgtaagcacctgtttttccatggaatggggttaatgagtaggtagaaaaggaaaaggaataatcagtaggagctgacaaccagtgaccatataagcagctgattgcctgtaattagtcaggctgaacaattagagttgaatgctgaaattaggaaccacaggtggtaatcctgagtagatgtagctcttcagcgtcatctcctgccctgagctccaggccatctctctaaccaccaaagaactcttagtacctacgggaaggaaaagctgtgtgcgacacagaggaaactccattatttgaacacatttctttggctcttgacaaatacttgcttttcctctaatcttgcaagagctatggctcttctattttccaatcacacagcttggcatgtaggaaaggttgaatgatcctctaagactgtgttggtcttcgtattctgtaaaacccattttttttttgtggtcttacagatgtttagaaagtggcacaggttactgaattgtctacctgccagcattctgatatagcacaaaaagctattttcctttattttttgtattattttttatttttctggcattgagctctagggtggatgagggtttatggtcctctgatcataagctccattctaaaaactggtcactgttagctgaaattgctttggttccccaaatgccttggaactccagacgcacccgcagggcctgaggtaggcttcatagagttctaggacttccgtgtgcgttgccaccagatcctgcccagcaatggcctttcccttctaaggtcattagattcagccaaaagcgacctcttctctagtccggtgttacgaacagaagttctgagttgtgctacaaaagtagttccatctttttggtgtaattttcatgtttttaatttgaaaacaaaaaaaaaacaactttttataagttttttaagggccctgcttagtcagtgtacagggtggagtcagaggcagttttcagaaaaaaacaaaaaacaaaaaacaatttcaccaagcggtagtaattgttgttttactagttatacatttagaatataaaggaggcatcagaaaacacactctctaaagccacttccttgtgcacagagtctgcacagggagagcacaggcatctccctggaaaagcacctgccaatgacgaatttcatggaagaacctaggcaagaaaggaagcctctttctgagacacagtctctgagaggtgagcctagctttgctcttcctacagggtatgcttgggccatacacaatgctcgccttactttaaagctattttgccacagtcctgttaaatagtgtggacgtccttttgcagtctggtgtgcatgccatatgatcaggacagcttttccactttactcggtttcctacaagcaagtaggaaatacagtgaatttaccctaaaatgtccaatctgtatttatgtaccttgtcagtgttttgctgttggttttctaaaacaatctgatcaataaatcttatccaaatcaa

SEQ ID NO: 425020 - DNA, 6453 bp, Homo sapiens
aactgaaaccaaccaacctatcctgtgatctaccagaagagagataccgacatgaaattgcactggacgggcagaggatatacctcttgggaggtggtacttcatggaccgcatattccttaaacaagatccatgcatacagccttgaaacgaatgcttgggaggaaattgcaacaaaaccccatgaaaaaataggctttcctgcagcccgaaggtgtcacagttgtgttcaaataaaaaatgatgtcgggggcagtgggggcagcgggggtcgggggactggccagctcaaccgcttcgtgcaactctccgggcggccgcacctgccaggtaagaagaaaatacgatgggacccagttaggaggcgcttcattcagtcctgtcccatcataaggatccctaacaggtttttgagaggccacagacctccaccagcacgaagtggacatcgttgtgtggcagataataccaacctatatgtgtttggaggttataacccagattatgatgaatcgggagggcctgataatgaagactatcctctcttcagggaactctggaggtatcattttgctacaggagtatggcaccagatgggcacagatggctacatgccccgggaattggcatctatgtcacttgtgctgcatggaaacaacctgttagtatttggaggtacgggcatcccatttggagagagcaacggcaatgacgtccatgtgtgtaatgtgaagtataagagatgggctttgctcagctgtcgggggaagaaacccagtcgtatatatggacaggctatggccatcatcaatggctccctttatgtctttggaggtacaaccggctatatttacagcacagacctgcacaagttagatctcaataccagagagtggacacaactgaaaccaaacaacctatcctgtgatctaccagaagagagataccgacatgaaattgcacatgacgggcagaggatttacatcttgggaggtggtacttcctggacagcatattccttaaacaagatccatgcatacaaccttgaaacgaatgcctgggaggaaattgcaacaaaaccccatgaaaaaataggctttcctgcagcccgaaggtgtcacagttgtgttcaaataaaaaatgatgtatttatttgtgggggctataatggagaggtgatcctgggagatatctggaagttgaatctgcagactttccaatgggtgaagctcccagctaccatgccagagccagtttattttcactgtgcagctgttacaccagctggttgcatgtacattcatggaggagtggtgaacatccatgaaaacaaacggactgggtcattgtttaagatctggctggtggtacctagcctgctggaactggcatgggagaagctgcttgcggccttccctaaccttgcaaacctctcccgaacacaacttctgcaccttggactcacacagggactcatcgaacgcttgaaatgaggatttctggactgttcattgatactggaaatgttaatttaaagagactcctttatttatgggcagtgtagaatgtgctacaaagaggattggttaccctgatcaaggccttatttagaaaatacatcagatgcctttctgtaaattggtttttcagtttatggacatctcactttcccacgtgcttccttctttgcttctgttcctcctgacccattacatgcacatgtactcacatactccctcttccttctcgatggagttaagggaaagcctgaaagtaccttaataatgttattaatcaagacagattcctttttaaaggaattctgaatagttccatgtcatacaatattctagaaattaaaacatcatcaacataaagaaaaatgaaattaaaaaatttttacatctagcaacagcaacaaccacaaatttaggggaagctgagaaggctaaccttgggaatcttgcaggttatacttaaacctagatgtttaacttagtgttttcaagatgtgtctaactgagtagtagctgggtctgatggcagcagtgcttgccatcttgttgcacagataactcaaacctaccctttggctttgaaggaaggttaagcagcccagcaactcttggttagtgatttctttctcatcctcatggtgccagcagtggttagagttggtttgtcaaaagacttacgtgtgtgtcgtggtcgtgctctttgttgttgctcttagaaattatggcaccaagaatgtttcaaacggaaaaacttgtggtggccaaagttcttcattctggcagttttgaaactctcttatgcttattaatggttttaaatatctctttgacttcttcatggggaattgtagaccctaagtatgtggtgtaaatgccatgtaacatgaacacaagctcccgagggaggccagagaagagccaggcagagaaaacctgcatcctctgggcttgttaacttggcttccactcgggctgtggtctttggctatcatcttggccatttccttttgagaacttgtttcttttctaatctctgggccaggtacctgccattttctcaggcagttggtccttgatttttcccttagcttgttgccttcttttccgtctgctttaatgtgcatggtgctgtgaataattgtctagtaattggatacaaggtcttgggggtaaagccacaggtcatccttcctgaagaaccaagtatcatttaaaaactagcatgaggaaggaatgaaactgagtagcattcattttgtgtgtgtgaaattttagttctggtttgtttgatttgttttttttttaattctaaaaagaatgacataaattttcactcgctttgccatctggctgctaggggagctgagcaagaggctcaccatgcgcatgtgtaagccgcaggtgtactcaaggtgctgaaggcgtgcaaggggcagcgctggtcctcccggggccaactcacagcaggagactcgcatgggagagttggaacacatctttcctttaagtgcctcttttttcacctagcttttaaagttattctttgtccttcatctcagaagggatctctttagcttatgtgtggatttaaaatgacctttgagctacggttaaaaagctaccatctggtgttcagttctgggaaagagaaaaccgtagcctccagacatgctcctgatttctaggccttatcataccatcccctctgtgatgggttgagttcatggagcctgtattctgggaagtcttataataaccacgcacctgtgaacgtgggtcctttctggggagtgaggaatgtgggagagaggcagaaaaaggagcagctcctctaggggcccatcctcccacatcttgccattaccagtctgtgtagcacttaacctcctgccaccactgccaggcttgctcctccgttctctcccagagcaagtcagtctgagcagctccattagtccaaaacagagctttgctgcatgacttcagcctggcctctggatatttggtggaaatatattctaaattgaacaagccaggctgtccagggtggcaagaggatttttgacctggatttatacagggaccaaagactgaatgctcagcctctgtgcttagactttcatggtccttaggatagaagtgagtctctagccctgctacaccagagagctgaagagagatgtggtctggttccatccatacttgctggcatcctttgttaagccttctgagggcagtcttctttgaggtagaccttggaggcctgacatcgaagacctgtgtgttttattttcataaaagtatatatccttggtctaaagtgtcttcttttaatataacactagtaaaaatgacatggtatgaccagcactgagtgctatagaaccacacatgtgtacatgttctggatgccaaatgagactgtgtgtaaatgactaagtgtagataactagaaattagataggggtcatcaggcgtttcggtatacctataaccagcactcggaattcctgacactgtttacttgatttaggaaagtttatgcctgctgcttctctgcctctttgaggtactcccagccgtcttactacagtcctgtaaatttaagtgcaatatatagaaacatatggatatatacagattatatatagggtgtaactataaagcaggtagactacttttttgcatcttggggaagtgagctcattactttaggttcaaattatgccaagaattttagatgtgatcagctggcttaagccaactcatgtcatgataaagctggattttcaagtccatgttttcttactccaactcttagagactcattgttccttaggtttgttagagttgagattttttttctccctgtcatctttgtactctctcatgtttgcatgtcttacattttgttgccggagaacaaggaagtccatctgtaaggagtttcctaaacggagaattaaaacctagtatttaacactaaccattctcctatgtatatactaatttatctgggaatgtaatactttattaaatgaagaaaatgatgctttcttcatttaatattttccacatcctggaaaaactataaactgacacagaatagattgaaatcttaactggggctaaacaaaaccctttccattggcagaatctccttttttcagggccataatgacatgatgtaaaaatttgctttaaaccattcatgcccttaaatagctagattttaaagcataataagcatattaacatttttaagcaaaagatacgttaacagtgacctttggttatccacagtagcaagagtaaagcacagatcattgaaatccatagataatcagtgaatcaactttcctaccaaacaatagattcatttacatttctttttcctccctatcctttcctgtaagcacctgtttttccatggaatggggttaatgagtaggtagaaaaggaaaaggaataatcagtaggagctgacaaccagtgaccatataagcagctgattgcctgtaattagtcaggctgaacaattagagttgaatgctgaaattaggaaccacaggtggtaatcctgagtagatgtagctcttcagcgtcatctcctgccctgagctccaggccatctctctaaccaccaaagaactcttagtacctacgggaaggaaaagctgtgtgcgacacagaggaaactccattatttgaacacatttctttggctcttgacaaatacttgcttttcctctaatcttgcaagagctatggctcttctattttccaatcacacagcttggcatgtaggaaaggttgaatgatcctctaagactgtgttggtcttcgtattctgtaaaacccattttttttttgtggtcttacagatgtttagaaagtggcacaggttactgaattgtctacctgccagcattctgatatagcacaaaaagctattttcctttattttttgtattattttttatttttctggcattgagctctagggtggatgagggtttatggtcctctgatcataagctccattctaaaaactggtcactgttagctgaaattgctttggttccccaaatgccttggaactccagacgcacccgcagggcctgaggtaggcttcatagagttctaggacttccgtgtgcgttgccaccagatcctgcccagcaatggcctttcccttctaaggtcattagattcagccaaaagcgacctcttctctagtccggtgttacgaacagaagttctgagttgtgctacaaaagtagttccatctttttggtgtaattttcatgtttttaatttgaaaacaaaaaaaaaacaactttttataagttttttaagggccctgcttagtcagtgtacagggtggagtcagaggcagttttcagaaaaaaacaaaaaacaaaaaacaatttcaccaagcggtagtaattgttgttttactagttatacatttagaatataaaggaggcatcagaaaacacactctctaaagccacttccttgtgcacagagtctgcacagggagagcacaggcatctccctggaaaagcacctgccaatgacgaatttcatggaagaacctaggcaagaaaggaagcctctttctgagacacagtctctgagaggtgagcctagctttgctcttcctacagggtatgcttgggccatacacaatgctcgccttactttaaagctattttgccacagtcctgttaaatagtgtggacgtccttttgcagtctggtgtgcatgccatatgatcaggacagcttttccactttactcggtttcctacaagcaagtaggaaatacagtgaatttaccctaaaatgtccaatctgtatttatgtaccttgtcagtgttttgctgttggttttctaaaacaatctgatcaataaatcttatccaaatcaa

SEQ ID NO: 425021 - DNA, 6257 bp, Homo sapiens
agtcattggtctctggtgggaccgggcgctgcccccttcccctgtctcctgggtctctggaggagcccaggaaggaggctccgctggttccgctgggtcaggcgctgacgggaccgggctgcggcaatcgttagcgggtcatgtcggccgcccagggcgggggcagtgggggcagcgggggtcgggggactggccaggccacagacctccaccagcacgaagtggacatcgttgtgtggcagataataccaacctatatgtgtttggaggttataacccagattatgatgaatcgggagggcctgataatgaagactatcctctcttcagggaactctggaggtatcattttgctacaggagtatggcaccagatgggcacagatggctacatgccccgggaattggcatctatgtcacttgtgctgcatggaaacaacctgttagtatttggaggtacgggcatcccatttggagagagcaacggcaatgacgtccatgtgtgtaatgtgaagtataagagatgggctttgctcagctgtcgggggaagaaacccagtcgtatatatggacaggctatggccatcatcaatggctccctttatgtctttggaggtacaaccggctatatttacagcacagacctgcacaagttagatctcaataccagagagtggacacaactgaaaccaaacaacctatcctgtgatctaccagaagagagataccgacatgaaattgcacatgacgggcagaggatttacatcttgggaggtggtacttcctggacagcatattccttaaacaagatccatgcatacaaccttgaaacgaatgcctgggaggaaattgcaacaaaaccccatgaaaaaataggctttcctgcagcccgaaggtgtcacagttgtgttcaaataaaaaatgatgtatttatttgtgggggctataatggagaggtgatcctgggagatatctggaagttgaatctgcagactttccaatgggtgaagctcccagctaccatgccagagccagtttattttcactgtgcagctgttacaccagctggttgcatgtacattcatggaggagtggtgaacatccatgaaaacaaacggactgggtcattgtttaagatctggctggtggtacctagcctgctggaactggcatgggagaagctgcttgcggccttccctaaccttgcaaacctctcccgaacacaacttctgcaccttggactcacacagggactcatcgaacgcttgaaatgaggatttctggactgttcattgatactggaaatgttaatttaaagagactcctttatttatgggcagtgtagaatgtgctacaaagaggattggttaccctgatcaaggccttatttagaaaatacatcagatgcctttctgtaaattggtttttcagtttatggacatctcactttcccacgtgcttccttctttgcttctgttcctcctgacccattacatgcacatgtactcacatactccctcttccttctcgatggagttaagggaaagcctgaaagtaccttaataatgttattaatcaagacagattcctttttaaaggaattctgaatagttccatgtcatacaatattctagaaattaaaacatcatcaacataaagaaaaatgaaattaaaaaatttttacatctagcaacagcaacaaccacaaatttaggggaagctgagaaggctaaccttgggaatcttgcaggttatacttaaacctagatgtttaacttagtgttttcaagatgtgtctaactgagtagtagctgggtctgatggcagcagtgcttgccatcttgttgcacagataactcaaacctaccctttggctttgaaggaaggttaagcagcccagcaactcttggttagtgatttctttctcatcctcatggtgccagcagtggttagagttggtttgtcaaaagacttacgtgtgtgtcgtggtcgtgctctttgttgttgctcttagaaattatggcaccaagaatgtttcaaacggaaaaacttgtggtggccaaagttcttcattctggcagttttgaaactctcttatgcttattaatggttttaaatatctctttgacttcttcatggggaattgtagaccctaagtatgtggtgtaaatgccatgtaacatgaacacaagctcccgagggaggccagagaagagccaggcagagaaaacctgcatcctctgggcttgttaacttggcttccactcgggctgtggtctttggctatcatcttggccatttccttttgagaacttgtttcttttctaatctctgggccaggtacctgccattttctcaggcagttggtccttgatttttcccttagcttgttgccttcttttccgtctgctttaatgtgcatggtgctgtgaataattgtctagtaattggatacaaggtcttgggggtaaagccacaggtcatccttcctgaagaaccaagtatcatttaaaaactagcatgaggaaggaatgaaactgagtagcattcattttgtgtgtgtgaaattttagttctggtttgtttgatttgttttttttttaattctaaaaagaatgacataaattttcactcgctttgccatctggctgctaggggagctgagcaagaggctcaccatgcgcatgtgtaagccgcaggtgtactcaaggtgctgaaggcgtgcaaggggcagcgctggtcctcccggggccaactcacagcaggagactcgcatgggagagttggaacacatctttcctttaagtgcctcttttttcacctagcttttaaagttattctttgtccttcatctcagaagggatctctttagcttatgtgtggatttaaaatgacctttgagctacggttaaaaagctaccatctggtgttcagttctgggaaagagaaaaccgtagcctccagacatgctcctgatttctaggccttatcataccatcccctctgtgatgggttgagttcatggagcctgtattctgggaagtcttataataaccacgcacctgtgaacgtgggtcctttctggggagtgaggaatgtgggagagaggcagaaaaaggagcagctcctctaggggcccatcctcccacatcttgccattaccagtctgtgtagcacttaacctcctgccaccactgccaggcttgctcctccgttctctcccagagcaagtcagtctgagcagctccattagtccaaaacagagctttgctgcatgacttcagcctggcctctggatatttggtggaaatatattctaaattgaacaagccaggctgtccagggtggcaagaggatttttgacctggatttatacagggaccaaagactgaatgctcagcctctgtgcttagactttcatggtccttaggatagaagtgagtctctagccctgctacaccagagagctgaagagagatgtggtctggttccatccatacttgctggcatcctttgttaagccttctgagggcagtcttctttgaggtagaccttggaggcctgacatcgaagacctgtgtgttttattttcataaaagtatatatccttggtctaaagtgtcttcttttaatataacactagtaaaaatgacatggtatgaccagcactgagtgctatagaaccacacatgtgtacatgttctggatgccaaatgagactgtgtgtaaatgactaagtgtagataactagaaattagataggggtcatcaggcgtttcggtatacctataaccagcactcggaattcctgacactgtttacttgatttaggaaagtttatgcctgctgcttctctgcctctttgaggtactcccagccgtcttactacagtcctgtaaatttaagtgcaatatatagaaacatatggatatatacagattatatatagggtgtaactataaagcaggtagactacttttttgcatcttggggaagtgagctcattactttaggttcaaattatgccaagaattttagatgtgatcagctggcttaagccaactcatgtcatgataaagctggattttcaagtccatgttttcttactccaactcttagagactcattgttccttaggtttgttagagttgagattttttttctccctgtcatctttgtactctctcatgtttgcatgtcttacattttgttgccggagaacaaggaagtccatctgtaaggagtttcctaaacggagaattaaaacctagtatttaacactaaccattctcctatgtatatactaatttatctgggaatgtaatactttattaaatgaagaaaatgatgctttcttcatttaatattttccacatcctggaaaaactataaactgacacagaatagattgaaatcttaactggggctaaacaaaaccctttccattggcagaatctccttttttcagggccataatgacatgatgtaaaaatttgctttaaaccattcatgcccttaaatagctagattttaaagcataataagcatattaacatttttaagcaaaagatacgttaacagtgacctttggttatccacagtagcaagagtaaagcacagatcattgaaatccatagataatcagtgaatcaactttcctaccaaacaatagattcatttacatttctttttcctccctatcctttcctgtaagcacctgtttttccatggaatggggttaatgagtaggtagaaaaggaaaaggaataatcagtaggagctgacaaccagtgaccatataagcagctgattgcctgtaattagtcaggctgaacaattagagttgaatgctgaaattaggaaccacaggtggtaatcctgagtagatgtagctcttcagcgtcatctcctgccctgagctccaggccatctctctaaccaccaaagaactcttagtacctacgggaaggaaaagctgtgtgcgacacagaggaaactccattatttgaacacatttctttggctcttgacaaatacttgcttttcctctaatcttgcaagagctatggctcttctattttccaatcacacagcttggcatgtaggaaaggttgaatgatcctctaagactgtgttggtcttcgtattctgtaaaacccattttttttttgtggtcttacagatgtttagaaagtggcacaggttactgaattgtctacctgccagcattctgatatagcacaaaaagctattttcctttattttttgtattattttttatttttctggcattgagctctagggtggatgagggtttatggtcctctgatcataagctccattctaaaaactggtcactgttagctgaaattgctttggttccccaaatgccttggaactccagacgcacccgcagggcctgaggtaggcttcatagagttctaggacttccgtgtgcgttgccaccagatcctgcccagcaatggcctttcccttctaaggtcattagattcagccaaaagcgacctcttctctagtccggtgttacgaacagaagttctgagttgtgctacaaaagtagttccatctttttggtgtaattttcatgtttttaatttgaaaacaaaaaaaaaacaactttttataagttttttaagggccctgcttagtcagtgtacagggtggagtcagaggcagttttcagaaaaaaacaaaaaacaaaaaacaatttcaccaagcggtagtaattgttgttttactagttatacatttagaatataaaggaggcatcagaaaacacactctctaaagccacttccttgtgcacagagtctgcacagggagagcacaggcatctccctggaaaagcacctgccaatgacgaatttcatggaagaacctaggcaagaaaggaagcctctttctgagacacagtctctgagaggtgagcctagctttgctcttcctacagggtatgcttgggccatacacaatgctcgccttactttaaagctattttgccacagtcctgttaaatagtgtggacgtccttttgcagtctggtgtgcatgccatatgatcaggacagcttttccactttactcggtttcctacaagcaagtaggaaatacagtgaatttaccctaaaatgtccaatctgtatttatgtaccttgtcagtgttttgctgttggttttctaaaacaatctgatcaataaatcttatccaaatcaatttggttcaagttcaaaaagattg

SEQ ID NO: 425022 - DNA, 1683 bp, Homo sapiens
agtggatccccgcgacaggtgcgttaacagtgacctttggttatccacagtagcaagagtaaagcacagatcattgaaatccatagataatcagtgaatcaactttcctaccaaacaatagattcatttacatttctttttcctccctatcctttcctgtaagcacctgtttttccatggaatggggttaatgagtaggtagaaaaggaaaaggaataatcagtaggagctgacaaccagtgaccatataagcagctgattgcctgtaattagtcaggctgaacaattagagttgaatgctgaaattaggaaccacaggtggtaatcctgagtagatgtagctcttcagcgtcatctcctgccctgagctccaggccatctctctaaccaccaaagaactcttagtacctacgggaaggaaaagctgtgtgcgacacagaggaaactccattatttgaacacatttctttggctcttgacaaatacttgcttttcctctaatcttgcaagagctatggctcttctattttccaatcacacagcttggcatgtaggaaaggttgaatgatcctctaagactgtgttggtcttcgtattctgtaaaacccattttttttttgtggtcttacagatgtttagaaagtggcacaggttactgaattgtctacctgccagcattctgatatagcacaaaaagctattttcctttattttttgtattattttttatttttctggcattgagctctagggtggatgagggtttatggtcctctgatcataagctccattctaaaaactggtcactgttagctgaaattgctttggttccccaaatgccttggaactccagacgcacccgcagggcctgaggtaggcttcatagagttctaggacttccgtgtgcgttgccaccagatcctgcccagcaatggcctttcccttctaaggtcattagattcagccaaaagcgacctcttctctagtccggtgttacgaacagaagttctgagttgtgctacaaaagtagttccatctttttggtgtaattttcatgtttttaatttgaaaacaaaaaaaaaacaactttttataagttttttaagggccctgcttagtcagtgtacagggtggagtcagaggcagttttcagaaaaaaacaaaaaacaaaaaacaatttcaccaagcggtagtaattgttgttttactagttatacatttagaatataaaggaggcatcagaaaacacactctctaaagccacttccttgtgcacagagtctgcacagggagagcacaggcatctccctggaaaagcacctgccaatgacgaatttcatggaagaacctaggcaagaaaggaagcctctttctgagacacagtctctgagaggtgagcctagctttgctcttcctacagggtatgcttgggccatacacaatgctcgccttactttaaagctattttgccacagtcctgttaaatagtgtggacgtccttttgcagtctggtgtgcatgccatatgatcaggacagcttttccactttactcggtttcctacaagcaagtaggaaatacagtgaatttaccctaaaatgtccaatctgtatttatgtaccttgtcagtgttttgctgttggttttctaaaacaatctgatcaataaatcttatccaaatcaa

SEQ ID NO: 425023 - DNA, 1039 bp, Homo sapiens
gtttttttctgattactgcctctgactccaccctgtacactgactaagcagggcccttaaaaaacttataaaaagttgttttttatttttctggcattgagctctagggtggatgagggtttatggtcctctgatcataagctccattctaaaaactggtcactgttagctgaaattgctttggttccccaaatgccttggaactccagacgcacccgcagggcctgaggtaggcttcatagagttctaggacttccgtgtgcgttgccaccagatcctgcccagcaatggcctttcccttctaaggtcattagattcagccaaaagcgacctcttctctagtccggtgttacgaacagaagttctgagttgtgctacaaaagtagttccatctttttggtgtaattttcatgtttttaatttgaaaacaaaaaaaaaacaactttttataagttttttaagggccctgcttagtcagtgtacagggtggagtcagaggcagttttcagaaaaaaacaaaaaacaaaaaacaatttcaccaagcggtagtaattgttgttttactagttatacatttagaatataaaggaggcatcagaaaacacactctctaaagccacttccttgtgcacagagtctgcacagggagagcacaggcatctccctggaaaagcacctgccaatgacgaatttcatggaagaacctaggcaagaaaggaagcctctttctgagacacagtctctgagaggtgagcctagctttgctcttcctacagggtatgcttgggccatacacaatgctcgccttactttaaagctattttgccacagtcctgttaaatagtgtggacgtccttttgcagtctggtgtgcatgccatatgatcaggacagcttttccactttactcggtttcctacaagcaagtaggaaatacagtgaatttaccctaaaatgtccaatctgtatttatgtaccttgtcagtgttttgctgttggttttctaaaacaatctgatcaataaatcttatccaaatcaa

SEQ ID NO: 425024 - DNA, 1040 bp, Homo sapiens
  misc_feature (1000)..(1000): n is a, c, g, or t
agtcattggtctctggtgggaccgggcgctgcccccttcccctgtctcctgggtctctggaggagcccaggaaggaggctccgctggttccgctgggtcaggcgctgacgggaccgggctgcggcaatcgttagcgggtcatgtcggccgcccagggctgggacaggaaccgccggaggggaggaggcgccgccggcgctggtggcggaggtagcggggccggcgggggcagtgggggcagcgggggtcgggggactggccagctcaaccgcttcgtgcaactctccgggcggccgcacctgccaggccacagacctccaccagcacgaagtggacatcgttgtgtggcagataataccaacctatatgtgtttggaggttataacccagattatgatgaatcgggagggcctgataatgaagactatcctctcttcagggaactctggaggtatcattttgctacaggagtatggcaccagatgggcacagatggctacatgccccgggaattggcatctatgtcacttgtgctgcatggaaacaacctgttagtatttggaggtacgggcatcccatttggagagagcaacggcaatgacgtccatgtgtgtaatgtgaagtataagagatgggctttgctcagctgtcgggggaagaaacccagtcgtatatatggacaggctatggccatcatcaatggctccctttatgtctttggaggtacaaccggctatatttacagcacagacctgcacaagttagatctcaataccagagagtggacacaactgaaaccaaacaacctatcctgtgatctaccagaagagagataccgacatgaaattgcacatgacgggcagaggatttacatcttgggaggtggtacttcctggacagcatattccttaaacaagatccatgcatacaaccttgaaacgaatgcctgggaggaaattgcaacaaaaccccatgaaaaaataggtttcctgcagccganggtgtccagtgctgccactcaaactgatgtattaacgcgg

SEQ ID NO: 425025 - DNA, 430 bp, Homo sapiens
taagaagtattattaggaagtatatccatgttataaatctaaacaaataagaagtatatccatgttataaatccttcctggtccccttttatggctaaaatggttgttacctaattttgtttgtgcttttaaactggtaggacacctgtggaaaactgtcctcttctctcctaggccacagacctccaccagcacgaagtggacatcgttgtgtggcagataataccaacctatatgtgtttggaggttataacccagattatgatgaatcgggagggcctgataatgaagactatcctctcttcagggaactctggaggtatcattttgctacaggagtatggcaccagatgggcacagatggctacatgccccgggaattggcatctatgtcacgtgagtgcaagcagttcgtaactcctgactttat

SEQ ID NO: 425026 - DNA, 598 bp, Homo sapiens
gtcctcttctctcctaggccacagacctccaccagcacgaagtggacatcgttgtgtggcagataataccaacctatatgtgtttggaggttataacccagattatgatgaatcgggagggcctgataatgaagactatcctctcttcagggaactctggaggtatcattttgctacaggagtatggcaccagatgggcacagatggctacatgccccgggaattggcatctatgtcacgtgagtgcaagcagttcgtaactcctgactttatgaaatgtctgagaagccaggttcaatgtcccatattcctcattaataatttataacactataatgtgatttcgccctgtgggtggataggctttttactagggtaataacagtatggtgattccaaattatttgggtcctgagtttgaattcagcttgtcaggtgagttttagctttaatttcctaacttgcaaaatgggattaataatatcttagagggttcaatataaagtatcacgcagtagaaggtcaacaaatggggcttatgacgatgacagttaatagctgttgagcaaagtacaggcatacctcagagatgtcctgg

SEQ ID NO: 425027 - DNA, 6233 bp, Homo sapiens
agtcattggtctctggtgggaccgggcgctgcccccttcccctgtctcctgggtctctggaggagcccaggaaggaggctccgctggttccgctgggtcaggcgctgacgggaccgggctgcggcaatcgttagcgggtcatgtcggccgcccagggcgggggcagtgggggcagcgggggtcgggggactggccaggccacagacctccaccagcacgaagtggacatcgttgtgtggcagataataccaacctatatgtgtttggaggttataacccagattatgatgaatcgggagggcctgataatgaagactatcctctcttcagggaactctggaggtatcattttgctacaggagtatggcaccagatgggcacagatggctacatgccccgggaattggcatctatgtcacttgtgctgcatggaaacaacctgttagtatttggaggtacgggcatcccatttggagagagcaacggcaatgacgtccatgtgtgtaatgtgaagtataagagatgggctttgctcagctgtcgggggaagaaacccagtcgtatatatggacaggctatggccatcatcaatggctccctttatgtctttggaggtacaaccggctatatttacagcacagacctgcacaagttagatctcaataccagagagtggacacaactgaaaccaaacaacctatcctgtgatctaccagaagagagataccgacatgaaattgcacatgacgggcagaggatttacatcttgggaggtggtacttcctggacagcatattccttaaacaagatccatgcatacaaccttgaaacgaatgcctgggaggaaattgcaacaaaaccccatgaaaaaataggctttcctgcagcccgaaggtgtcacagttgtgttcaaataaaaaatgatgtatttatttgtgggggctataatggagaggtgatcctgggagatatctggaagttgaatctgcagactttccaatgggtgaagctcccagctaccatgccagagccagtttattttcactgtgcagctgttacaccagctggttgcatgtacattcatggaggagtggtgaacatccatgaaaacaaacggactgggtcattgtttaagatctggctggtggtacctagcctgctggaactggcatgggagaagctgcttgcggccttccctaaccttgcaaacctctcccgaacacaacttctgcaccttggactcacacagggactcatcgaacgcttgaaatgaggatttctggactgttcattgatactggaaatgttaatttaaagagactcctttatttatgggcagtgtagaatgtgctacaaagaggattggttaccctgatcaaggccttatttagaaaatacatcagatgcctttctgtaaattggtttttcagtttatggacatctcactttcccacgtgcttccttctttgcttctgttcctcctgacccattacatgcacatgtactcacatactccctcttccttctcgatggagttaagggaaagcctgaaagtaccttaataatgttattaatcaagacagattcctttttaaaggaattctgaatagttccatgtcatacaatattctagaaattaaaacatcatcaacataaagaaaaatgaaattaaaaaatttttacatctagcaacagcaacaaccacaaatttaggggaagctgagaaggctaaccttgggaatcttgcaggttatacttaaacctagatgtttaacttagtgttttcaagatgtgtctaactgagtagtagctgggtctgatggcagcagtgcttgccatcttgttgcacagataactcaaacctaccctttggctttgaaggaaggttaagcagcccagcaactcttggttagtgatttctttctcatcctcatggtgccagcagtggttagagttggtttgtcaaaagacttacgtgtgtgtcgtggtcgtgctctttgttgttgctcttagaaattatggcaccaagaatgtttcaaacggaaaaacttgtggtggccaaagttcttcattctggcagttttgaaactctcttatgcttattaatggttttaaatatctctttgacttcttcatggggaattgtagaccctaagtatgtggtgtaaatgccatgtaacatgaacacaagctcccgagggaggccagagaagagccaggcagagaaaacctgcatcctctgggcttgttaacttggcttccactcgggctgtggtctttggctatcatcttggccatttccttttgagaacttgtttcttttctaatctctgggccaggtacctgccattttctcaggcagttggtccttgatttttcccttagcttgttgccttcttttccgtctgctttaatgtgcatggtgctgtgaataattgtctagtaattggatacaaggtcttgggggtaaagccacaggtcatccttcctgaagaaccaagtatcatttaaaaactagcatgaggaaggaatgaaactgagtagcattcattttgtgtgtgtgaaattttagttctggtttgtttgatttgttttttttttaattctaaaaagaatgacataaattttcactcgctttgccatctggctgctaggggagctgagcaagaggctcaccatgcgcatgtgtaagccgcaggtgtactcaaggtgctgaaggcgtgcaaggggcagcgctggtcctcccggggccaactcacagcaggagactcgcatgggagagttggaacacatctttcctttaagtgcctcttttttcacctagcttttaaagttattctttgtccttcatctcagaagggatctctttagcttatgtgtggatttaaaatgacctttgagctacggttaaaaagctaccatctggtgttcagttctgggaaagagaaaaccgtagcctccagacatgctcctgatttctaggccttatcataccatcccctctgtgatgggttgagttcatggagcctgtattctgggaagtcttataataaccacgcacctgtgaacgtgggtcctttctggggagtgaggaatgtgggagagaggcagaaaaaggagcagctcctctaggggcccatcctcccacatcttgccattaccagtctgtgtagcacttaacctcctgccaccactgccaggcttgctcctccgttctctcccagagcaagtcagtctgagcagctccattagtccaaaacagagctttgctgcatgacttcagcctggcctctggatatttggtggaaatatattctaaattgaacaagccaggctgtccagggtggcaagaggatttttgacctggatttatacagggaccaaagactgaatgctcagcctctgtgcttagactttcatggtccttaggatagaagtgagtctctagccctgctacaccagagagctgaagagagatgtggtctggttccatccatacttgctggcatcctttgttaagccttctgagggcagtcttctttgaggtagaccttggaggcctgacatcgaagacctgtgtgttttattttcataaaagtatatatccttggtctaaagtgtcttcttttaatataacactagtaaaaatgacatggtatgaccagcactgagtgctatagaaccacacatgtgtacatgttctggatgccaaatgagactgtgtgtaaatgactaagtgtagataactagaaattagataggggtcatcaggcgtttcggtatacctataaccagcactcggaattcctgacactgtttacttgatttaggaaagtttatgcctgctgcttctctgcctctttgaggtactcccagccgtcttactacagtcctgtaaatttaagtgcaatatatagaaacatatggatatatacagattatatatagggtgtaactataaagcaggtagactacttttttgcatcttggggaagtgagctcattactttaggttcaaattatgccaagaattttagatgtgatcagctggcttaagccaactcatgtcatgataaagctggattttcaagtccatgttttcttactccaactcttagagactcattgttccttaggtttgttagagttgagattttttttctccctgtcatctttgtactctctcatgtttgcatgtcttacattttgttgccggagaacaaggaagtccatctgtaaggagtttcctaaacggagaattaaaacctagtatttaacactaaccattctcctatgtatatactaatttatctgggaatgtaatactttattaaatgaagaaaatgatgctttcttcatttaatattttccacatcctggaaaaactataaactgacacagaatagattgaaatcttaactggggctaaacaaaaccctttccattggcagaatctccttttttcagggccataatgacatgatgtaaaaatttgctttaaaccattcatgcccttaaatagctagattttaaagcataataagcatattaacatttttaagcaaaagatacgttaacagtgacctttggttatccacagtagcaagagtaaagcacagatcattgaaatccatagataatcagtgaatcaactttcctaccaaacaatagattcatttacatttctttttcctccctatcctttcctgtaagcacctgtttttccatggaatggggttaatgagtaggtagaaaaggaaaaggaataatcagtaggagctgacaaccagtgaccatataagcagctgattgcctgtaattagtcaggctgaacaattagagttgaatgctgaaattaggaaccacaggtggtaatcctgagtagatgtagctcttcagcgtcatctcctgccctgagctccaggccatctctctaaccaccaaagaactcttagtacctacgggaaggaaaagctgtgtgcgacacagaggaaactccattatttgaacacatttctttggctcttgacaaatacttgcttttcctctaatcttgcaagagctatggctcttctattttccaatcacacagcttggcatgtaggaaaggttgaatgatcctctaagactgtgttggtcttcgtattctgtaaaacccattttttttttgtggtcttacagatgtttagaaagtggcacaggttactgaattgtctacctgccagcattctgatatagcacaaaaagctattttcctttattttttgtattattttttatttttctggcattgagctctagggtggatgagggtttatggtcctctgatcataagctccattctaaaaactggtcactgttagctgaaattgctttggttccccaaatgccttggaactccagacgcacccgcagggcctgaggtaggcttcatagagttctaggacttccgtgtgcgttgccaccagatcctgcccagcaatggcctttcccttctaaggtcattagattcagccaaaagcgacctcttctctagtccggtgttacgaacagaagttctgagttgtgctacaaaagtagttccatctttttggtgtaattttcatgtttttaatttgaaaacaaaaaaaaaacaactttttataagttttttaagggccctgcttagtcagtgtacagggtggagtcagaggcagttttcagaaaaaaacaaaaaacaaaaaacaatttcaccaagcggtagtaattgttgttttactagttatacatttagaatataaaggaggcatcagaaaacacactctctaaagccacttccttgtgcacagagtctgcacagggagagcacaggcatctccctggaaaagcacctgccaatgacgaatttcatggaagaacctaggcaagaaaggaagcctctttctgagacacagtctctgagaggtgagcctagctttgctcttcctacagggtatgcttgggccatacacaatgctcgccttactttaaagctattttgccacagtcctgttaaatagtgtggacgtccttttgcagtctggtgtgcatgccatatgatcaggacagcttttccactttactcggtttcctacaagcaagtaggaaatacagtgaatttaccctaaaatgtccaatctgtatttatgtaccttgtcagtgttttgctgttggttttctaaaacaatctgatcaataaatcttatccaaatcaa

SEQ ID NO: 425028 - DNA, 6342 bp, Homo sapiens
agtcattggtctctggtgggaccgggcgctgcccccttcccctgtctcctgggtctctggaggagcccaggaaggaggctccgctggttccgctgggtcaggcgctgacgggaccgggctgcggcaatcgttagcgggtcatgtcggccgcccagggctgggacaggaaccgccggaggggaggaggcgccgccggcgctggtggcggaggtagcggggccggcgggggcagtgggggcagcgggggtcgggggactggccagctcaaccgcttcgtgcaactctccgggcggccgcacctgccaggccacagacctccaccagcacgaagtggacatcgttgtgtggcagataataccaacctatatgtgtttggaggttataacccagattatgatgaatcgggagggcctgataatgaagactatcctctcttcagggaactctggaggtatcattttgctacaggagtatggcaccagatgggcacagatggctacatgccccgggaattggcatctatgtcacttgtgctgcatggaaacaacctgttagtatttggaggtacgggcatcccatttggagagagcaacggcaatgacgtccatgtgtgtaatgtgaagtataagagatgggctttgctcagctgtcgggggaagaaacccagtcgtatatatggacaggctatggccatcatcaatggctccctttatgtctttggaggtacaaccggctatatttacagcacagacctgcacaagttagatctcaataccagagagtggacacaactgaaaccaaacaacctatcctgtgatctaccagaagagagataccgacatgaaattgcacatgacgggcagaggatttacatcttgggaggtggtacttcctggacagcatattccttaaacaagatccatgcatacaaccttgaaacgaatgcctgggaggaaattgcaacaaaaccccatgaaaaaataggctttcctgcagcccgaaggtgtcacagttgtgttcaaataaaaaatgatgtatttatttgtgggggctataatggagaggtgatcctgggagatatctggaagttgaatctgcagactttccaatgggtgaagctcccagctaccatgccagagccagtttattttcactgtgcagctgttacaccagctggttgcatgtacattcatggaggagtggtgaacatccatgaaaacaaacggactgggtcattgtttaagatctggctggtggtacctagcctgctggaactggcatgggagaagctgcttgcggccttccctaaccttgcaaacctctcccgaacacaacttctgcaccttggactcacacagggactcatcgaacgcttgaaatgaggatttctggactgttcattgatactggaaatgttaatttaaagagactcctttatttatgggcagtgtagaatgtgctacaaagaggattggttaccctgatcaaggccttatttagaaaatacatcagatgcctttctgtaaattggtttttcagtttatggacatctcactttcccacgtgcttccttctttgcttctgttcctcctgacccattacatgcacatgtactcacatactccctcttccttctcgatggagttaagggaaagcctgaaagtaccttaataatgttattaatcaagacagattcctttttaaaggaattctgaatagttccatgtcatacaatattctagaaattaaaacatcatcaacataaagaaaaatgaaattaaaaaatttttacatctagcaacagcaacaaccacaaatttaggggaagctgagaaggctaaccttgggaatcttgcaggttatacttaaacctagatgtttaacttagtgttttcaagatgtgtctaactgagtagtagctgggtctgatggcagcagtgcttgccatcttgttgcacagataactcaaacctaccctttggctttgaaggaaggttaagcagcccagcaactcttggttagtgatttctttctcatcctcatggtgccagcagtggttagagttggtttgtcaaaagacttacgtgtgtgtcgtggtcgtgctctttgttgttgctcttagaaattatggcaccaagaatgtttcaaacggaaaaacttgtggtggccaaagttcttcattctggcagttttgaaactctcttatgcttattaatggttttaaatatctctttgacttcttcatggggaattgtagaccctaagtatgtggtgtaaatgccatgtaacatgaacacaagctcccgagggaggccagagaagagccaggcagagaaaacctgcatcctctgggcttgttaacttggcttccactcgggctgtggtctttggctatcatcttggccatttccttttgagaacttgtttcttttctaatctctgggccaggtacctgccattttctcaggcagttggtccttgatttttcccttagcttgttgccttcttttccgtctgctttaatgtgcatggtgctgtgaataattgtctagtaattggatacaaggtcttgggggtaaagccacaggtcatccttcctgaagaaccaagtatcatttaaaaactagcatgaggaaggaatgaaactgagtagcattcattttgtgtgtgtgaaattttagttctggtttgtttgatttgttttttttttaattctaaaaagaatgacataaattttcactcgctttgccatctggctgctaggggagctgagcaagaggctcaccatgcgcatgtgtaagccgcaggtgtactcaaggtgctgaaggcgtgcaaggggcagcgctggtcctcccggggccaactcacagcaggagactcgcatgggagagttggaacacatctttcctttaagtgcctcttttttcacctagcttttaaagttattctttgtccttcatctcagaagggatctctttagcttatgtgtggatttaaaatgacctttgagctacggttaaaaagctaccatctggtgttcagttctgggaaagagaaaaccgtagcctccagacatgctcctgatttctaggccttatcataccatcccctctgtgatgggttgagttcatggagcctgtattctgggaagtcttataataaccacgcacctgtgaacgtgggtcctttctggggagtgaggaatgtgggagagaggcagaaaaaggagcagctcctctaggggcccatcctcccacatcttgccattaccagtctgtgtagcacttaacctcctgccaccactgccaggcttgctcctccgttctctcccagagcaagtcagtctgagcagctccattagtccaaaacagagctttgctgcatgacttcagcctggcctctggatatttggtggaaatatattctaaattgaacaagccaggctgtccagggtggcaagaggatttttgacctggatttatacagggaccaaagactgaatgctcagcctctgtgcttagactttcatggtccttaggatagaagtgagtctctagccctgctacaccagagagctgaagagagatgtggtctggttccatccatacttgctggcatcctttgttaagccttctgagggcagtcttctttgaggtagaccttggaggcctgacatcgaagacctgtgtgttttattttcataaaagtatatatccttggtctaaagtgtcttcttttaatataacactagtaaaaatgacatggtatgaccagcactgagtgctatagaaccacacatgtgtacatgttctggatgccaaatgagactgtgtgtaaatgactaagtgtagataactagaaattagataggggtcatcaggcgtttcggtatacctataaccagcactcggaattcctgacactgtttacttgatttaggaaagtttatgcctgctgcttctctgcctctttgaggtactcccagccgtcttactacagtcctgtaaatttaagtgcaatatatagaaacatatggatatatacagattatatatagggtgtaactataaagcaggtagactacttttttgcatcttggggaagtgagctcattactttaggttcaaattatgccaagaattttagatgtgatcagctggcttaagccaactcatgtcatgataaagctggattttcaagtccatgttttcttactccaactcttagagactcattgttccttaggtttgttagagttgagattttttttctccctgtcatctttgtactctctcatgtttgcatgtcttacattttgttgccggagaacaaggaagtccatctgtaaggagtttcctaaacggagaattaaaacctagtatttaacactaaccattctcctatgtatatactaatttatctgggaatgtaatactttattaaatgaagaaaatgatgctttcttcatttaatattttccacatcctggaaaaactataaactgacacagaatagattgaaatcttaactggggctaaacaaaaccctttccattggcagaatctccttttttcagggccataatgacatgatgtaaaaatttgctttaaaccattcatgcccttaaatagctagattttaaagcataataagcatattaacatttttaagcaaaagatacgttaacagtgacctttggttatccacagtagcaagagtaaagcacagatcattgaaatccatagataatcagtgaatcaactttcctaccaaacaatagattcatttacatttctttttcctccctatcctttcctgtaagcacctgtttttccatggaatggggttaatgagtaggtagaaaaggaaaaggaataatcagtaggagctgacaaccagtgaccatataagcagctgattgcctgtaattagtcaggctgaacaattagagttgaatgctgaaattaggaaccacaggtggtaatcctgagtagatgtagctcttcagcgtcatctcctgccctgagctccaggccatctctctaaccaccaaagaactcttagtacctacgggaaggaaaagctgtgtgcgacacagaggaaactccattatttgaacacatttctttggctcttgacaaatacttgcttttcctctaatcttgcaagagctatggctcttctattttccaatcacacagcttggcatgtaggaaaggttgaatgatcctctaagactgtgttggtcttcgtattctgtaaaacccattttttttttgtggtcttacagatgtttagaaagtggcacaggttactgaattgtctacctgccagcattctgatatagcacaaaaagctattttcctttattttttgtattattttttatttttctggcattgagctctagggtggatgagggtttatggtcctctgatcataagctccattctaaaaactggtcactgttagctgaaattgctttggttccccaaatgccttggaactccagacgcacccgcagggcctgaggtaggcttcatagagttctaggacttccgtgtgcgttgccaccagatcctgcccagcaatggcctttcccttctaaggtcattagattcagccaaaagcgacctcttctctagtccggtgttacgaacagaagttctgagttgtgctacaaaagtagttccatctttttggtgtaattttcatgtttttaatttgaaaacaaaaaaaaaacaactttttataagttttttaagggccctgcttagtcagtgtacagggtggagtcagaggcagttttcagaaaaaaacaaaaaacaaaaaacaatttcaccaagcggtagtaattgttgttttactagttatacatttagaatataaaggaggcatcagaaaacacactctctaaagccacttccttgtgcacagagtctgcacagggagagcacaggcatctccctggaaaagcacctgccaatgacgaatttcatggaagaacctaggcaagaaaggaagcctctttctgagacacagtctctgagaggtgagcctagctttgctcttcctacagggtatgcttgggccatacacaatgctcgccttactttaaagctattttgccacagtcctgttaaatagtgtggacgtccttttgcagtctggtgtgcatgccatatgatcaggacagcttttccactttactcggtttcctacaagcaagtaggaaatacagtgaatttaccctaaaatgtccaatctgtatttatgtaccttgtcagtgttttgctgttggttttctaaaacaatctgatcaataaatcttatccaaatcaa

SEQ ID NO: 425029 - DNA, 5846 bp, Homo sapiens
ggcacgaggctccgggcggccgcacctgccagttgtgctgcatggaaacaacctgttagtatttggaggtacgggcatcccatttggagagagcaacggcaatgacgtccatgtgtgtaatgtgaagtataagagatgggctttgctcagctgtcgggggaagaaacccagtcgtatatatggacaggctatggccatcatcaatggctccctttatgtctttggaggtacaaccggctatatttacagcacagacctgcacaagttagatctcaataccagagagtggacacaactgaaaccaaacaacctatcctgtgatctaccagaagagagataccgacatgaaattgcacatgacgggcagaggatttacatcttgggaggtggtacttcctggacagcatattccttaaacaagatccatgcatacaaccttgaaacgaatgcctgggaggaaattgcaacaaaaccccatgaaaaaataggctttcctgcagcccgaaggtgtcacagttgtgttcaaataaaaaatgatgtatttatttgtgggggctataatggagaggtgatcctgggagatatctggaagttgaatctgcagactttccaatgggtgaagctcccagctaccatgccagagccagtttattttcactgtgcagctgttacaccagctggttgcatgtacattcatggaggagtggtgaacatccatgaaaacaaacggactgggtcattgtttaagatctggctggtggtacctagcctgctggaactggcatgggagaagctgcttgcggccttccctaaccttgcaaacctctcccgaacacaacttctgcaccttggactcacacagggactcatcgaacgcttgaaatgaggatttctggactgttcattgatactggaaatgttaatttaaagagactcctttatttatgggcagtgtagaatgtgctacaaagaggattggttaccctgatcaaggccttatttagaaaatacatcagatgcctttctgtaaattggtttttcagtttatggacatctcactttcccacgtgcttccttctttgcttctgttcctcctgacccattacatgcacatgtactcacatactccctcttccttctcgatggagttaagggaaagcctgaaagtaccttaataatgttattaatcaagacagattcctttttaaaggaattctgaatagttccatgtcatacaatattctagaaattaaaacatcatcaacataaagaaaaatgaaattaaaaaatttttacatctagcaacagcaacaaccacaaatttaggggaagctgagaaggctaaccttgggaatcttgcaggttatacttaaacctagatgtttaacttagtgttttcaagatgtgtctaactgagtagtagctgggtctgatggcagcagtgcttgccatcttgttgcacagataactcaaacctaccctttggctttgaaggaaggttaagcagcccagcaactcttggttagtgatttctttctcatcctcatggtgccagcagtggttagagttggtttgtcaaaagacttacgtgtgtgtcgtggtcgtgctctttgttgttgctcttagaaattatggcaccaagaatgtttcaaacggaaaaacttgtggtggccaaagttcttcattctggcagttttgaaactctcttatgcttattaatggttttaaatatctctttgacttcttcatggggaattgtagaccctaagtatgtggtgtaaatgccatgtaacatgaacacaagctcccgagggaggccagagaagagccaggcagagaaaacctgcatcctctgggcttgttaacttggcttccactcgggctgtggtctttggctatcatcttggccatttccttttgagaacttgtttcttttctaatctctgggccaggtacctgccattttctcaggcagttggtccttgatttttcccttagcttgttgccttcttttccgtctgctttaatgtgcatggtgctgtgaataattgtctagtaattggatacaaggtcttgggggtaaagccacaggtcatccttcctgaagaaccaagtatcatttaaaaactagcatgaggaaggaatgaaactgagtagcattcattttgtgtgtgtgaaattttagttctggtttgtttgatttgttttttttttaattctaaaaagaatgacataaattttcactcgctttgccatctggctgctaggggagctgagcaagaggctcaccatgcgcatgtgtaagccgcaggtgtactcaaggtgctgaaggcgtgcaaggggcagcgctggtcctcccggggccaactcacagcaggagactcgcatgggagagttggaacacatctttcctttaagtgcctcttttttcacctagcttttaaagttattctttgtccttcatctcagaagggatctctttagcttatgtgtggatttaaaatgacctttgagctacggttaaaaagctaccatctggtgttcagttctgggaaagagaaaaccgtagcctccagacatgctcctgatttctaggccttatcataccatcccctctgtgatgggttgagttcatggagcctgtattctgggaagtcttataataaccacgcacctgtgaacgtgggtcctttctggggagtgaggaatgtgggagagaggcagaaaaaggagcagctcctctaggggcccatcctcccacatcttgccattaccagtctgtgtagcacttaacctcctgccaccactgccaggcttgctcctccgttctctcccagagcaagtcagtctgagcagctccattagtccaaaacagagctttgctgcatgacttcagcctggcctctggatatttggtggaaatatattctaaattgaacaagccaggctgtccagggtggcaagaggatttttgacctggatttatacagggaccaaagactgaatgctcagcctctgtgcttagactttcatggtccttaggatagaagtgagtctctagccctgctacaccagagagctgaagagagatgtggtctggttccatccatacttgctggcatcctttgttaagccttctgagggcagtcttctttgaggtagaccttggaggcctgacatcgaagacctgtgtgttttattttcataaaagtatatatccttggtctaaagtgtcttcttttaatataacactagtaaaaatgacatggtatgaccagcactgagtgctatagaaccacacatgtgtacatgttctggatgccaaatgagactgtgtgtaaatgactaagtgtagataactagaaattagataggggtcatcaggcgtttcggtatacctataaccagcactcggaattcctgacactgtttacttgatttaggaaagtttatgcctgctgcttctctgcctctttgaggtactcccagccgtcttactacagtcctgtaaatttaagtgcaatatatagaaacatatggatatatacagattatatatagggtgtaactataaagcaggtagactacttttttgcatcttggggaagtgagctcattactttaggttcaaattatgccaagaattttagatgtgatcagctggcttaagccaactcatgtcatgataaagctggattttcaagtccatgttttcttactccaactcttagagactcattgttccttaggtttgttagagttgagattttttttctccctgtcatctttgtactctctcatgtttgcatgtcttacattttgttgccggagaacaaggaagtccatctgtaaggagtttcctaaacggagaattaaaacctagtatttaacactaaccattctcctatgtatatactaatttatctgggaatgtaatactttattaaatgaagaaaatgatgctttcttcatttaatattttccacatcctggaaaaactataaactgacacagaatagattgaaatcttaactggggctaaacaaaaccctttccattggcagaatctccttttttcagggccataatgacatgatgtaaaaatttgctttaaaccattcatgcccttaaatagctagattttaaagcataataagcatattaacatttttaagcaaaagatacgttaacagtgacctttggttatccacagtagcaagagtaaagcacagatcattgaaatccatagataatcagtgaatcaactttcctaccaaacaatagattcatttacatttctttttcctccctatcctttcctgtaagcacctgtttttccatggaatggggttaatgagtaggtagaaaaggaaaaggaataatcagtaggagctgacaaccagtgaccatataagcagctgattgcctgtaattagtcaggctgaacaattagagttgaatgctgaaattaggaaccacaggtggtaatcctgagtagatgtagctcttcagcgtcatctcctgccctgagctccaggccatctctctaaccaccaaagaactcttagtacctacgggaaggaaaagctgtgtgcgacacagaggaaactccattatttgaacacatttctttggctcttgacaaatacttgcttttcctctaatcttgcaagagctatggctcttctattttccaatcacacagcttggcatgtaggaaaggttgaatgatcctctaagactgtgttggtcttcgtattctgtaaaacccattttttttttgtggtcttacagatgtttagaaagtggcacaggttactgaattgtctacctgccagcattctgatatagcacaaaaagctattttcctttattttttgtattattttttatttttctggcattgagctctagggtggatgagggtttatggtcctctgatcataagctccattctaaaaactggtcactgttagctgaaattgctttggttccccaaatgccttggaactccagacgcacccgcagggcctgaggtaggcttcatagagttctaggacttccgtgtgcgttgccaccagatcctgcccagcaatggcctttcccttctaaggtcattagattcagccaaaagcgacctcttctctagtccggtgttacgaacagaagttctgagttgtgctacaaaagtagttccatctttttggtgtaattttcatgtttttaatttgaaaacaaaaaaaaaacaactttttataagttttttaagggccctgcttagtcagtgtacagggtggagtcagaggcagttttcagaaaaaaacaaaaaacaaaaaacaatttcaccaagcggtagtaattgttgttttactagttatacatttagaatataaaggaggcatcagaaaacacactctctaaagccacttccttgtgcacagagtctgcacagggagagcacaggcatctccctggaaaagcacctgccaatgacgaatttcatggaagaacctaggcaagaaaggaagcctctttctgagacacagtctctgagaggtgagcctagctttgctcttcctacagggtatgcttgggccatacacaatgctcgccttactttaaagctattttgccacagtcctgttaaatagtgtggacgtccttttgcagtctggtgtgcatgccatatgatcaggacagcttttccactttactcggtttcctacaagcaagtaggaaatacagtgaatttaccctaaaatgtccaatctgtatttatgtaccttgtcagtgttttgctgttggttttctaaaacaatctgatcaataaatcttatccaaatcaa

SEQ ID NO: 425030 - DNA, 4294 bp, Homo sapiens
agtcattggtctctggtgggaccgggcgctgcccccttcccctgtctcctgggtctctggaggagcccaggaaggaggctccgctggttccgctgggtcaggcgctgacgggaccgggctgcggcaatcgttagcgggtcatgtcggccgcccagggctgggacaggaaccgccggaggggaggaggcgccgccggcgctggtggcggaggtagcggggccggcgggggcagtgggggcagcgggggtcgggggactggccagctcaaccgcttcgtgcaactctccgggcggccgcacctgccaggtaagaagaaaatacgatgggacccagttaggaggcgcttcattcagtcctgtcccatcataaggatccctaacaggtttttgagaggccacagacctccaccagcacgaagtggacatcgttgtgtggcagataataccaacctatatgtgtttggaggttataacccagattatgatgaatcgggagggcctgataatgaagactatcctctcttcagggaactctggaggtatcattttgctacaggagtatggcaccagatgggcacagatggctacatgccccgggaattggcatctatgtcacttgtgctgcatggaaacaacctgttagtatttggaggtacgggcatcccatttggagagagcaacggcaatgacgtccatgtgtgtaatgtgaagtataagagatgggctttgctcagctgtcgggggaagaaacccagtcgtatatatggacaggctatggccatcatcaatggctccctttatgtctttggaggtacaaccggctatatttacagcacagacctgcacaagttagatctcaataccagagagtggacacaactgaaaccaaacaacctatcctgtgatctaccagaagagagataccgacatgaaattgcacatgacgggcagaggatttacatcttgggaggtggtacttcctggacagcatattccttaaacaagatccatgcatacaaccttgaaacgaatgcctgggaggaaattgcaacaaaaccccatgaaaaaataggctttcctgcagcccgaaggtgtcacagttgtgttcaaataaaaaatgatgtatttatttgtgggggctataatggagaggtgatcctgggagatatctggaagttgaatctgcagactttccaatgggtgaagctcccagctaccatgccagagccagtttattttcactgtgcagctgttacaccagctggttgcatgtacattcatggaggagtggtgaacatccatgaaaacaaacggactgggtcattgtttaagatctggctggtggtacctagcctgctggaactggcatgggagaagctgcttgcggccttccctaaccttgcaaacctctcccgaacacaacttctgcaccttggactcacacagggactcatcgaacgcttgaaatgaggatttctggactgttcattgatactggaaatgttaatttaaagagactcctttatttatgggcagtgtagaatgtgctacaaagaggattggttaccctgatcaaggccttatttagaaaatacatcagatgcctttctgtaaattggtttttcagtttatggacatctcactttcccacgtgcttccttctttgcttctgttcctcctgacccattacatgcacatgtactcacatactccctcttccttctcgatggagttaagggaaagcctgaaagtaccttaataatgttattaatcaagacagattcctttttaaaggaattctgaatagttccatgtcatacaatattctagaaattaaaacatcatcaacataaagaaaaatgaaattaaaaaatttttacatctagcaacagcaacaaccacaaatttaggggaagctgagaaggctaaccttgggaatcttgcaggttatacttaaacctagatgtttaacttagtgttttcaagatgtgtctaactgagtagtagctgggtctgatggcagcagtgcttgccatcttgttgcacagataactcaaacctaccctttggctttgaaggaaggttaagcagcccagcaactcttggttagtgatttctttctcatcctcatggtgccagcagtggttagagttggtttgtcaaaagacttacgtgtgtgtcgtggtcgtgctctttgttgttgctcttagaaattatggcaccaagaatgtttcaaacggaaaaacttgtggtggccaaagttcttcattctggcagttttgaaactctcttatgcttattaatggttttaaatatctctttgacttcttcatggggaattgtagaccctaagtatgtggtgtaaatgccatgtaacatgaacacaagctcccgagggaggccagagaagagccaggcagagaaaacctgcatcctctgggcttgttaacttggcttccactcgggctgtggtctttggctatcatcttggccatttccttttgagaacttgtttcttttctaatctctgggccaggtacctgccattttctcaggcagttggtccttgatttttcccttagcttgttgccttcttttccgtctgctttaatgtgcatggtgctgtgaataattgtctagtaattggatacaaggtcttgggggtaaagccacaggtcatccttcctgaagaaccaagtatcatttaaaaactagcatgaggaaggaatgaaactgagtagcattcattttgtgtgtgtgaaattttagttctggtttgtttgatttgttttttttttaattctaaaaagaatgacataaattttcactcgctttgccatctggctgctaggggagctgagcaagaggctcaccatgcgcatgtgtaagccgcaggtgtactcaaggtgctgaaggcgtgcaaggggcagcgctggtcctcccggggccaactcacagcaggagactcgcatgggagagttggaacacatctttcctttaagtgcctcttttttcacctagcttttaaagttattctttgtccttcatctcagaagggatctctttagcttatgtgtggatttaaaatgacctttgagctacggttaaaaagctaccatctggtgttcagttctgggaaagagaaaaccgtagcctccagacatgctcctgatttctaggccttatcataccatcccctctgtgatgggttgagttcatggagcctgtattctgggaagtcttataataaccacgcacctgtgaacgtgggtcctttctggggagtgaggaatgtgggagagaggcagaaaaaggagcagctcctctaggggcccatcctcccacatcttgccattaccagtctgtgtagcacttaacctcctgccaccactgccaggcttgctcctccgttctctcccagagcaagtcagtctgagcagctccattagtccaaaacagagctttgctgcatgacttcagcctggcctctggatatttggtggaaatatattctaaattgaacaagccaggctgtccagggtggcaagaggatttttgacctggatttatacagggaccaaagactgaatgctcagcctctgtgcttagactttcatggtccttaggatagaagtgagtctctagccctgctacaccagagagctgaagagagatgtggtctggttccatccatacttgctggcatcctttgttaagccttctgagggcagtcttctttgaggtagaccttggaggcctgacatcgaagacctgtgtgttttattttcataaaagtatatatccttggtctaaagtgtcttcttttaatataacactagtaaaaatgacatggtatgaccagcactgagtgctatagaaccacacatgtgtacatgttctggatgccaaatgagactgtgtgtaaatgactaagtgtagataactagaaattagataggggtcatcaggcgtttcggtatacctataaccagcactcggaattcctgacactgtttacttgatttaggaaagtttatgcctgctgcttctctgcctctttgaggtactcccagccgtcttactacagtcctgtaaatttaagtgcaatatatagaaacatatggatatatacagattatatatagggtgtaactataaagcaggtagactacttttttgcatcttggggaagtgagctcattactttaggttcaaattatgccaagaatttttatgagacaccattgggtttaccccccctggtgttgataaaacccgggtttttaaagccctgc

SEQ ID NO: 425031 - DNA, 712 bp, Homo sapiens
agtcattggtctctggtgggaccgggcgctgcccccttcccctgtctcctgggtctctggaggagcccaggaaggaggctccgctggttccgctgggtcaggcgctgacgggaccgggctgcggcaatcgttagcgggtcatgtcggccgcccagggctgggacaggaaccgccggaggggaggaggcgccgccggcgctggtggcggaggtagcggggccggcgggggcagtgggggcagcgggggtcgggggactggccagctcaaccgcttcgtgcaactctccgggcggccgcacctgccaggccacagacctccaccagcacgaagtggacatcgttgtgtggcagataataccaacctatatgtgtttggaggttataacccagattatgatgaatcgggagggcctgataatgaagactatcctctcttcagggaactctggaggtatcattttgctacaggagtatggcaccagatgggcacagatggctacatgccccgggaattggcatctatgtcactgttcacagcatcttcactaggagtagattctatctcaagaaaccactttcactgagcacagtgactcatgcctgtaatcccagcactttgggaggccgaggcaggaggatcgctggagcccaggagttgaagaccagcttgggcaacatagtgagaccttttctctacaaaaaataaaaaaat

SEQ ID NO: 425032 - DNA, 1760 bp, Homo sapiens
agtgggtgcctgatagacatcctaggactatacagaaggaaaaggcccactttgggggataatgctgagggacactatgaaatcttggaatgatagccagtcagatctgtgtagcactgaccaagaagaggaagaagagatgatttttggtgaaaatgaagatgatttggatgagatgatggatttaagtgatctgcctacctcactttttgcttgcagcgtccatgaagcagtgtttgaggcacgagagcagaaggaaagatttgaagcactcttcaccatctatgatgaccaggttacttttcagctgtttaaaagctttagaagagtcagaataaatttcagcaaacctgaagcggcagcaagagcgcgaatagaactccacgaaacagacttcaatgggcagaagctaaagctatattttgcacaggtgcagatgtccggcgaagtgcgggacaagtcctatctcctgccgccccagcctgtcaagcagttcctcatctcccctccagcctctcccccagtggggtggaagcagagcgaagatgcgatgcctgttataaattatgatttactctgtgctgtttccaaattgggaccaggagagaaatatgaacttcacgcgggaacagagtcgacacccagcgtggtggttcatgtctgtgaaagtgaaactgaagaggaagaagagacaaaaaaccccaaacagaaaattgcccagacaaggcgccccgaccctccgaccgcagcgttgaatgagccccagacctttgattgcgcgctgtgaggcccttggttgtggtgcgaggcggctgccctggtgggctctggccatggcgctctgtgcctgcggccgatgcgttgctgcgaacagcataggtgagactctgccgagtgaggtataggtcttctcaccacgcctgtactgcagacacggtcgtgtagagtagcagctgatttgacctgtcccagattttaagtgatattccaaaagggactttacattaaaggagaagcccccaagatgtggccacccttaaccatttttaaatagtaacaaattaggaaaacagctcccctcccctccagccatgtaagtcctcctgattctgtatcacatgagacaccaaaaactggaaatgtagtcacacccagtacagtaccatttttatgaatttaaaaatagtcttataattttaattgtttgtgggtatttttctactggtataaatagcttctaattaataaatcgatcaaaggttgttactcagtatacatgaaattttttgcaggaaaagaaaccagaaatacagaataattcatagaaatcatggttctcaagtatttgttcaattagctttggggaagaaatgccaaatccactttgaggatgagtcttacgacacagatccacccacatgttgctcttatctggaatttgggacaaagcaatgcacaggccctcattcctgatgtggcgccctccagacatggctgcccaggaaggacggccactttagaagtgggacgtatcaccagtaagcttgaatgattaggatcgcaggtggctactgcattctgccgttcgtgaccgtgttctagcctgtagaccacccagctaccttcattcaccagttttatccttcaccttttccagtatctggttaaccactagttcttgagttttggtatgaagtgtacgttatgtatgtcatcatggactttcaactagaaaaggtaatgataaggttttctgaaga

SEQ ID NO: 425033 - DNA, 1347 bp, Homo sapiens
agtgggtgcctgatagacatcctaggactatacagaaggaaaaggcccactttgggggataatgctgagggacactatgaaatcttggaatgatagccagtcagatctgtgtagcactgaccaagaagaggaagaagagatgatttttggtgaaaatgaagatgatttggatgagatgatggatttaagtgatctgcctacctcactttttgcttgcagcgtccatgaagcagtgtttgaggcacgagagcagaaggaaagatttgaagcactcttcaccatctatgatgaccaggttacttttcagctgtttaaaagctttagaagagtcagaataaatttcagcaaacctgaagcggcagcaagagcgcgaatagaactccacgaaacagacttcaatgggcagaagctaaagctatattttgcacaggtgcagatgtccggcgaagtgcgggacaagtcctatctcctgccgccccagcctgtcaagcagttcctcatctcccctccagcctctcccccagtggggtggaagcagagcgaagatgcgatgcctgttataaattatgatttactctgtgctgtttccaaattgggaccaggagagaaatatgaacttcacgcgggaacagagtcgacacccagcgtggtggttcatgtctgtgaaagtgaaactgaagaggaagaagagacaaaaaaccccaaacagaaaattgcccagacaaggcgccccgaccctccgaccgcagcgttgaatgagccccagacctttgattgcgcgctgtgaggcccttggttgtggtgcgaggcggctgccctggtgggctctggccatggcgctctgtgcctgcggccgatgcgttgctgcgaacagcataggaaaagaaaccagaaatacagaataattcatagaaatcatggttctcaagtatttgttcaattagctttggggaagaaatgccaaatccactttgaggatgagtcttacgacacagatccacccacatgttgctcttatctggaatttgggacaaagcaatgcacaggccctcattcctgatgtggcgccctccagacatggctgcccaggaaggacggccactttagaagtgggacgtatcaccagtaagcttgaatgattaggatcgcaggtggctactgcattctgccgttcgtgaccgtgttctagcctgtagaccacccagctaccttcattcaccagttttatccttcaccttttccagtatctggttaaccactagttcttgagttttggtatgaagtgtacgttatgtatgtcatcatggactttcaactagaaaaggtaatgataaggttttctgaaga

SEQ ID NO: 425034 - DNA, 1730 bp, Homo sapiens
agtgggtgcctgatagacatcctaggactatacagaaggaaaaggcccactttgggggataatgctgagggacactatgaaatcttggaatgatagccagtcagatctgtgtagcactgaccaagaagaggaagaagagatgatttttggtgaaaatgaagatgatttggatgagatgatggatttaagtgatctgcctacctcactttttgcttgcagcgtccatgaagcagtgtttgaggcacgagagcagaaggaaagatttgaagcactcttcaccatctatgatgaccaggttacttttcagctgtttaaaagctttagaagagtcagaataaatttcagcaaacctgaagcggcagcaagagcgcgaatagaactccacgaaacagacttcaatgggcagaagctaaagctatattttgcacagtcctatctcctgccgccccagcctgtcaagcagttcctcatctcccctccagcctctcccccagtggggtggaagcagagcgaagatgcgatgcctgttataaattatgatttactctgtgctgtttccaaattgggaccaggagagaaatatgaacttcacgcgggaacagagtcgacacccagcgtggtggttcatgtctgtgaaagtgaaactgaagaggaagaagagacaaaaaaccccaaacagaaaattgcccagacaaggcgccccgaccctccgaccgcagcgttgaatgagccccagacctttgattgcgcgctgtgaggcccttggttgtggtgcgaggcggctgccctggtgggctctggccatggcgctctgtgcctgcggccgatgcgttgctgcgaacagcataggtgagactctgccgagtgaggtataggtcttctcaccacgcctgtactgcagacacggtcgtgtagagtagcagctgatttgacctgtcccagattttaagtgatattccaaaagggactttacattaaaggagaagcccccaagatgtggccacccttaaccatttttaaatagtaacaaattaggaaaacagctcccctcccctccagccatgtaagtcctcctgattctgtatcacatgagacaccaaaaactggaaatgtagtcacacccagtacagtaccatttttatgaatttaaaaatagtcttataattttaattgtttgtgggtatttttctactggtataaatagcttctaattaataaatcgatcaaaggttgttactcagtatacatgaaattttttgcaggaaaagaaaccagaaatacagaataattcatagaaatcatggttctcaagtatttgttcaattagctttggggaagaaatgccaaatccactttgaggatgagtcttacgacacagatccacccacatgttgctcttatctggaatttgggacaaagcaatgcacaggccctcattcctgatgtggcgccctccagacatggctgcccaggaaggacggccactttagaagtgggacgtatcaccagtaagcttgaatgattaggatcgcaggtggctactgcattctgccgttcgtgaccgtgttctagcctgtagaccacccagctaccttcattcaccagttttatccttcaccttttccagtatctggttaaccactagttcttgagttttggtatgaagtgtacgttatgtatgtcatcatggactttcaactagaaaaggtaatgataaggttttctgaaga

SEQ ID NO: 425035 - DNA, 2506 bp, Homo sapiens
tggctgcttttaggaaattctcaagacacaaatattcagtctttttaaaattcttacattttggaaaacatgcttcactctatagatagatccttcacattgggattatttaatcccaaaaacaagtttgctgtagacaactgcttaagcctttaaaaaattcctattctgctaattttttaaccaacttgtaattatagataattctgctttaggtcaaggtcttaaatcatttaatatcctaaccttgttatctcttgcctcctcctctctgtttttatttgttttcaaggtttttcataaaaacaaatactagttttgaaggattttttcttacatttaactgctcaaacataatatttttggggacaccttcttatggaggagtttgaaaactttttatgttcttgagtttgtccaatatcagctgcttttgggaaaggaaacaaaaaagtgaaggaaatattttcaggaagtttttctcaacctacaaaagctttaaaaataagaaattgacaagtaactagactatgatatgcctttgctttcatcacaaaagttcatcagcaaacaggaaaaaaaaagacccctaaaaagcctaaagctttaaattgtctccaaattcttaaaattagtcatctgtcttagatgtacatttatttgtcagcaaccttgtctgatttgaaatagatgatatgataaaacatgcattaacatgagtagtttatttttgttgggctccagagtgtaagaatattttattttttgtttgacataaaaagtgaagttgacttgcgtgaataacaatccagcatgctttcattctttctgaataacacagaataactgtgctacagcttctggattagttgtctatttccagttagaggagtgtgtgacatttatggtttgggaatagcatatttctaaagcataatataatacaagaaatagtgatgctctgttttcacaaatttatcttttcattcacccatccatccatttaacagatatttattgagtgcctatcttaggtgtaatagtatttaagactgaaagaaggagaatttctaacctgtcataagagtaaggtttcgtaaattcatctttcctgaacttaggcattagtttggcaatatgtgaatatgatgaactctaaacctagctgatctgtatatgtatgatgtatatatgtcatatgtatgatatatatgaaatattcccataactgcatatgaacacatatgccatatacatatataccaacgggctgaataacatactcttttgtcttggataatctgttttctgggttatgtatctgttgtctttggcctactcagggatttttatttctttaaataacttatcttttggacatatttttatattatttggaaaactttccaatattcctgttacaaagtggtgtctgttttcagtgatggctatttcatcagtgcttgaaatagtgtgcactgtgttgcacaggtttttcatttttctattgagtagatatttttaaattaacatacacatttttctctttaaagggtcatatctattaggcctttccctgctggtaacttaaaatgattatttgtgaattttttactaagtttcatcaagatcttaaaaagagagaagaaaataaaaagtattatttatatgtcagtgccaactttgaaggtaaaacagtagtagtaacttttgggagaaattctaaaaactactttaaaaagaagcgtgcacataaaataaatatctttctatccaaggcttgtcattttatatgcttttattgtaaatttaatatatactactttaaaaaattgaactatacagaatttataaaatacaactttctctacttaccccacctcttattttctaggggtaaccactgttaatggtttggtatgtgtccttccagacactttctacaaatatacaaataagtgtgtttgtgtatgtgtctgtgtgtgtattcattttatacaaatagaaaaatattcttactgtgctgtgactctttgtcattttattatatattaatagatacctttccataagcgtttaaatagatttacctcattcttttataaattactgcataatccattgtaggagtatactttaacttattgaattagtcccctgttgaatggactacaagattattttcacttctctattacaaagaaagcaagagtgaagacccttttgcatatatttttgtcaccttgcatgaacatatccataaggttgtacatttgttttttacaagatctttgtaataaacattttaatgtaatttcaggagatgaggtcatagagataatatgagacccttttttggataaaaagaaagattgtacaggagtgcataatttttaaagaaaatcgtcttttgaagggtaatttcctttctgcctgattagccaaataaataccttgccaaaacttacaataggaaattttttttcaataaaaataaaatttgagg

SEQ ID NO: 425036 - DNA, 3348 bp, Homo sapiens
atcggaactgtccatgtactactgggggcggggctgccaagggaggaggaagatggcggcgggggcgaggtggtattttcaaaagaaataattccagattgatggatgaaattttaaaacaacagcaagaacttctgggcctagattgttcaaaatactcaccagaatttgcaaatagtaatgacaaagatgatcaagttttaaattgccatttggcagtgaaggtgctgtctccggaagatggaaaagcagatattgtaagagctgctcaggacttttgccagttagtagcccagaagcaaaagagacccacagatttggatgtagatacgttagccagtttacttagttcaaatggttgtcctgatcctgatttagtattgaagttcggtcctgtggacagcacattaggctttcttccctggcacatcagattgactgagattgtctctttgccttcccacctaaacatcagttatgaggactttttctctgcccttcgtcaatatgcagcctgtgaacagcgtctgggaaagtagtggtcattggttgcataatttgatttgaggcttgtggaggaaaggaaccaagtgactctgatgtttacaaagcacctatgaaaccctgtacacacctagttcataatcctcataatttatcaacaaacacaaaaaagtgtcttacttgagagtgagtgtgtgtgtgtgcgtgtgcacgtgcacacatgtgcacgtttgtatgtatggaaataaacttataaatggggacgtattggagaaggaaatacatagacctacaactttgagcaaatagcagtgatgttttaggaactgaaatgtcacacttaaagtcttcagcccagctacttccctatttttgtggggagaagagggcctgattagaactgttctggttgtgtttggcgggaggggaataatttttgttcagtccttcttagtgaccaaactttaatttttaagaataatatattgacttactgaactgaagcattctgagttgaaaggagctccagaggagtggagttctgtgttgctcacatgttaaaatcttgctcaccttcagagcagagggaatacctatcttcagatatccgtccattttcatctcttaattgtagtcaaaagtatgacttgagagtgttgctctggtattctgggttctgaagtctggtattctggtattctgggttcaaaagtatgacttgagagtgttgctctggtattctgagagttgctctgtattctgggttctgaagattatttgaaaaataactcctactacattgaaatgcagacttaaaaatttaaacattggattaggcagtcaaaaaaaccaagcaagcataaaaggtcaataagttgtaatcttgatagtaaaggtggaaaacttattataaatggaaagaaagttttatttccttttttgtttgatgggcagtatgccatattatacccaaagttcttttaaaaaatatttccatcaaccatttttatttaaaataaacatttgagggaagttaccaaggcagcttttttcctcaaaagtaacctgttcctctttggaatagcacattttaggggcatggttaatacctgagatttttactcagtaaatcctgatggttactgtgtgtaaaatatctttaagtaggattgaaggcctctgtgggggaataaaatattaccaaagtctataaaaataaattttacatgttctcttttatgacagagagcagcactggttctgttatttttaaaatgaataattgatttcttgataggtgtttaatatttcttccctcactgctgattcttagatagaaaccattctttatatttgatagactgctttcagaaaacccttatcaacaagtgtacaatacttatctaaaactatacatttagaatggagcagtttaatactagatctcagaagttttgaaaaatagcaaagaagactggatttggaaagcatggtctacaattggttgttaaattctgaagctatgaagaataaatgtttcaactttggattatgaaaccccatttatgattttttaaatacacttgaaataaaaatgattaaactaaattttggtccagtgacattactttgcactgcataatccattatacgttgtacgacttttttttttggttttaatttattactgagagttttgtgtgaagctacagcatatctaaccagagaatttctgattccttatactgtgattatattatattgaggcatttgtagtgcagctgaagactgaatttatgccttttgtaaacatgataggtataaatgtcttataaacattctggagtatgtatagctttaatgaatgaaatttaatggacctgattaaaatgaagggatttaatcgttgttaaagttaagttagtcaaataaattacctactggaatatagcccaagccagtaaaggtttaatatttgcattttcgtgcttttattttctccttccattcataagtatatacttgaaagtacatctgtagcctatgatttgagtctcttgaagttctaggaagaggcaaactacaaactactaggattctgatttcagatgtagtcattccagaaccttctctttatgagttcacctgctagtacaatctccacaacttgaatggcattggttgttctgtaattcctgccaaaagcatcacaagttgtacatcatcaaggctccctttgcactcccaagaagaactggtaattttaaacaaaagtatgtgtctttatttgtattggaaaatactgtctttaaattgtttcttgttgacactccccacaatggaaaaattaccgaattaaacctgttttatggatggcagcttggagcatagcaagaagttggaggatttgaattccattcccagttctcattgtgttttgtttcttaaaactataataatcggttactgttataaagtttaaaaggtggttttaatgtgaatagcaaattctggtatatcgtgactaacgcttaagaatgcctgtctttgagaggaaggtgttataatattaatgaacagtgccaaatacactgtgcatatctgcaatttaatctttgaatgtatgttactggattagctccctcctcctgtgtgatggtaccatgcatagagtcaatcaaatccttgtgatgttttgtatggactttgacaatatgtaaataatgtgtaaagccagtttttatgattaaggaatcaaatttattgaattttattattgaaagttgaaacttaacatgtatgaacaaaaaccaataaaagaatatactcttttcattgactata

SEQ ID NO: 425037 - DNA, 3854 bp, Homo sapiens
atcggaactgtccatgtactactgggggcggggctgccaagggaggaggaagatggcggcgggggcgaggtgaggtgttggcagtggaaaggggttcgggctcggggggcggggggacgcggagcgatggcccgcgccggccgcaggggcggataaaaagccgtcgcgctgcgggagtgggcgggagggagagggggtgtccgagggccacaagagtatgacggggctgtacgagctggtgtggcgggtgctgcacgcgctgctctgtctgcaccgcacgctcacctcctggctccgcgttcggttcggcacctggaactggatctggcggcgctgctgccgcgccgcctctgccgcggtcctagcgccgctcggcttcacgctccgcaagcccccggcagtcggcaggaaccgccgtcaccaccggcacccgcgcggggggtcgtgcctggcagccgcacaccaccggatgcgctggcgcgcggacggtcgttccttggagaagctgcctgtgcatatgggcctggtgatcaccgaggtggagcaggaacccagcttctcggacatcgcgagcctcgtggtgtggtgtatggccgtgggcatctcctacattagcgtctacgaccaccaaggtattttcaaaagaaataattccagattgatggatgaaattttaaaacaacagcaagaacttctgggcctagattgttcaaaatactcaccagaatttgcaaatagtaatgacaaagatgatcaagttttaaattgccatttggcagtgaaggtgctgtctccggaagatggaaaagcagatattgtaagagctgctcaggacttttgccagttagtagcccagaagcaaaagagacccacagatttggatgtagatacgttagccagtttacttagttcaaatggttgtcctgatcctgatttagtattgaagttcggtcctgtggacagcacattaggctttcttccctggcacatcagattgactgagattgtctctttgccttcccacctaaacatcagttatgaggactttttctctgcccttcgtcaatatgcagcctgtgaacagcgtctgggaaagtagtggtcattggttgcataatttgatttgaggcttgtggaggaaaggaaccaagtgactctgatgtttacaaagcacctatgaaaccctgtacacacctagttcataatcctcataatttatcaacaaacacaatgtgcacgtttgtatgtatggaaataaacttataaatggggacgtattggagaaggaaatacatagacctacaactttgagcaaatagcagtgatgttttaggaactgaaatgtcacacttaaagtcttcagcccagctacttccctatttttgtggggagaagagggcctgattagaactgttctggttgtgtttggcgggaggggaataatttttgttcagtccttcttagtgaccaaactttaatttttaagaataatatattgacttactgaactgaagcattctgagttgaaaggagctccagaggagtggagttctgtgttgctcacatgttaaaatcttgctcaccttcagagcagagggaatacctatcttcagatatccgtccattttcatctcttaattgtagtcaaaagtatgacttgagagtgttgctctggtattctgggttctgaagtctggtattctggtattctgggttcaaaagtatgacttgagagtgttgctctggtattctgagagttgctctgtattctgggttctgaagattatttgaaaaataactcctactacattgaaatgcagacttaaaaatttaaacattggattaggcagtcaaaaaaaccaagcaagcataaaaggtcaataagttgtaatcttgatagtaaaggtggaaaacttattataaatggaaagaaagttttatttccttttttgtttgatgggcagtatgccatattatacccaaagttcttttaaaaaatatttccatcaaccatttttatttaaaataaacatttgagggaagttaccaaggcagcttttttcctcaaaagtaacctgttcctctttggaatagcacattttaggggcatggttaatacctgagatttttactcagtaaatcctgatggttactgtgtgtaaaatatctttaagtaggattgaaggcctctgtgggggaataaaatattaccaaagtctataaaaataaattttacatgttctcttttatgacagagagcagcactggttctgttatttttaaaatgaataattgatttcttgataggtgtttaatatttcttccctcactgctgattcttagatagaaaccattctttatatttgatagactgctttcagaaaacccttatcaacaagtgtacaatacttatctaaaactatacatttagaatggagcagtttaatactagatctcagaagttttgaaaaatagcaaagaagactggatttggaaagcatggtctacaattggttgttaaattctgaagctatgaagaataaatgtttcaactttggattatgaaaccccatttatgattttttaaatacacttgaaataaaaatgattaaactaaattttggtccagtgacattactttgcactgcataatccattatacgttgtacgacttttttttttggttttaatttattactgagagttttgtgtgaagctacagcatatctaaccagagaatttctgattccttatactgtgattatattatattgaggcatttgtagtgcagctgaagactgaatttatgccttttgtaaacatgataggtataaatgtcttataaacattctggagtatgtatagctttaatgaatgaaatttaatggacctgattaaaatgaagggatttaatcgttgttaaagttaagttagtcaaataaattacctactggaatatagcccaagccagtaaaggtttaatatttgcattttcgtgcttttattttctccttccattcataagtatatacttgaaagtacatctgtagcctatgatttgagtctcttgaagttctaggaagaggcaaactacaaactactaggattctgatttcagatgtagtcattccagaaccttctctttatgagttcacctgctagtacaatctccacaacttgaatggcattggttgttctgtaattcctgccaaaagcatcacaagttgtacatcatcaaggctccctttgcactcccaagaagaactggtaattttaaacaaaagtatgtgtctttatttgtattggaaaatactgtctttaaattgtttcttgttgacactccccacaatggaaaaattaccgaattaaacctgttttatggatggcagcttggagcatagcaagaagttggaggatttgaattccattcccagttctcattgtgttttgtttcttaaaactataataatcggttactgttataaagtttaaaaggtggttttaatgtgaatagcaaattctggtatatcgtgactaacgcttaagaatgcctgtctttgagaggaaggtgttataatattaatgaacagtgccaaatacactgtgcatatctgcaatttaatctttgaatgtatgttactggattagctccctcctcctgtgtgatggtaccatgcatagagtcaatcaaatccttgtgatgttttgtatggactttgacaatatgtaaataatgtgtaaagccagtttttatgattaaggaatcaaatttattgaattttattattgaaagttgaaacttaacatgtatgaacaaaaaccaataaaagaatatactcttttcattgactata

SEQ ID NO: 425038 - DNA, 3178 bp, Homo sapiens
cagagctgtgactgaggtgcggcctgggtgtgatttcagtcgacggggtcaggggtgctgtctccggaagatggaaaagcagatattgtaagagctgctcaggacttttgccagttagtagcccagaagcaaaagagacccacagatttggatgtagatacgttagccagtttacttagttcaaatggttgtcctgatcctgatttagtattgaagttcggtcctgtggacagcacattaggctttcttccctggcacatcagattgactgagattgtctctttgccttcccacctaaacatcagttatgaggactttttctctgcccttcgtcaatatgcagcctgtgaacagcgtctgggaaagtagtggtcattggttgcataatttgatttgaggcttgtggaggaaaggaaccaagtgactctgatgtttacaaagcacctatgaaaccctgtacacacctagttcataatcctcataatttatcaacaaacacaaaaaagtgtcttacttgagagtgagtgtgtgtgtgtgcgtgtgcacgtgcacacatgtgcacgtttgtatgtatggaaataaacttataaatggggacgtattggagaaggaaatacatagacctacaactttgagcaaatagcagtgatgttttaggaactgaaatgtcacacttaaagtcttcagcccagctacttccctatttttgtggggagaagagggcctgattagaactgttctggttgtgtttggcgggaggggaataatttttgttcagtccttcttagtgaccaaactttaatttttaagaataatatattgacttactgaactgaagcattctgagttgaaaggagctccagaggagtggagttctgtgttgctcacatgttaaaatcttgctcaccttcagagcagagggaatacctatcttcagatatccgtccattttcatctcttaattgtagtcaaaagtatgacttgagagtgttgctctggtattctgggttctgaagtctggtattctggtattctgggttcaaaagtatgacttgagagtgttgctctggtattctgagagttgctctgtattctgggttctgaagattatttgaaaaataactcctactacattgaaatgcagacttaaaaatttaaacattggattaggcagtcaaaaaaaccaagcaagcataaaaggtcaataagttgtaatcttgatagtaaaggtggaaaacttattataaatggaaagaaagttttatttccttttttgtttgatgggcagtatgccatattatacccaaagttcttttaaaaaatatttccatcaaccatttttatttaaaataaacatttgagggaagttaccaaggcagcttttttcctcaaaagtaacctgttcctctttggaatagcacattttaggggcatggttaatacctgagatttttactcagtaaatcctgatggttactgtgtgtaaaatatctttaagtaggattgaaggcctctgtgggggaataaaatattaccaaagtctataaaaataaattttacatgttctcttttatgacagagagcagcactggttctgttatttttaaaatgaataattgatttcttgataggtgtttaatatttcttccctcactgctgattcttagatagaaaccattctttatatttgatagactgctttcagaaaacccttatcaacaagtgtacaatacttatctaaaactatacatttagaatggagcagtttaatactagatctcagaagttttgaaaaatagcaaagaagactggatttggaaagcatggtctacaattggttgttaaattctgaagctatgaagaataaatgtttcaactttggattatgaaaccccatttatgattttttaaatacacttgaaataaaaatgattaaactaaattttggtccagtgacattactttgcactgcataatccattatacgttgtacgacttttttttttggttttaatttattactgagagttttgtgtgaagctacagcatatctaaccagagaatttctgattccttatactgtgattatattatattgaggcatttgtagtgcagctgaagactgaatttatgccttttgtaaacatgataggtataaatgtcttataaacattctggagtatgtatagctttaatgaatgaaatttaatggacctgattaaaatgaagggatttaatcgttgttaaagttaagttagtcaaataaattacctactggaatatagcccaagccagtaaaggtttaatatttgcattttcgtgcttttattttctccttccattcataagtatatacttgaaagtacatctgtagcctatgatttgagtctcttgaagttctaggaagaggcaaactacaaactactaggattctgatttcagatgtagtcattccagaaccttctctttatgagttcacctgctagtacaatctccacaacttgaatggcattggttgttctgtaattcctgccaaaagcatcacaagttgtacatcatcaaggctccctttgcactcccaagaagaactggtaattttaaacaaaagtatgtgtctttatttgtattggaaaatactgtctttaaattgtttcttgttgacactccccacaatggaaaaattaccgaattaaacctgttttatggatggcagcttggagcatagcaagaagttggaggatttgaattccattcccagttctcattgtgttttgtttcttaaaactataataatcggttactgttataaagtttaaaaggtggttttaatgtgaatagcaaattctggtatatcgtgactaacgcttaagaatgcctgtctttgagaggaaggtgttataatattaatgaacagtgccaaatacactgtgcatatctgcaatttaatctttgaatgtatgttactggattagctccctcctcctgtgtgatggtaccatgcatagagtcaatcaaatccttgtgatgttttgtatggactttgacaatatgtaaataatgtgtaaagccagtttttatgattaaggaatcaaatttattgaattttattattgaaagttgaaacttaacatgtatgaacaaaaaccaataaaagaatatactcttttcattgactata

SEQ ID NO: 425039 - DNA, 2669 bp, Homo sapiens
atcggaactgtccatgtactactgggggcggggctgccaagggaggaggaagatggcggcgggggcgaggtgaggtgttggcagtggaaaggggttcgggctcggggggcggggggacgcggagcgatggcccgcgccggccgcaggggcggataaaaagccgtcgcgctgcgggagtgggcgggagggagagggggtgtccgagggccacaagagtatgacggggctgtacgagctggtgtggcgggtgctgcacgcgctgctctgtctgcaccgcacgctcacctcctggctccgcgttcggttcggcacctggaactggatctggcggcgctgctgccgcgccgcctctgccgcggtcctagcgccgctcggcttcacgctccgcaagcccccggcagtcggcaggaaccgccgtcaccaccggcacccgcgcggggggtcgtgcctggcagccgcacaccaccggatgcgctggcgcgcggacggtcgttccttggagaagctgcctgtgcatatgggcctggtgatcaccgaggtggagcaggaacccagcttctcggacatcgcgagcctcgtggtgtggtgtatggccgtgggcatctcctacattagcgtctacgaccaccaaggtattttcaaaagaaataattccagattgatggatgaaattttaaaacaacagcaagaacttctgggcctagattgttcaaaatactcaccagaatttgcaaatagtaatgacaaagatgatcaagttttaaattgccatttggcagtgaaggtgctgtctccggaagatggaaaagcagatattgtaagagctgctcaggacttttgccagttagtagcccagaagcaaaagagacccacagatttggatgtagatacgttagccagtttacttagttcaaatggttgtcctgatcctgatttagtattgaagttcggtcctgtggacagcacattaggctttcttccctggcacatcagattgactgagattgtctctttgccttcccacctaaacatcagttatgaggactttttctctgcccttcgtcaatatgcagcctgtgaacagcgtctgggaaagtagtggtcattggttgcataatttgatttgaggcttgtggaggaaaggaaccaagtgactctgatgtttacaaagcacctatgaaaccctgtacacacctagttcataatcctcataatttatcaacaaacacaaaaaagtgtcttacttgagagtgagtgtgtgtgtgtgcgtgtgcacgtgcacacatgtgcacgtttgtatgtatggaaataaacttataaatggggacgtattggagaaggaaatacatagacctacaactttgagcaaatagcagtgatgttttaggaactgaaatgtcacacttaaagtcttcagcccagctacttccctatttttgtggggagaagagggcctgattagaactgttctggttgtgtttggcgggaggggaataatttttgttcagtccttcttagtgaccaaactttaatttttaagaataatatattgacttactgaactgaagcattctgagttgaaaggagctccagaggagtggagttctgtgttgctcacatgttaaaatcttgctcaccttcagagcagagggaatacctatcttcagatatccgtccattttcatctcttaattgtagtcaaaagtatgacttgagagtgttgctctggtattctgggttctgaagtctggtattctggtattctgggttcaaaagtatgacttgagagtgttgctctggtattctgagagttgctctgtattctgggttctgaagattatttgaaaaataactcctactacattgaaatgcagacttaaaaatttaaacattggattaggcagtcaaaaaaaccaagcaagcataaaaggtcaataagttgtaatcttgatagtaaaggtggaaaacttattataaatggaaagaaagttttatttccttttttgtttgatgggcagtatgccatattatacccaaagttcttttaaaaaatatttccatcaaccatttttatttaaaataaacatttgagggaagttaccaaggcagcttttttcctcaaaagtaacctgttcctctttggaatagcacattttaggggcatggttaatacctgagatttttactcagtaaatcctgatggttactgtgtgtaaaatatctttaagtaggattgaaggcctctgtgggggaataaaatattaccaaagtctataaaaataaattttacatgttctcttttatgacagagagcagcactggttctgttatttttaaaatgaataattgatttcttgataggtgtttaatatttcttccctcactgctgattcttagatagaaaccattctttatatttgatagactgctttcagaaaacccttatcaacaagtgtacaatacttatctaaaactatacatttagaatggagcagtttaatactagatctcagaagttttgaaaaatagcaaagaagactggatttggaaagcatggtctacaattggttgttaaattctgaagctatgaagaataaatgtttcaactttggattatgaaaccccatttatgattttttaaatacacttgaaataaaaatgattaaact

SEQ ID NO: 425040 - DNA, 762 bp, Homo sapiens
atcggaactgtccatgtactactgggggcggggctgccaagggaggaggaagatggcggcgggggcgaggtggctggcgcgcggacggtcgttccttggagaagctgcctgtgcatatgggcctggtgatcaccgaggtggagcaggaacccagcttctcggacatcgcgagcctcgtggtgtggtgtatggccgtgggcatctcctacattagcgtctacgaccaccaaggtattttcaaaagaaataattccagattgatggatgaaattttaaaacaacagcaagaacttctgggcctagattgttcaaaatactcaccagaatttgcaaatagtaatgacaaagatgatcaagttttaaattgccatttggcagtgaaggtgctgtctccggaagatggaaaagcagatattgtaagagctgctcaggacttttgccagttagtagcccagaagcaaaagagacccacagatttggatgtagatacgttagccagtttacttagtaagtttttttatatatatatacatatatatgtatatgtatgtgtgtgtgtttagttttgtcacacgaggatacagtatgaaagaaaatatttttgtttctttcacaccataaagcctgattcttttgttgttaatacctgttaaatttctgaaatttaaagacctatgtaaaaatggtttcgagacaatgaaatttgtagccactcactcgcatgaggatttaatggtaaaggagatgacctttgaggatctt

SEQ ID NO: 425041 - DNA, 3908 bp, Homo sapiens
atcggaactgtccatgtactactgggggcggggctgccaagggaggaggaagatggcggcgggggcgaggtgaggtgttggcagtggaaaggggttcgggctcggggggcggggggacgcggagcgatggcccgcgccggccgcaggggcggataaaaagccgtcgcgctgcgggagtgggcgggagggagagggggtgtccgagggccacaagagtatgacggggctgtacgagctggtgtggcgggtgctgcacgcgctgctctgtctgcaccgcacgctcacctcctggctccgcgttcggttcggcacctggaactggatctggcggcgctgctgccgcgccgcctctgccgcggtcctagcgccgctcggcttcacgctccgcaagcccccggcagtcggcaggaaccgccgtcaccaccggcacccgcgcggggggtcgtgcctggcagccgcacaccaccggatgcgctggcgcgcggacggtcgttccttggagaagctgcctgtgcatatgggcctggtgatcaccgaggtggagcaggaacccagcttctcggacatcgcgagcctcgtggtgtggtgtatggccgtgggcatctcctacattagcgtctacgaccaccaaggtattttcaaaagaaataattccagattgatggatgaaattttaaaacaacagcaagaacttctgggcctagattgttcaaaatactcaccagaatttgcaaatagtaatgacaaagatgatcaagttttaaattgccatttggcagtgaaggtgctgtctccggaagatggaaaagcagatattgtaagagctgctcaggacttttgccagttagtagcccagaagcaaaagagacccacagatttggatgtagatacgttagccagtttacttagttcaaatggttgtcctgatcctgatttagtattgaagttcggtcctgtggacagcacattaggctttcttccctggcacatcagattgactgagattgtctctttgccttcccacctaaacatcagttatgaggactttttctctgcccttcgtcaatatgcagcctgtgaacagcgtctgggaaagtagtggtcattggttgcataatttgatttgaggcttgtggaggaaaggaaccaagtgactctgatgtttacaaagcacctatgaaaccctgtacacacctagttcataatcctcataatttatcaacaaacacaaaaaagtgtcttacttgagagtgagtgtgtgtgtgtgcgtgtgcacgtgcacacatgtgcacgtttgtatgtatggaaataaacttataaatggggacgtattggagaaggaaatacatagacctacaactttgagcaaatagcagtgatgttttaggaactgaaatgtcacacttaaagtcttcagcccagctacttccctatttttgtggggagaagagggcctgattagaactgttctggttgtgtttggcgggaggggaataatttttgttcagtccttcttagtgaccaaactttaatttttaagaataatatattgacttactgaactgaagcattctgagttgaaaggagctccagaggagtggagttctgtgttgctcacatgttaaaatcttgctcaccttcagagcagagggaatacctatcttcagatatccgtccattttcatctcttaattgtagtcaaaagtatgacttgagagtgttgctctggtattctgggttctgaagtctggtattctggtattctgggttcaaaagtatgacttgagagtgttgctctggtattctgagagttgctctgtattctgggttctgaagattatttgaaaaataactcctactacattgaaatgcagacttaaaaatttaaacattggattaggcagtcaaaaaaaccaagcaagcataaaaggtcaataagttgtaatcttgatagtaaaggtggaaaacttattataaatggaaagaaagttttatttccttttttgtttgatgggcagtatgccatattatacccaaagttcttttaaaaaatatttccatcaaccatttttatttaaaataaacatttgagggaagttaccaaggcagcttttttcctcaaaagtaacctgttcctctttggaatagcacattttaggggcatggttaatacctgagatttttactcagtaaatcctgatggttactgtgtgtaaaatatctttaagtaggattgaaggcctctgtgggggaataaaatattaccaaagtctataaaaataaattttacatgttctcttttatgacagagagcagcactggttctgttatttttaaaatgaataattgatttcttgataggtgtttaatatttcttccctcactgctgattcttagatagaaaccattctttatatttgatagactgctttcagaaaacccttatcaacaagtgtacaatacttatctaaaactatacatttagaatggagcagtttaatactagatctcagaagttttgaaaaatagcaaagaagactggatttggaaagcatggtctacaattggttgttaaattctgaagctatgaagaataaatgtttcaactttggattatgaaaccccatttatgattttttaaatacacttgaaataaaaatgattaaactaaattttggtccagtgacattactttgcactgcataatccattatacgttgtacgacttttttttttggttttaatttattactgagagttttgtgtgaagctacagcatatctaaccagagaatttctgattccttatactgtgattatattatattgaggcatttgtagtgcagctgaagactgaatttatgccttttgtaaacatgataggtataaatgtcttataaacattctggagtatgtatagctttaatgaatgaaatttaatggacctgattaaaatgaagggatttaatcgttgttaaagttaagttagtcaaataaattacctactggaatatagcccaagccagtaaaggtttaatatttgcattttcgtgcttttattttctccttccattcataagtatatacttgaaagtacatctgtagcctatgatttgagtctcttgaagttctaggaagaggcaaactacaaactactaggattctgatttcagatgtagtcattccagaaccttctctttatgagttcacctgctagtacaatctccacaacttgaatggcattggttgttctgtaattcctgccaaaagcatcacaagttgtacatcatcaaggctccctttgcactcccaagaagaactggtaattttaaacaaaagtatgtgtctttatttgtattggaaaatactgtctttaaattgtttcttgttgacactccccacaatggaaaaattaccgaattaaacctgttttatggatggcagcttggagcatagcaagaagttggaggatttgaattccattcccagttctcattgtgttttgtttcttaaaactataataatcggttactgttataaagtttaaaaggtggttttaatgtgaatagcaaattctggtatatcgtgactaacgcttaagaatgcctgtctttgagaggaaggtgttataatattaatgaacagtgccaaatacactgtgcatatctgcaatttaatctttgaatgtatgttactggattagctccctcctcctgtgtgatggtaccatgcatagagtcaatcaaatccttgtgatgttttgtatggactttgacaatatgtaaataatgtgtaaagccagtttttatgattaaggaatcaaatttattgaattttattattgaaagttgaaacttaacatgtatgaacaaaaaccaataaaagaatatactcttttcattgactata

SEQ ID NO: 425042 - DNA, 3854 bp, Homo sapiens
atcggaactgtccatgtactactgggggcggggctgccaagggaggaggaagatggcggcgggggcgaggtgaggtgttggcagtggaaaggggttcgggctcggggggcggggggacgcggagcgatggcccgcgccggccgcaggggcggataaaaagccgtcgcgctgcgggagtgggcgggagggagagggggtgtccgagggccacaagagtatgacggggctgtacgagctggtgtggcgggtgctgcacgcgctgctctgtctgcaccgcacgctcacctcctggctccgcgttcggttcggcacctggaactggatctggcggcgctgctgccgcgccgcctctgccgcggtcctagcgccgctcggcttcacgctccgcaagcccccggcagtcggcaggaaccgccgtcaccaccggcacccgcgcggggggtcgtgcctggcagccgcacaccaccggatgcgctggcgcgcggacggtcgttccttggagaagctgcctgtgcatatgggcctggtgatcaccgaggtggagcaggaacccagcttctcggacatcgcgagcctcgtggtgtggtgtatggccgtgggcatctcctacattagcgtctacgaccaccaaggtattttcaaaagaaataattccagattgatggatgaaattttaaaacaacagcaagaacttctgggcctagattgttcaaaatactcaccagaatttgcaaatagtaatgacaaagatgatcaagttttaaattgccatttggcagtgaaggtgctgtctccggaagatggacaaaagagacccacagatttggatgtagatacgttagccagtttacttagttcaaatggttgtcctgatcctgatttagtattgaagttcggtcctgtggacagcacattaggctttcttccctggcacatcagattgactgagattgtctctttgccttcccacctaaacatcagttatgaggactttttctctgcccttcgtcaatatgcagcctgtgaacagcgtctgggaaagtagtggtcattggttgcataatttgatttgaggcttgtggaggaaaggaaccaagtgactctgatgtttacaaagcacctatgaaaccctgtacacacctagttcataatcctcataatttatcaacaaacacaaaaaagtgtcttacttgagagtgagtgtgtgtgtgtgcgtgtgcacgtgcacacatgtgcacgtttgtatgtatggaaataaacttataaatggggacgtattggagaaggaaatacatagacctacaactttgagcaaatagcagtgatgttttaggaactgaaatgtcacacttaaagtcttcagcccagctacttccctatttttgtggggagaagagggcctgattagaactgttctggttgtgtttggcgggaggggaataatttttgttcagtccttcttagtgaccaaactttaatttttaagaataatatattgacttactgaactgaagcattctgagttgaaaggagctccagaggagtggagttctgtgttgctcacatgttaaaatcttgctcaccttcagagcagagggaatacctatcttcagatatccgtccattttcatctcttaattgtagtcaaaagtatgacttgagagtgttgctctggtattctgggttctgaagtctggtattctggtattctgggttcaaaagtatgacttgagagtgttgctctggtattctgagagttgctctgtattctgggttctgaagattatttgaaaaataactcctactacattgaaatgcagacttaaaaatttaaacattggattaggcagtcaaaaaaaccaagcaagcataaaaggtcaataagttgtaatcttgatagtaaaggtggaaaacttattataaatggaaagaaagttttatttccttttttgtttgatgggcagtatgccatattatacccaaagttcttttaaaaaatatttccatcaaccatttttatttaaaataaacatttgagggaagttaccaaggcagcttttttcctcaaaagtaacctgttcctctttggaatagcacattttaggggcatggttaatacctgagatttttactcagtaaatcctgatggttactgtgtgtaaaatatctttaagtaggattgaaggcctctgtgggggaataaaatattaccaaagtctataaaaataaattttacatgttctcttttatgacagagagcagcactggttctgttatttttaaaatgaataattgatttcttgataggtgtttaatatttcttccctcactgctgattcttagatagaaaccattctttatatttgatagactgctttcagaaaacccttatcaacaagtgtacaatacttatctaaaactatacatttagaatggagcagtttaatactagatctcagaagttttgaaaaatagcaaagaagactggatttggaaagcatggtctacaattggttgttaaattctgaagctatgaagaataaatgtttcaactttggattatgaaaccccatttatgattttttaaatacacttgaaataaaaatgattaaactaaattttggtccagtgacattactttgcactgcataatccattatacgttgtacgacttttttttttggttttaatttattactgagagttttgtgtgaagctacagcatatctaaccagagaatttctgattccttatactgtgattatattatattgaggcatttgtagtgcagctgaagactgaatttatgccttttgtaaacatgataggtataaatgtcttataaacattctggagtatgtatagctttaatgaatgaaatttaatggacctgattaaaatgaagggatttaatcgttgttaaagttaagttagtcaaataaattacctactggaatatagcccaagccagtaaaggtttaatatttgcattttcgtgcttttattttctccttccattcataagtatatacttgaaagtacatctgtagcctatgatttgagtctcttgaagttctaggaagaggcaaactacaaactactaggattctgatttcagatgtagtcattccagaaccttctctttatgagttcacctgctagtacaatctccacaacttgaatggcattggttgttctgtaattcctgccaaaagcatcacaagttgtacatcatcaaggctccctttgcactcccaagaagaactggtaattttaaacaaaagtatgtgtctttatttgtattggaaaatactgtctttaaattgtttcttgttgacactccccacaatggaaaaattaccgaattaaacctgttttatggatggcagcttggagcatagcaagaagttggaggatttgaattccattcccagttctcattgtgttttgtttcttaaaactataataatcggttactgttataaagtttaaaaggtggttttaatgtgaatagcaaattctggtatatcgtgactaacgcttaagaatgcctgtctttgagaggaaggtgttataatattaatgaacagtgccaaatacactgtgcatatctgcaatttaatctttgaatgtatgttactggattagctccctcctcctgtgtgatggtaccatgcatagagtcaatcaaatccttgtgatgttttgtatggactttgacaatatgtaaataatgtgtaaagccagtttttatgattaaggaatcaaatttattgaattttattattgaaagttgaaacttaacatgtatgaacaaaaaccaataaaagaatatactcttttcattgactata

SEQ ID NO: 425043 - DNA, 4812 bp, Homo sapiens
atcggaactgtccatgtactactgggggcggggctgccaagggaggaggaagatggcggcgggggcgaggtgaggtgttggcagtggaaaggggttcgggctcggggggcggggggacgcggagcgatggcccgcgccggccgcaggggcggataaaaagccgtcgcgctgcgggagtgggcgggagggagagggggtgtccgagggccacaagagtatgacggggctgtacgagctggtgtggcgggtgctgcacgcgctgctctgtctgcaccgcacgctcacctcctggctccgcgttcggttcggcacctggaactggatctggcggcgctgctgccgcgccgcctctgccgcggtcctagcgccgctcggcttcacgctccgcaagcccccggcagtcggcaggaaccgccgtcaccaccggcacccgcgcggggggtcgtgcctggcagccgcacaccaccggatgcgctggcgcgcggacggtcgttccttggagaagctgcctgtgcatatgggcctggtgatcaccgaggtggagcaggaacccagcttctcggacatcgcgagcctcgtggtgtggtgtatggccgtgggcatctcctacattagcgtctacgaccaccaaggtattttcaaaagaaataattccagattgatggatgaaattttaaaacaacagcaagaacttctgggcctagattgttcaaaatactcaccagaatttgcaaatagtaatgacaaagatgatcaagttttaaattgccatttggcagtgaaggtgctgtctccggaagatggaaaagcagatattgtaagagctgctcaggacttttgccagttagtagcccagaagcaaaagagacccacagatttggatgtagatacgttagccagtttacttagttcaaatggttgtcctgatcctgatttagtattgaagttcggtcctgtggacagcacattaggctttcttccctggcacatcagattgactgagattgtctctttgccttcccacctaaacatcagttatgaggactttttctctgcccttcgtcaatatgcagcctgtgaacagcgtctgggaaagtagtggtcattggttgcataatttgatttgaggcttgtggaggaaaggaaccaagtgactctgatgtttacaaagcacctatgaaaccctgtacacacctagttcataatcctcataatttatcaacaaacacaaaaaagtgtcttacttgagagtgagtgtgtgtgtgtgcgtgtgcacgtgcacacatgtgcacgtttgtatgtatggaaataaacttataaatggggacgtattggagaaggaaatacatagacctacaactttgagcaaatagcagtgatgttttaggaactgaaatgtcacacttaaagtcttcagcccagctacttccctatttttgtggggagaagagggcctgattagaactgttctggttgtgtttggcgggaggggaataatttttgttcagtccttcttagtgaccaaactttaatttttaagaataatatattgacttactgaactgaagcattctgagttgaaaggagctccagaggagtggagttctgtgttgctcacatgttaaaatcttgctcaccttcagagcagagggaatacctatcttcagatatccgtccattttcatctcttaattgtagtcaaaagtatgacttgagagtgttgctctggtattctgggttctgaagtctggtattctggtattctgggttcaaaagtatgacttgagagtgttgctctggtattctgagagttgctctgtattctgggttctgaagattatttgaaaaataactcctactacattgaaatgcagacttaaaaatttaaacattggattaggcagtcaaaaaaaccaagcaagcataaaaggtcaataagttgtaatcttgatagtaaaggtggaaaacttattataaatggaaagaaagttttatttccttttttgtttgatgggcagtatgccatattatacccaaagttcttttaaaaaatatttccatcaaccatttttatttaaaataaacatttgagggaagttaccaaggcagcttttttcctcaaaagtaacctgttcctctttggaatagcacattttaggggcatggttaatacctgagatttttactcagtaaatcctgatggttactgtgtgtaaaatatctttaagtaggattgaaggcctctgtgggggaataaaatattaccaaagtctataaaaataaattttacatgttctcttttatgacagagagcagcactggttctgttatttttaaaatgaataattgatttcttgataggtgtttaatatttcttccctcactgctgattcttagatagaaaccattctttatatttgatagactgctttcagaaaacccttatcaacaagtgtacaatacttatctaaaactatacatttagaatggagcagtttaatactagatctcagaagttttgaaaaatagcaaagaagactggatttggaaagcatggtctacaattggttgttaaattctgaagctatgaagaataaatgtttcaactttggattatgaaaccccatttatgattttttaaatacacttgaaataaaaatgattaaactaaattttggtccagtgacattactttgcactgcataatccattatacgttgtacgacttttttttttggttttaatttattactgagagttttgtgtgaagctacagcatatctaaccagagaatttctgattccttatactgtgattatattatattgaggcatttgtagtgcagctgaagactgaatttatgccttttgtaaacatgataggtataaatgtcttataaacattctggagtatgtatagctttaatgaatgaaatttaatggacctgattaaaatgaagggatttaatcgttgttaaagttaagttagtcaaataaattacctactggaatatagcccaagccagtaaaggtttaatatttgcattttcgtgcttttattttctccttccattcataagtatatacttgaaagtacatctgtagcctatgatttgagtctcttgaagttctaggaagaggcaaactacaaactactaggattctgatttcagatgtagtcattccagaaccttctctttatgagttcacctgctagtacaatctccacaacttgaatggcattggttgttctgtaattcctgccaaaagcatcacaagttgtacatcatcaaggctccctttgcactcccaagaagaactggtaattttaaacaaaagtatgtgtctttatttgtattggaaaatactgtctttaaattgtttcttgttgacactccccacaatggaaaaattaccgaattaaacctgttttatggatggcagcttggagcatagcaagaagttggaggatttgaattccattcccagttctcattgtgttttgtttcttaaaactataataatcggttactgttataaagtttaaaaggtggttttaatgtgaatagcaaattctggtatatcgtgactaacgcttaagaatgcctgtctttgagaggaaggtgttataatattaatgaacagtgccaaatacactgtgcatatctgcaatttaatctttgaatgtatgttactggattagctccctcctcctgtgtgatggtaccatgcatagagtcaatcaaatccttgtgatgttttgtatggactttgacaatatgtaaataatgtgtaaagccagtttttatgattaaggaatcaaatttattgaattttattattgaaagttgaaacttaacatgtatgaacaaaaaccaataaaagaatatactcttttcattgactatagtattatgtgaatgctacatttgttctgaacacttaggggctgcaaaaatgtaataagaaatgcatatgactagatagcaatagtgttttttttagatggtatgctcttgattgaaatatattctcacttttaccaggttaaacatttggaatcttataatgttacttgctttttgatagataatagtgaaataaattcagctttgccattgctggagttgtcaaaattccacagtaattaaaatttgaatttttaccgaatatgaaatttccaaattaaaaacgtatatgtgtactcttttaaaaaggaatttgatagttcttgtcaaatgagaaaatttaaaggtaagagttatggtttgtcttatgctgcatagactattcacctcctaacttgaaggtctaatcataagacaattgtttttttgtgcatagttttcatctaaaattaagtttaccaaaggcaaataactgcttactaggaacttcctttagcaaaaattactataaagttcaggacagtttgaaataaaacccaggaaacaagattaatgtgagcagttctccaagatcctaactggtgggacataaactatgatgcaatggataggaaaaggtagtgcaaaaagaatttcttaaggtttaaaaaatacacttttcattataggaaaaagaagattcagagaaacaaaggaatgtaaccttattgattacatttttggtgatcaccgagaattttttgtactatattttaaaaaatgtattctactgtaacaagttaataaagagattttttaaaaaactataaactagaaattgagagtcttgcattctcttttgtatttgattattgtgtctggatataaattacaatagcacatgaaaataaaatgttttaaaaaaa

SEQ ID NO: 425044 - DNA, 602 bp, Homo sapiens
gaggattacactttcataaacacagcactggatatactagttactagggagaggatgatgagtaactaacttgagcttgcattttctgccatccatatttgtttctggaattaaaactgtcctgtagccaggataactttaagggctcccctggtagttataagagctccttaaataatgggaaggttgaactacaccagtagataaaggactaatttccattttgtttttatatatgatctgtcaccccgttataagcagttcatgacggtgttctttctaaattattttctggaattatctaactgacatcttcactccacagccgtttccctggggagatggtaaccatactctattccataaccctcatgtgaatccacttccaactggctacgaagatgaataaagagaatctggaccactacccgggcaccagggaccacagcactggtttggaccgttactctgcacatggaccagaaaaagtatatgggaccttaagctcaccttctttacttgtatcaaatgatgactggtatactggtctcccatccctttgcttgtggcaggagatggcttaaataaataacttaaactta

SEQ ID NO: 425045 - DNA, 569 bp, Homo sapiens
ttccacttccgcttccggcgctgcggcagtccagatcagatcaaaaatggcggtagttggtgtgtcctcggtttctcggctgctgggtcggtcccgcccacagctggggcggcctatgtcgagtggcgcccatggcgaagagggctcagctcgcatgtggaagactctcaccttcttcgtcgcgctccccggggtggcagtcagcatgctgaatgtgtacctgaagtcgcaccacggagagcacgagagacccgagttcatcgcctacccccatctccgcatcaggaccaagccgtttccctggggagatggtaaccatactctattccataaccctcatgtgaatccacttccaactggctacgaagatgaataaagagaatctggaccactacccgggcaccagggaccacagcactggtttggaccgttactctgcacatggaccagaaaaagtatatgggaccttaagctcaccttctttacttgtatcaaatgatgactggtatactggtctcccatccctttgcttgtggcaggagatggcttaaataaataacttaaactta

SEQ ID NO: 425046 - DNA, 1860 bp, Homo sapiens
gggggggacccgtgctgaggcggcggggcgacgtgggctgcggtgggcccgcggcgtcgggcggtgcggatgtcgggctgggcggacgagcgcggcggcgagggcgacgggcgcatctacgtggggaaccttccgaccgacgtgcgcgagaaggacttggaggacctgttctacaagtacggccgcatccgcgagatcgagctcaagaacaggcacggcctcgtgcccttcgccttcgtgcgcttcgaggacccctgaaatgcaaacaaaaacaaaaagagtaaaggggaaaaaaatcagagccagaagaataagcaaaccaacatctaacaataatagttaagtattgagcacttactgtgtactctgtgcctggcatgaggctatctcattaaaccttcataacattatgaggtaggtactcttactatcccatttcaagaatgaagaaaattaagacttaagttatatcatttgcccaaggtaacacaataaatgccaatttgacatgttgatactcaattaactatgataaacaatatatctgaattactgccattgatccccctcaaagctaagaactggaaaggatctcaggggtcatatagtttaatcccctgccacctcatgtatgcatctttggatgggcatctatggaaggagctagcctgtatttaataccttccagatgtgaggacctgagctagatgctttagacgttatcctcttgctctagattcctggcaagtcttgtgatggtgctattatgtgaccattttgcccatgaaggaatcgaggtcccaagagtagttcaggtaaggaattaataagcagcagaggaggcatgtccaggctggcttgtccccaggccctctgccttcagccaccattctcagaagatccaaagatgccaaggggaaagaagccggatgctttttcaccttaggtgaaagtcagtaattggagttaccctttctgaggccctgctttgcagtataactgaggatcaggtgctgttctgtttctgcttcaaattcaagtcctagaggacagtctgaacaaaagcatcattaaaccagggaaggaccaacctctaagccaaaaactaggcaattatatgaatcctcagaaaaagaaatgagcccagagacctgtgtccccaaacatccgtaaatctcatagtaaggcaggacaggataaccagaaaaaaacaatgtccaactggtggtctggtttctggtctcaatggtaccaaagggatagtcaccacctcaatcaaactgagatccaaaacagcagctgctttcctacaaggaaagacatcaagaactactgagtctgaagggtgacataatcaaccacaagaaaatgttacggtttagcctggcacagtggtgcatgcctgcagtcccaactactggagaggctgaggtgggaggactgcttgggcccaggagttcaaggtcagcctcggcaatataatgagactctgtctctaaaatcaaaaattagagaaatataaaaattataaaattaaaaaagaaaatgtcatgatagctcaggtttcagagaggatgctgcactactctgggaaaaaagtgaagtgacagctcagccctgacagcaggacctagaagggctgagatgaagaggctgacctgtagagctcagcctggacccacaggaggggtagttgagttcacagagggatactgccatttaagctggttgtgaatggggtggtatgaagaccgactgcactagtattctctccaggttacaaataccatgaccaaactgtgtaatgtgatactaatatgcagaataaagcatattaaaaaacaaaaaaaaaccatgaat

SEQ ID NO: 425047 - DNA, 627 bp, Homo sapiens
ctcaacagaaggcaaggacccacctcatgagagcggaatttggtgtcatccagtttacgcagggcatattccatgtcttcttttctgagatactcgaccatccccactccatccttctgcacatcagcataacagacatccccagcttctcgcatgtgatccttcaggtcctgccagctgcctgacggaggaagtcctaaagaactcggaaatcagatcttcttgtaggaggcccattcctcccaccacggggccacccaccccgacctccataagtcctggggaactccacacgaagccgacactggccataatcataaccatttcttccataaatagcatcctctgcatctctaaaaaaaacaacaacaacaaaaaaaacgtttggagttagtgctgttcaggaggccaagtgactttccaagtgaggggcatgagtagtaagcataaaagggaaacctagagtgaagaaaaaaacacacaaatcaggatcctgaagcacttctgctttggtttggagacgtttcatgatactggaattaacctttacagctgtcacacgcagttttagaggtatgaaattataatgaatgagcaaacagattactcataagagggctaattcag

SEQ ID NO: 425048 - DNA, 1841 bp, Homo sapiens
agtgccttccccgggctgcaggaattcggcacgaggagatcaaaaatggcggtagttggtgtgtcctcggtttctcggctgctgggtcggtcccgcccacagctggggcggcctatgtcgagtggcgcccatggcgaagagggctcagctcgcatgtggaagactctcaccttcttcgtcgcgctccccggggtggcagtcagcatgctgaatgtgtacctgaagtcgcaccacggagagcacgagagacccgagttcatcgcctacccccatctccgcatcaggaccaagccgtttccctggggagatggtaaccatactctattccataaccctcatgtgaatccacttccaactggctacgaagatgaataaagagaatctggaccactacccgggcaccagggaccacagcactggtttggaccgttactctgcacatggaccagaaaaagtatatgggaccttaagctcaccttctttacttgtatcaaatgatgactggtatactggtctcccatccctttgcttgtggcaggagatggcttaaataaataacttaaacttaaaaaaaaaacaaaaaaaaaaaaaaaaaaaaaaaaaaaaaaaaaaaattaaaaaaatttcctaagacactaaatcctcaatctggaatgtagattctgagcacaaagcagctcagttaacctaaaaaataaagaaaaaattcccatcacctgtctcagtagggcctgaaaggagagaagtagtgtggggaacccctgctttggtatggagagtcacggccccttgacccagaccgagaccgtgagtagccatagctggtgcttctctcaggataaactcggatgtaggaagtttcaccctcatgagagcggaatttggtgtcatccagtttacgcagggcatattccatgtcttcttttctgagatactcgaccatccccactccatccttctgcacatcagcataacagacatccccagcttctcgcatgtgatccttcaggtcctgccagctgcctgacggaggaagtcctaggcatggagaacataagaaagcccacatccttcagctatgttaactgccctgttaagagccagcaatacctatggtcccttctccatgatcacttaaatcctgagggtccccaaatcataaaccttgataagggacatgaaatcagaaaagagcactgaagtatgtgtggtaaatgaaccactttgagaagctggttttaagttcatcttccagagaccaggccttttcaacagagcaagaagtccatcccattacaggtttagtatctttgagaattcatagcctctttctttgtcctttaaaatcaatgccaaactcctaatactttgagttccaattttttccattatgaaatttaacagtaccaattatttattgcttgacagggtttcacaggacatgggaattttgaaaccagacatgaaataaccaaagagtagctgaaggtaacaacacaacaacaaaaaatctaaagtttgttttcttgtaggtatgaatgacaaactatacagagtacctcttaaaagatcaccaacattcttcaatacagtgggggggaaggtaagactcagatgctaaaactagtcgggagtcatacaaccctacctgatgtcatgaaagggaaatgtgctcctgctctcaaaggctgtgtttaccgctcacagctcaggactgcagccatttcctaatagttttctaagcaggatttcagagcagcatggagagaaaaaaagataatgtatgacatcctgaaggagggaatagagttctggggttaaaaaattacaaagggacacaa

SEQ ID NO: 425049 - DNA, 1469 bp, Homo sapiens
agtgccttccccgggctgcaggaattcggcacgaggagatcaaaaatggcggtagttggtgtgtcctcggtttctcggctgctgggtcggtcccgcccacagctggggcggcctatgtcgagtggcgcccatggcgaagagggctcagctcgcatgtggaagactctcaccttcttcgtcgcgctccccggggtggcagtcagcatgctgaatgtgtacctgaagtcgcaccacggagagcacgagagacccgagttcatcgcctacccccatctccgcatcaggaccaagccgtttccctggggagatggtaaccatactctattccataaccctcatgtgaatccacttccaactggctacgaagatgaataaagagaatctggaccactacccgggcaccagggaccacagcactggtttggaccgttactctgcacatggaccagaaaaagtatatgggaccttaagctcaccttctttacttgtatcaaatgatgactggtatactggtctcccatccctttgcttgtggcaggagatggcttaaataaataacttaaacttaaaaaaaaaacaaaaaaaaaaaaaaaaaaaaaaaaaaaaaaaaaaaattaaaaaaatttcctaagacactaaatcctcaatctggaatgtagattctgagcacaaagcagctcagttaacctaaaaaataaagaaaaaattcccatcacctgtctcagtagggcctgaaaggagagaagtagtgtggggaacccctgctttggtatggagagtcacggccccttgacccagaccgagaccgtgagtagccatagctggtgcttctctcaggataaactcggatgtaggaagtttcaccctcatgagagcggaatttggtgtcatccagtttacgcagggcatattccatgtcttcttttctgagatactcgaccatccccactccatccttctgcacatcagcataacagacatccccagcttctcgcatgtgatccttcaggtcctgccagctgcctgacggaggaagtcctaaagaactcggaaatcagatcttcttgtaggaggcccattcctcccaccacggggccacccaccccgacctccataagtcctggggaactccacacgaagccgacactggccataatcataaccatttcttccataaatagcatcctctgcatctctaaaaaaaacaacaacaacaaaaaaaacgtttggagttagtgctgttcaggaggccaagtgactttccaagtgaggggcatgagtagtaagcataaaagggaaacctagagtgaagaaaaaaacacacaaatcaggatcctgaagcacttctgctttggtttggagacgtttcatgatactggaattaacctttacagctgtcacacgcagttttagaggtatgaaattataatgaatgagcaaacagattactcataagagggctaattcag

SEQ ID NO: 425050 - DNA, 1014 bp, Homo sapiens
agtgccttccccgggctgcaggaattcggcacgaggagatcaaaaatggcggtagttggtgtgtcctcggtttctcggctgctgggtcggtcccgcccacagctggggcggcctatgtcgagtggcgcccatggcgaagagggctcagctcgcatgtggaagactctcaccttcttcgtcgcgctccccggggtggcagtcagcatgctgaatgtgtacctgaagtcgcaccacggagagcacgagagacccgagttcatcgcctacccccatctccgcatcaggaccaagccgtttccctggggagatggtaaccatactctattccataaccctcatgtgaatccacttccaactggctacgaagatgaataaagagaatctggaccactacccgggcaccagggaccacagcactggtttggaccgttactctgcacatggaccagaaaaagtatatgggaccttaagctcaccttctttacttgtatcaaatgatgactggtatactggtctcccatccctttgcttgtggcaggagatggcttaaataaataacttaaacttaaaaaaaaaacaaaaaaaaaaaaaaaaaaaaaaaaaaaaaaaaaaaaaaaaaggaaaaaaaaaaaaaggggggggggcgaaaagaaaaatcaccaggggagcgcaccccaaaaatacaggcagcacacacagatgtactataacaagaggaggccgcccacaaaaagagcagggactaaataaagaaaacaacggggcgataacaaaaacgacagtgttggagtgcaacaacatcttacgaggggaggcaaactgtgaagagaggacgaccaaccacaatcagtgggggggggagacacctggagggaccaaaagaaccagcgaaggaaattgaagacaccgaagagggataataattagtatctcgaacagtattaaagtggtgaaaacggacggctttagctacggccggtcgagaagattgtcgaaggacatatatgggaaaat

SEQ ID NO: 425051 - DNA, 903 bp, Homo sapiens
  misc_feature (758)..(759): n is a, c, g, or t
agtgccttccccgggctgcaggaattcggcacgaggagatcaaaaatggcggtagttggtgtgtcctcggtttctcggctgctgggtcggtcccgcccacagctggggcggcctatgtcgagtggcgcccatggcgaagagggctcagctcgcatgtggaagactctcaccttcttcgtcgcgctccccggggtggcagtcagcatgctgaatgtgtacctgaagtcgcaccacggagagcacgagagacccgagttcatcgcctacccccatctccgcatcaggaccaagccgtttccctggggagatggtaaccatactctattccataaccctcatgtgaatccacttccaactggctacgaagatgaataaagagaatctggaccactacccgggcaccagggaccacagcactggtttggaccgttactctgcacatggaccagaaaaagtatatgggaccttaagctcaccttctttacttgtatcaaatgatgactggtatactggtctcccatccctttgcttgtggcaggagatggcttaaataaataacttaaacttaaaaaaaaaacaaaaaaaaaaaaaaaaaaaaaaaattgggggcactatgtgggggggggcaaaagggggtaggaatgggctgtggataggggttccggaacccagttttcgggtccagggggaggatctcgcggtccctatagggggggataattcgataagcaggtaccgtgtagtctctgggggaaacnntacacggagacacagcgcaacggagactacacttagatcacaaacggggcaggaaagcgaacattgacagcaaatatcggcacaatcaaaacgcacaatgaaagacaagaaaagcaagaagagcaagcacaagcggagaagcga

SEQ ID NO: 425052 - DNA, 4251 bp, Homo sapiens
ggcgcactgcgggggccaaggaaggaagaaatgtggtcgcggttggtgtggctgggccttcgggcccctctgggcgggcgccagggcttcacctccaaggcggatcctcagggcagtggccggatcacggctgcggtgatcgagcacctggagcgtctagcgcttgtggacttcggcagccgcgaggcagtggcgcgactggagaaagctatcgccttcgccgaccggctacgcgccgtggacacagacggggtggagcccatggaatcggtcctggaggacagatgtctatacctgagatccgacaatgtggtagaaggcaactgtgctgatgaattactacaaaactcccatcgcgtcgtggaggagtactttgtggcccccccaggtaatatctctttgccaaagctggatgaacaagagccattcccacacagctgagtagctcattctggaaagggggtactctgtgaacatgtggaagcataatgacagtatttttttactgtgaatactaatgttcctgcttttttcagtcccctgaaaaaatggatgctcaagcatttcttaataacagattcttctgaagacagaattgggaaagatctggccccaacaaggcagtgagttcctgatgctaactgaggtgaaagaaaagcaaaagtcagcttccaaggaattcacttaacaggcctgttcagtatggaagacattatttatctgcctttaactccccccaaaggaccataccaactgcatgaaagtgaacttttctatctacgtaactggtagacggagcatcttgatcactatgtgacaaccttggctgtcatttttagttgccatttgcattgatttgagcagccctatctttaccgaacatacctgaatttgttcctgggctcccactttcttcccagaagagggctaacttcctactaaggtctgaagagtgttgaaagtagactagagcttgggaactcctaacctagaactatctgccatcccacaaagtgattatatgccaaagggatactagtcatacctagtgtttctctttctgaaaagagaacttatcctaaaattagccctgggcctgggacaaaggagccctctccgcccccaaaatgattattaaattgagatgagtccaggataaaactcagataccaaggataaatgaaacttatttagggataaaagtgggctgggcgcagtggctcactcctgtgatcccagcactttgggaggctgagacgggcggatcacaaggtcaggagatcaagaccatcctggctaatgcggtgaaacctcatctctactaaaaatacaaaaaattagctgggtgtgatgacaggtgcctgtagtcccagctactcgggaggctgaggcaggagaatggcgtgaacccgggagacggagcttgcagtaagccgagatcgcaccactgcactccagcctgggcgacagagcaagtctcaaaaaaaaaaaaaaaagtgatagaatcagagagtttttcctctaaccaaactgccaaagttggttttggctaagaatttcccaataatatttatgctgctgctcatttttttagttttctgagacaggggtctccctctgtcacccaggctggagtgcagtggtgacagatcactgcagcctccaactcctgggctcaagtgatcctcccacctcagcctcctaagtaactgggactacatatgtgcatcaccacgtccagttaatttttttttgagtagaggtgggggttttgctatgttgcctatctggtcgtgaactcctggcctcaagggatcctctggcatgccttggcctcccaaagggctaggatcacaggcaaaagccaccgtgtgtttatttttcccattcccttcctttatctgcaatgcttttttctttaaggcagcctaatttacaagcttggccttgaattaaaagagaacccagaacccgctcttggagtttacgttctcaaaccaacatcagagcaactgtctatccccatataaataaagttatctacccctgctcctaactgggtacaagttatgactacaactcagtgattttttaaattagtgtgcctatttggtgaaatctgtgaacttaatcaaggacaaccacacatgtcaattactaaacatttaaaatatatttctaaacagaatgggccgactcagtcacagtaactgttgatctccatagtagagcaacccacaaagacagaactgatttttttcccataatcaggggtgaaaaatatacaacttgtttctgaaccaaaaccacaatttctgcagtttaaaatgtttcactgctaatatggccctggtagaaattatgtagttttttttcttctttaaaaaaaaaaaattaaaaaaatttcctaagacactaaatcctcaatctggaatgtagattctgagcacaaagcagctcagttaacctaaaaaataaagaaaaaattcccatcacctgtctcagtagggcctgaaaggagagaagtagtgtggggaacccctgctttggtatggagagtcacggccccttgacccagaccgagaccgtgagtagccatagctggtgcttctctcaggataaactcggatgtaggaagtttcaccctgaaatgcaaacaaaaacaaaaagagtaaaggggaaaaaaatcagagccagaagaataagcaaaccaacatctaacaataatagttaagtattgagcacttactgtgtactctgtgcctggcatgaggctatctcattaaaccttcataacattatgaggtaggtactcttactatcccatttcaagaatgaagaaaattaagacttaagttatatcatttgcccaaggtaacacaataaatgccaatttgacatgttgatactcaattaactatgataaacaatatatctgaattactgccattgatccccctcaaagctaagaactggaaaggatctcaggggtcatatagtttaatcccctgccacctcatgtatgcatctttggatgggcatctatggaaggagctagcctgtatttaataccttccagatgtgaggacctgagctagatgctttagacgttatcctcttgctctagattcctggcaagtcttgtgatggtgctattatgtgaccattttgcccatgaaggaatcgaggtcccaagagtagttcaggtaaggaattaataagcagcagaggaggcatgtccaggctggcttgtccccaggccctctgccttcagccaccattctcagaagatccaaagatgccaaggggaaagaagccggatgctttttcaccttaggtgaaagtcagtaattggagttaccctttctgaggccctgctttgcagtataactgaggatcaggtgctgttctgtttctgcttcaaattcaagtcctagaggacagtctgaacaaaagcatcattaaaccagggaaggaccaacctctaagccaaaaactaggcaattatatgaatcctcagaaaaagaaatgagcccagagacctgtgtccccaaacatccgtaaatctcatagtaaggcaggacaggataaccagaaaaaaacaatgtccaactggtggtctggtttctggtctcaatggtaccaaagggatagtcaccacctcaatcaaactgagatccaaaacagcagctgctttcctacaaggaaagacatcaagaactactgagtctgaagggtgacataatcaaccacaagaaaatgttacggtttagcctggcacagtggtgcatgcctgcagtcccaactactggagaggctgaggtgggaggactgcttgggcccaggagttcaaggtcagcctcggcaatataatgagactctgtctctaaaatcaaaaattagagaaatataaaaattataaaattaaaaaagaaaatgtcatgatagctcaggtttcagagaggatgctgcactactctgggaaaaaagtgaagtgacagctcagccctgacagcaggacctagaagggctgagatgaagaggctgacctgtagagctcagcctggacccacaggaggggtagttgagttcacagagggatactgccatttaagctggttgtgaatggggtggtatgaagaccgactgcactagtattctctccaggttacaaataccatgaccaaactgtgtaatgtgatactaatatgcagaataaagcatattaaaaaacaaaaaaaaaccatgaat

SEQ ID NO: 425053 - DNA, 4032 bp, Homo sapiens
ggcgcactgcgggggccaaggaaggaagaaatgtggtcgcggttggtgtggctgggccttcgggcccctctgggcgggcgccagggcttcacctccaaggcggatcctcagggcagtggccggatcacggctgcggtgatcgagcacctggagcgtctagcgcttgtggacttcggcagccgcgaggcagtggcgcgactggagaaagctatcgccttcgccgaccggctacgcgccgtggacacagacggggtggagcccatggaatcggtcctggaggacagatgtctatacctgagatccgacaatgtggtagaaggcaactgtgctgatgaattactacaaaactcccatcgcgtcgtggaggagtactttgtggcccccccaggtaatatctctttgccaaagctggatgaacaagagccattcccacacagctgagtagctcattctggaaagggggtactctgtgaacatgtggaagcataatgacagtatttttttactgtgaatactaatgttcctgcttttttcagtcccctgaaaaaatggatgctcaagcatttcttaataacagattcttctgaagacagaattgggaaagatctggccccaacaaggcagtgagttcctgatgctaactgaggtgaaagaaaagcaaaagtcagcttccaaggaattcacttaacaggcctgttcagtatggaagacattatttatctgcctttaactccccccaaaggaccataccaactgcatgaaagtgaacttttctatctacgtaactggtagacggagcatcttgatcactatgtgacaaccttggctgtcatttttagttgccatttgcattgatttgagcagccctatctttaccgaacatacctgaatttgttcctgggctcccactttcttcccagaagagggctaacttcctactaaggtctgaagagtgttgaaagtagactagagcttgggaactcctaacctagaactatctgccatcccacaaagtgattatatgccaaagggatactagtcatacctagtgtttctctttctgaaaagagaacttatcctaaaattagccctgggcctgggacaaaggagccctctccgcccccaaaatgattattaaattgagatgagtccaggataaaactcagataccaaggataaatgaaacttatttagggataaaagtgggctgggcgcagtggctcactcctgtgatcccagcactttgggaggctgagacgggcggatcacaaggtcaggagatcaagaccatcctggctaatgcggtgaaacctcatctctactaaaaatacaaaaaattagctgggtgtgatgacaggtgcctgtagtcccagctactcgggaggctgaggcaggagaatggcgtgaaccctggagtgcagtggtgacagatcactgcagcctccaactcctgggctcaagtgatcctcccacctcagcctcctaagtaactgggactacatatgtgcatcaccacgtccagttaatttttttttgagtagaggtgggggttttgctatgttgcctatctggtcgtgaactcctggcctcaagggatcctctggcatgccttggcctcccaaagggctaggatcacaggcaaaagccaccgtgtgtttatttttcccattcccttcctttatctgcaatgcttttttctttaaggcagcctaatttacaagcttggccttgaattaaaagagaacccagaacccgctcttggagtttacgttctcaaaccaacatcagagcaactgtctatccccatataaataaagttatctacccctgctcctaactgggtacaagttatgactacaactcagtgattttttaaattagtgtgcctatttggtgaaatctgtgaacttaatcaaggacaaccacacatgtcaattactaaacatttaaaatatatttctaaacagaatgggccgactcagtcacagtaactgttgatctccatagtagagcaacccacaaagacagaactgatttttttcccataatcaggggtgaaaaatatacaacttgtttctgaaccaaaaccacaatttctgcagtttaaaatgtttcactgctaatatggccctggtagaaattatgtagttttttttcttctttaaaaaaaaaaaattaaaaaaatttcctaagacactaaatcctcaatctggaatgtagattctgagcacaaagcagctcagttaacctaaaaaataaagaaaaaattcccatcacctgtctcagtagggcctgaaaggagagaagtagtgtggggaacccctgctttggtatggagagtcacggccccttgacccagaccgagaccgtgagtagccatagctggtgcttctctcaggataaactcggatgtaggaagtttcaccctgaaatgcaaacaaaaacaaaaagagtaaaggggaaaaaaatcagagccagaagaataagcaaaccaacatctaacaataatagttaagtattgagcacttactgtgtactctgtgcctggcatgaggctatctcattaaaccttcataacattatgaggtaggtactcttactatcccatttcaagaatgaagaaaattaagacttaagttatatcatttgcccaaggtaacacaataaatgccaatttgacatgttgatactcaattaactatgataaacaatatatctgaattactgccattgatccccctcaaagctaagaactggaaaggatctcaggggtcatatagtttaatcccctgccacctcatgtatgcatctttggatgggcatctatggaaggagctagcctgtatttaataccttccagatgtgaggacctgagctagatgctttagacgttatcctcttgctctagattcctggcaagtcttgtgatggtgctattatgtgaccattttgcccatgaaggaatcgaggtcccaagagtagttcaggtaaggaattaataagcagcagaggaggcatgtccaggctggcttgtccccaggccctctgccttcagccaccattctcagaagatccaaagatgccaaggggaaagaagccggatgctttttcaccttaggtgaaagtcagtaattggagttaccctttctgaggccctgctttgcagtataactgaggatcaggtgctgttctgtttctgcttcaaattcaagtcctagaggacagtctgaacaaaagcatcattaaaccagggaaggaccaacctctaagccaaaaactaggcaattatatgaatcctcagaaaaagaaatgagcccagagacctgtgtccccaaacatccgtaaatctcatagtaaggcaggacaggataaccagaaaaaaacaatgtccaactggtggtctggtttctggtctcaatggtaccaaagggatagtcaccacctcaatcaaactgagatccaaaacagcagctgctttcctacaaggaaagacatcaagaactactgagtctgaagggtgacataatcaaccacaagaaaatgttacggtttagcctggcacagtggtgcatgcctgcagtcccaactactggagaggctgaggtgggaggactgcttgggcccaggagttcaaggtcagcctcggcaatataatgagactctgtctctaaaatcaaaaattagagaaatataaaaattataaaattaaaaaagaaaatgtcatgatagctcaggtttcagagaggatgctgcactactctgggaaaaaagtgaagtgacagctcagccctgacagcaggacctagaagggctgagatgaagaggctgacctgtagagctcagcctggacccacaggaggggtagttgagttcacagagggatactgccatttaagctggttgtgaatggggtggtatgaagaccgactgcactagtattctctccaggttacaaataccatgaccaaactgtgtaatgtgatactaatatgcagaataaagcatattaaaaaacaaaaaaaaaccatgaat

SEQ ID NO: 425054 - DNA, 4431 bp, Homo sapiens
agtgccttccccgggctgcaggaattcggcacgaggagatcaaaaatggcggtagttggtgtgtcctcggtttctcggctgctgggtcggtcccgcccacagctggggcggcctatgtcgagtggcgcccatggcgaagagggctcagctcgcatgtggaagactctcaccttcttcgtcgcgctccccggggtggcagtcagcatgctgaatgtgtacctgaagtcgcaccacggagagcacgagagacccgagttcatcgcctacccccatctccgcatcaggaccaagggcagtggccggatcacggctgcggtgatcgagcacctggagcgtctagcgcttgtggacttcggcagccgcgaggcagtggcgcgactggagaaagctatcgccttcgccgaccggctacgcgccgtggacacagacggggtggagcccatggaatcggtcctggaggacagatgtctatacctgagatccgacaatgtggtagaaggcaactgtgctgatgaattactacaaaactcccatcgcgtcgtggaggagtactttgtggcccccccaggtaatatctctttgccaaagctggatgaacaagagccattcccacacagctgagtagctcattctggaaagggggtactctgtgaacatgtggaagcataatgacagtatttttttactgtgaatactaatgttcctgcttttttcagtcccctgaaaaaatggatgctcaagcatttcttaataacagattcttctgaagacagaattgggaaagatctggccccaacaaggcagtgagttcctgatgctaactgaggtgaaagaaaagcaaaagtcagcttccaaggaattcacttaacaggcctgttcagtatggaagacattatttatctgcctttaactccccccaaaggaccataccaactgcatgaaagtgaacttttctatctacgtaactggtagacggagcatcttgatcactatgtgacaaccttggctgtcatttttagttgccatttgcattgatttgagcagccctatctttaccgaacatacctgaatttgttcctgggctcccactttcttcccagaagagggctaacttcctactaaggtctgaagagtgttgaaagtagactagagcttgggaactcctaacctagaactatctgccatcccacaaagtgattatatgccaaagggatactagtcatacctagtgtttctctttctgaaaagagaacttatcctaaaattagccctgggcctgggacaaaggagccctctccgcccccaaaatgattattaaattgagatgagtccaggataaaactcagataccaaggataaatgaaacttatttagggataaaagtgggctgggcgcagtggctcactcctgtgatcccagcactttgggaggctgagacgggcggatcacaaggtcaggagatcaagaccatcctggctaatgcggtgaaacctcatctctactaaaaatacaaaaaattagctgggtgtgatgacaggtgcctgtagtcccagctactcgggaggctgaggcaggagaatggcgtgaacccgggagacggagcttgcagtaagccgagatcgcaccactgcactccagcctgggcgacagagcaagtctcaaaaaaaaaaaaaaaagtgatagaatcagagagtttttcctctaaccaaactgccaaagttggttttggctaagaatttcccaataatatttatgctgctgctcatttttttagttttctgagacaggggtctccctctgtcacccaggctggagtgcagtggtgacagatcactgcagcctccaactcctgggctcaagtgatcctcccacctcagcctcctaagtaactgggactacatatgtgcatcaccacgtccagttaatttttttttgagtagaggtgggggttttgctatgttgcctatctggtcgtgaactcctggcctcaagggatcctctggcatgccttggcctcccaaagggctaggatcacaggcaaaagccaccgtgtgtttatttttcccattcccttcctttatctgcaatgcttttttctttaaggcagcctaatttacaagcttggccttgaattaaaagagaacccagaacccgctcttggagtttacgttctcaaaccaacatcagagcaactgtctatccccatataaataaagttatctacccctgctcctaactgggtacaagttatgactacaactcagtgattttttaaattagtgtgcctatttggtgaaatctgtgaacttaatcaaggacaaccacacatgtcaattactaaacatttaaaatatatttctaaacagaatgggccgactcagtcacagtaactgttgatctccatagtagagcaacccacaaagacagaactgatttttttcccataatcaggggtgaaaaatatacaacttgtttctgaaccaaaaccacaatttctgcagtttaaaatgtttcactgctaatatggccctggtagaaattatgtagttttttttcttctttaaaaaaaaaaaattaaaaaaatttcctaagacactaaatcctcaatctggaatgtagattctgagcacaaagcagctcagttaacctaaaaaataaagaaaaaattcccatcacctgtctcagtagggcctgaaaggagagaagtagtgtggggaacccctgctttggtatggagagtcacggccccttgacccagaccgagaccgtgagtagccatagctggtgcttctctcaggataaactcggatgtaggaagtttcaccctgaaatgcaaacaaaaacaaaaagagtaaaggggaaaaaaatcagagccagaagaataagcaaaccaacatctaacaataatagttaagtattgagcacttactgtgtactctgtgcctggcatgaggctatctcattaaaccttcataacattatgaggtaggtactcttactatcccatttcaagaatgaagaaaattaagacttaagttatatcatttgcccaaggtaacacaataaatgccaatttgacatgttgatactcaattaactatgataaacaatatatctgaattactgccattgatccccctcaaagctaagaactggaaaggatctcaggggtcatatagtttaatcccctgccacctcatgtatgcatctttggatgggcatctatggaaggagctagcctgtatttaataccttccagatgtgaggacctgagctagatgctttagacgttatcctcttgctctagattcctggcaagtcttgtgatggtgctattatgtgaccattttgcccatgaaggaatcgaggtcccaagagtagttcaggtaaggaattaataagcagcagaggaggcatgtccaggctggcttgtccccaggccctctgccttcagccaccattctcagaagatccaaagatgccaaggggaaagaagccggatgctttttcaccttaggtgaaagtcagtaattggagttaccctttctgaggccctgctttgcagtataactgaggatcaggtgctgttctgtttctgcttcaaattcaagtcctagaggacagtctgaacaaaagcatcattaaaccagggaaggaccaacctctaagccaaaaactaggcaattatatgaatcctcagaaaaagaaatgagcccagagacctgtgtccccaaacatccgtaaatctcatagtaaggcaggacaggataaccagaaaaaaacaatgtccaactggtggtctggtttctggtctcaatggtaccaaagggatagtcaccacctcaatcaaactgagatccaaaacagcagctgctttcctacaaggaaagacatcaagaactactgagtctgaagggtgacataatcaaccacaagaaaatgttacggtttagcctggcacagtggtgcatgcctgcagtcccaactactggagaggctgaggtgggaggactgcttgggcccaggagttcaaggtcagcctcggcaatataatgagactctgtctctaaaatcaaaaattagagaaatataaaaattataaaattaaaaaagaaaatgtcatgatagctcaggtttcagagaggatgctgcactactctgggaaaaaagtgaagtgacagctcagccctgacagcaggacctagaagggctgagatgaagaggctgacctgtagagctcagcctggacccacaggaggggtagttgagttcacagagggatactgccatttaagctggttgtgaatggggtggtatgaagaccgactgcactagtattctctccaggttacaaataccatgaccaaactgtgtaatgtgatactaatatgcagaataaagcatattaaaaaacaaaaaaaaaccatgaat

SEQ ID NO: 425055 - DNA, 4349 bp, Homo sapiens
ggcgcactgcgggggccaaggaaggaagaaatgtggtcgcggttggtgtggctgggccttcgggcccctctgggcgggcgccagggcttcacctccaaggcggatcctcagggcagtggccggatcacggctgcggtgatcgagcacctggagcgtctagcgcttgtggacttcggcagccgcgaggcagtggcgcgactggagaaagctatcgccttcgccgaccggctacgcgccgtggacacagacggggtggagcccatggaatcggtcctggaggacaggttggagtgcagtggtgtgatctccgctcactacaaactctgcttcctacattcaagtgattcttgtgcctcagcctcccaggtagctgggattacagatgtctatacctgagatccgacaatgtggtagaaggcaactgtgctgatgaattactacaaaactcccatcgcgtcgtggaggagtactttgtggcccccccaggtaatatctctttgccaaagctggatgaacaagagccattcccacacagctgagtagctcattctggaaagggggtactctgtgaacatgtggaagcataatgacagtatttttttactgtgaatactaatgttcctgcttttttcagtcccctgaaaaaatggatgctcaagcatttcttaataacagattcttctgaagacagaattgggaaagatctggccccaacaaggcagtgagttcctgatgctaactgaggtgaaagaaaagcaaaagtcagcttccaaggaattcacttaacaggcctgttcagtatggaagacattatttatctgcctttaactccccccaaaggaccataccaactgcatgaaagtgaacttttctatctacgtaactggtagacggagcatcttgatcactatgtgacaaccttggctgtcatttttagttgccatttgcattgatttgagcagccctatctttaccgaacatacctgaatttgttcctgggctcccactttcttcccagaagagggctaacttcctactaaggtctgaagagtgttgaaagtagactagagcttgggaactcctaacctagaactatctgccatcccacaaagtgattatatgccaaagggatactagtcatacctagtgtttctctttctgaaaagagaacttatcctaaaattagccctgggcctgggacaaaggagccctctccgcccccaaaatgattattaaattgagatgagtccaggataaaactcagataccaaggataaatgaaacttatttagggataaaagtgggctgggcgcagtggctcactcctgtgatcccagcactttgggaggctgagacgggcggatcacaaggtcaggagatcaagaccatcctggctaatgcggtgaaacctcatctctactaaaaatacaaaaaattagctgggtgtgatgacaggtgcctgtagtcccagctactcgggaggctgaggcaggagaatggcgtgaacccgggagacggagcttgcagtaagccgagatcgcaccactgcactccagcctgggcgacagagcaagtctcaaaaaaaaaaaaaaaagtgatagaatcagagagtttttcctctaaccaaactgccaaagttggttttggctaagaatttcccaataatatttatgctgctgctcatttttttagttttctgagacaggggtctccctctgtcacccaggctggagtgcagtggtgacagatcactgcagcctccaactcctgggctcaagtgatcctcccacctcagcctcctaagtaactgggactacatatgtgcatcaccacgtccagttaatttttttttgagtagaggtgggggttttgctatgttgcctatctggtcgtgaactcctggcctcaagggatcctctggcatgccttggcctcccaaagggctaggatcacaggcaaaagccaccgtgtgtttatttttcccattcccttcctttatctgcaatgcttttttctttaaggcagcctaatttacaagcttggccttgaattaaaagagaacccagaacccgctcttggagtttacgttctcaaaccaacatcagagcaactgtctatccccatataaataaagttatctacccctgctcctaactgggtacaagttatgactacaactcagtgattttttaaattagtgtgcctatttggtgaaatctgtgaacttaatcaaggacaaccacacatgtcaattactaaacatttaaaatatatttctaaacagaatgggccgactcagtcacagtaactgttgatctccatagtagagcaacccacaaagacagaactgatttttttcccataatcaggggtgaaaaatatacaacttgtttctgaaccaaaaccacaatttctgcagtttaaaatgtttcactgctaatatggccctggtagaaattatgtagttttttttcttctttaaaaaaaaaaaattaaaaaaatttcctaagacactaaatcctcaatctggaatgtagattctgagcacaaagcagctcagttaacctaaaaaataaagaaaaaattcccatcacctgtctcagtagggcctgaaaggagagaagtagtgtggggaacccctgctttggtatggagagtcacggccccttgacccagaccgagaccgtgagtagccatagctggtgcttctctcaggataaactcggatgtaggaagtttcaccctgaaatgcaaacaaaaacaaaaagagtaaaggggaaaaaaatcagagccagaagaataagcaaaccaacatctaacaataatagttaagtattgagcacttactgtgtactctgtgcctggcatgaggctatctcattaaaccttcataacattatgaggtaggtactcttactatcccatttcaagaatgaagaaaattaagacttaagttatatcatttgcccaaggtaacacaataaatgccaatttgacatgttgatactcaattaactatgataaacaatatatctgaattactgccattgatccccctcaaagctaagaactggaaaggatctcaggggtcatatagtttaatcccctgccacctcatgtatgcatctttggatgggcatctatggaaggagctagcctgtatttaataccttccagatgtgaggacctgagctagatgctttagacgttatcctcttgctctagattcctggcaagtcttgtgatggtgctattatgtgaccattttgcccatgaaggaatcgaggtcccaagagtagttcaggtaaggaattaataagcagcagaggaggcatgtccaggctggcttgtccccaggccctctgccttcagccaccattctcagaagatccaaagatgccaaggggaaagaagccggatgctttttcaccttaggtgaaagtcagtaattggagttaccctttctgaggccctgctttgcagtataactgaggatcaggtgctgttctgtttctgcttcaaattcaagtcctagaggacagtctgaacaaaagcatcattaaaccagggaaggaccaacctctaagccaaaaactaggcaattatatgaatcctcagaaaaagaaatgagcccagagacctgtgtccccaaacatccgtaaatctcatagtaaggcaggacaggataaccagaaaaaaacaatgtccaactggtggtctggtttctggtctcaatggtaccaaagggatagtcaccacctcaatcaaactgagatccaaaacagcagctgctttcctacaaggaaagacatcaagaactactgagtctgaagggtgacataatcaaccacaagaaaatgttacggtttagcctggcacagtggtgcatgcctgcagtcccaactactggagaggctgaggtgggaggactgcttgggcccaggagttcaaggtcagcctcggcaatataatgagactctgtctctaaaatcaaaaattagagaaatataaaaattataaaattaaaaaagaaaatgtcatgatagctcaggtttcagagaggatgctgcactactctgggaaaaaagtgaagtgacagctcagccctgacagcaggacctagaagggctgagatgaagaggctgacctgtagagctcagcctggacccacaggaggggtagttgagttcacagagggatactgccatttaagctggttgtgaatggggtggtatgaagaccgactgcactagtattctctccaggttacaaataccatgaccaaactgtgtaatgtgatactaatatgcagaataaagcatattaaaaaacaaaaaaaaaccatgaat

SEQ ID NO: 425056 - DNA, 769 bp, Homo sapiens
agtgccttccccgggctgcaggaattcggcacgaggagatcaaaaatggcggtagttggtgtgtcctcggtttctcggctgctgggtcggtcccgcccacagctggggcggcctatgtcgagtggcgcccatggcgaagagggctcagctcgcatgtggaagactctcaccttcttcgtcgcgctccccggggtggcagtcagcatgctgaatgtgtacctgaagtcgcaccacggagagcacgagagacccgagttcatcgcctacccccatctccgcatcaggaccaagccgtttccctggggagatggtaaccatactctattccataaccctcatgtgaatccacttccaactggctacgaagatgaataaagagaatctggaccactacccgggcaccagggaccacagcactggtttggaccgttactctgcacatggaccagaaaaagtatatgggaccttaagctcaccttctttacttgtatcaaatgatgactggtatactggtctcccatccctttgcttgtggcaggagatggcttaaataaataacttaaacttacacttaaaaaaaaaaacaaaaaaacaccccagtttatactttcttcaatactcacaaacacaaaaaatgaagaaacacaaagtattataaaataacgggcaagaaaacagaagggataaaaacagagcaccacaaagagaaaaaagcgcggacgacacccaacaaaaaaagagacagacaaacaacacacaggaaaaaaca

SEQ ID NO: 425057 - DNA, 2344 bp, Homo sapiens
acgtttgtggcttctccgcagctcgcatgtggaagactctcaccttcttcgtcgcgctccccggggtggcagtcagcatgctgaatgtgtacctgaagtcgcaccacggagagcacgagagacccgagttcatcgcctacccccatctccgcatcaggaccaagccgtttccctggggagatggtaaccatactctattccataaccctcatgtgaatccacttccaactggctacgaagatgaataaagagaatctggaccactacccgggcaccagggaccacagcactggtttggaccgttactctgcacatggaccagaaaaagtatatgggaccttaagctcaccttctttacttgtatcaaatgatgactggtatactggtctcccatccctttgcttgtggcaggagatggcttaaataaataacttaaacttaaaaaaaaaacaaaaaaaaaaaaaaaaaaaaaaaaaaaaaaaaaaaattaaaaaaatttcctaagacactaaatcctcaatctggaatgtagattctgagcacaaagcagctcagttaacctaaaaaataaagaaaaaattcccatcacctgtctcagtagggcctgaaaggagagaagtagtgtggggaacccctgctttggtatggagagtcacggccccttgacccagaccgagaccgtgagtagccatagctggtgcttctctcaggataaactcggatgtaggaagtttcaccctgaaatgcaaacaaaaacaaaaagagtaaaggggaaaaaaatcagagccagaagaataagcaaaccaacatctaacaataatagttaagtattgagcacttactgtgtactctgtgcctggcatgaggctatctcattaaaccttcataacattatgaggtaggtactcttactatcccatttcaagaatgaagaaaattaagacttaagttatatcatttgcccaaggtaacacaataaatgccaatttgacatgttgatactcaattaactatgataaacaatatatctgaattactgccattgatccccctcaaagctaagaactggaaaggatctcaggggtcatatagtttaatcccctgccacctcatgtatgcatctttggatgggcatctatggaaggagctagcctgtatttaataccttccagatgtgaggacctgagctagatgctttagacgttatcctcttgctctagattcctggcaagtcttgtgatggtgctattatgtgaccattttgcccatgaaggaatcgaggtcccaagagtagttcaggtaaggaattaataagcagcagaggaggcatgtccaggctggcttgtccccaggccctctgccttcagccaccattctcagaagatccaaagatgccaaggggaaagaagccggatgctttttcaccttaggtgaaagtcagtaattggagttaccctttctgaggccctgctttgcagtataactgaggatcaggtgctgttctgtttctgcttcaaattcaagtcctagaggacagtctgaacaaaagcatcattaaaccagggaaggaccaacctctaagccaaaaactaggcaattatatgaatcctcagaaaaagaaatgagcccagagacctgtgtccccaaacatccgtaaatctcatagtaaggcaggacaggataaccagaaaaaaacaatgtccaactggtggtctggtttctggtctcaatggtaccaaagggatagtcaccacctcaatcaaactgagatccaaaacagcagctgctttcctacaaggaaagacatcaagaactactgagtctgaagggtgacataatcaaccacaagaaaatgttacggtttagcctggcacagtggtgcatgcctgcagtcccaactactggagaggctgaggtgggaggactgcttgggcccaggagttcaaggtcagcctcggcaatataatgagactctgtctctaaaatcaaaaattagagaaatataaaaattataaaattaaaaaagaaaatgtcatgatagctcaggtttcagagaggatgctgcactactctgggaaaaaagtgaagtgacagctcagccctgacagcaggacctagaagggctgagatgaagaggctgacctgtagagctcagcctggacccacaggaggggtagttgagttcacagagggatactgccatttaagctggttgtgaatggggtggtatgaagaccgactgcactagtattctctccaggttacaaataccatgaccaaactgtgtaatgtgatactaatatgcagaataaagcatattaaaaaacaaaaaaaaaccatgaat

SEQ ID NO: 425058 - DNA, 2505 bp, Homo sapiens
gaggattacactttcataaacacagcactggatatactagttactagggagaggatgatgagtaactaacttgagcttgcattttctgccatccatatttgtttctggaattaaaactgtcctgtagccaggataactttaagggctcccctggtagttataagagctccttaaataatgggaaggttgaactacaccagtagataaaggactaatttccattttgtttttatatatgatctgtcaccccgttataagcagttcatgacggtgttctttctaaattattttctggaattatctaactgacatcttcactccacagccgtttccctggggagatggtaaccatactctattccataaccctcatgtgaatccacttccaactggctacgaagatgaataaagagaatctggaccactacccgggcaccagggaccacagcactggtttggaccgttactctgcacatggaccagaaaaagtatatgggaccttaagctcaccttctttacttgtatcaaatgatgactggtatactggtctcccatccctttgcttgtggcaggagatggcttaaataaataacttaaacttaaaaaaaaaacaaaaaaaaaaaaaaaaaaaaaaaaaaaaaaaaaaaattaaaaaaatttcctaagacactaaatcctcaatctggaatgtagattctgagcacaaagcagctcagttaacctaaaaaataaagaaaaaattcccatcacctgtctcagtagggcctgaaaggagagaagtagtgtggggaacccctgctttggtatggagagtcacggccccttgacccagaccgagaccgtgagtagccatagctggtgcttctctcaggataaactcggatgtaggaagtttcaccctgaaatgcaaacaaaaacaaaaagagtaaaggggaaaaaaatcagagccagaagaataagcaaaccaacatctaacaataatagttaagtattgagcacttactgtgtactctgtgcctggcatgaggctatctcattaaaccttcataacattatgaggtaggtactcttactatcccatttcaagaatgaagaaaattaagacttaagttatatcatttgcccaaggtaacacaataaatgccaatttgacatgttgatactcaattaactatgataaacaatatatctgaattactgccattgatccccctcaaagctaagaactggaaaggatctcaggggtcatatagtttaatcccctgccacctcatgtatgcatctttggatgggcatctatggaaggagctagcctgtatttaataccttccagatgtgaggacctgagctagatgctttagacgttatcctcttgctctagattcctggcaagtcttgtgatggtgctattatgtgaccattttgcccatgaaggaatcgaggtcccaagagtagttcaggtaaggaattaataagcagcagaggaggcatgtccaggctggcttgtccccaggccctctgccttcagccaccattctcagaagatccaaagatgccaaggggaaagaagccggatgctttttcaccttaggtgaaagtcagtaattggagttaccctttctgaggccctgctttgcagtataactgaggatcaggtgctgttctgtttctgcttcaaattcaagtcctagaggacagtctgaacaaaagcatcattaaaccagggaaggaccaacctctaagccaaaaactaggcaattatatgaatcctcagaaaaagaaatgagcccagagacctgtgtccccaaacatccgtaaatctcatagtaaggcaggacaggataaccagaaaaaaacaatgtccaactggtggtctggtttctggtctcaatggtaccaaagggatagtcaccacctcaatcaaactgagatccaaaacagcagctgctttcctacaaggaaagacatcaagaactactgagtctgaagggtgacataatcaaccacaagaaaatgttacggtttagcctggcacagtggtgcatgcctgcagtcccaactactggagaggctgaggtgggaggactgcttgggcccaggagttcaaggtcagcctcggcaatataatgagactctgtctctaaaatcaaaaattagagaaatataaaaattataaaattaaaaaagaaaatgtcatgatagctcaggtttcagagaggatgctgcactactctgggaaaaaagtgaagtgacagctcagccctgacagcaggacctagaagggctgagatgaagaggctgacctgtagagctcagcctggacccacaggaggggtagttgagttcacagagggatactgccatttaagctggttgtgaatggggtggtatgaagaccgactgcactagtattctctccaggttacaaataccatgaccaaactgtgtaatgtgatactaatatgcagaataaagcatattaaaaaacaaaaaaaaaccatgaat

SEQ ID NO: 425059 - DNA, 3621 bp, Homo sapiens
ggcgcactgcgggggccaaggaaggaagaaatgtggtcgcggttggtgtggctgggccttcgggcccctctgggcgggcgccagggcttcacctccaaggcggatcctcagggcagtggccggatcacggctgcggtgatcgagcacctggagcgtctagcgcttgtggacttcggcagccgcgaggcagtggcgcgactggagaaagctatcgccttcgccgaccggctacgcgccgtggacacagacggggtggagcccatggaatcggtcctggaggacagatgtctatacctgagatccgacaatgtggtagaaggcaactgtgctgatgaattactacaaaactcccatcgcgtcgtggaggagtactttgtggcccccccaggtaatatctctttgccaaagctggatgaacaagagccattcccacacagctgagtagctcattctggaaagggggtactctgtgaacatgtggaagcataatgacagtatttttttactgtgaatactaatgttcctgcttttttcagtcccctgaaaaaatggatgctcaagcatttcttaataacagattcttctgaagacagaattgggaaagatctggccccaacaaggcagtgagttcctgatgctaactgaggtgaaagaaaagcaaaagtcagcttccaaggaattcacttaacaggcctgttcagtatggaagacattatttatctgcctttaactccccccaaaggaccataccaactgcatgaaagtgaacttttctatctacgtaactggtagacggagcatcttgatcactatgtgacaaccttggctgtcatttttagttgccatttgcattgatttgagcagccctatctttaccgaacatacctgaatttgttcctgggctcccactttcttcccagaagagggctaacttcctactaaggtctgaagagtgttgaaagtagactagagcttgggaactcctaacctagaactatctgccatcccacaaagtgattatatgccaaagggatactagtcatacctagtgtttctctttctgaaaagagaacttatcctaaaattagccctgggcctgggacaaaggagccctctccgcccccaaaatgattattaaattgagatgagtccaggataaaactcagataccaaggataaatgaaacttatttagggataaaagtgggctgggcgcagtggctcactcctgtgatcccagcactttgggaggctgagacgggcggatcacaaggtcaggagatcaagaccatcctggctaatgcggtgaaacctcatctctactaaaaatacaaaaaattagctgggtgtgatgacaggtgcctgtagtcccagctactcgggaggctgaggcaggagaatggcgtgaacccgggagacggagcttgcagtaagccgagatcgcaccactgcactccagcctgggcgacagagcaagtctcaaaaaaaaaaaaaaaagtgatagaatcagagagtttttcctctaaccaaactgccaaagttggttttggctaagaatttcccaataatatttatgctgctgctcatttttttagttttctgagacaggggtctccctctgtcacccaggctggagtgcagtggtgacagatcactgcagcctccaactcctgggctcaagtgatcctcccacctcagcctcctaagtaactgggactacatatgtgcatcaccacgtccagttaatttttttttgagtagaggtgggggttttgctatgttgcctatctggtcgtgaactcctggcctcaagggatcctctggcatgccttggcctcccaaagggctaggatcacaggcaaaagccaccgtgtgtttatttttcccattcccttcctttatctgcaatgcttttttctttaaggcagcctaatttacaagcttggccttgaattaaaagagaacccagaacccgctcttggagtttacgttctcaaaccaacatcagagcaactgtctatccccatataaataaagttatctacccctgctcctaactgggtacaagttatgactacaactcagtgattttttaaattagtgtgcctatttggtgaaatctgtgaacttaatcaaggacaaccacacatgtcaattactaaacatttaaaatatatttctaaacagaatgggccgactcagtcacagtaactgttgatctccatagtagagcaacccacaaagacagaactgatttttttcccataatcaggggtgaaaaatatacaacttgtttctgaaccaaaaccacaatttctgcagtttaaaatgtttcactgctaatatggccctggtagaaattatgtagttttttttcttctttaaaaaaaaaaaattaaaaaaatttcctaagacactaaatcctcaatctggaatgtagattctgagcacaaagcagctcagttaacctaaaaaataaagaaaaaattcccatcacctgtctcagtagggcctgaaaggagagaagtagtgtggggaacccctgctttggtatggagagtcacggccccttgacccagaccgagaccgtgagtagccatagctggtgcttctctcaggataaactcggatgtaggaagtttcaccctcatgagagcggaatttggtgtcatccagtttacgcagggcatattccatgtcttcttttctgagatactcgaccatccccactccatccttctgcacatcagcataacagacatccccagcttctcgcatgtgatccttcaggtcctgccagctgcctgacggaggaagtcctaggcatggagaacataagaaagcccacatccttcagctatgttaactgccctgttaagagccagcaatacctatggtcccttctccatgatcacttaaatcctgagggtccccaaatcataaaccttgataagggacatgaaatcagaaaagagcactgaagtatgtgtggtaaatgaaccactttgagaagctggttttaagttcatcttccagagaccaggccttttcaacagagcaagaagtccatcccattacaggtttagtatctttgagaattcatagcctctttctttgtcctttaaaatcaatgccaaactcctaatactttgagttccaattttttccattatgaaatttaacagtaccaattatttattgcttgacagggtttcacaggacatgggaattttgaaaccagacatgaaataaccaaagagtagctgaaggtaacaacacaacaacaaaaaatctaaagtttgttttcttgtaggtatgaatgacaaactatacagagtacctcttaaaagatcaccaacattcttcaatacagtgggggggaaggtaagactcagatgctaaaactagtcgggagtcatacaaccctacctgatgtcatgaaagggaaatgtgctcctgctctcaaaggctgtgtttaccgctcacagctcaggactgcagccatttcctaatagttttctaagcaggatttcagagcagcatggagagaaaaaaagataatgtatgacatcctgaaggagggaatagagttctggggttaaaaaattacaaagggacacaa

SEQ ID NO: 425060 - DNA, 2039 bp, Homo sapiens
ggcgcactgcgggggccaaggaaggaagaaatgtggtcgcggttggtgtggctgggccttcgggcccctctgggcgggcgccagggcttcacctccaaggcggatcctcagggcagtggccggatcacggctgcggtgatcgagcacctggagcgtctagcgcttgtggacttcggcagccgcgaggcagtggcgcgactggagaaagctatcgccttcgccgaccggctacgcgccgtggacacagacggggtggagcccatggaatcggtcctggaggacagatgtctatacctgagatccgacaatgtggtagaaggcaactgtgctgatgaattactacaaaactcccatcgcgtcgtggaggagtactttgtggcccccccaggtaatatctctttgccaaagctggatgaacaagagccattcccacacagctgagtagctcattctggaaagggggtactctgtgaacatgtggaagcataatgacagtatttttttactgtgaatactaatgttcctgcttttttcagtcccctgaaaaaatggatgctcaagcatttcttaataacagattcttctgaagacagaattgggaaagatctggccccaacaaggcagtgagttcctgatgctaactgaggtgaaagaaaagcaaaagtcagcttccaaggaattcacttaacaggcctgttcagtatggaagacattatttatctgcctttaactccccccaaaggaccataccaactgcatgaaagtgaacttttctatctacgtaactggtagacggagcatcttgatcactatgtgacaaccttggctgtcatttttagttgccatttgcattgatttgagcagccctatctttaccgaacatacctgaatttgttcctgggctcccactttcttcccagaagagggctaacttcctactaaggtctgaagagtgttgaaagtagactagagcttgggaactcctaacctagaactatctgccatcccacaaagtgattatatgccaaagggatactagtcatacctagtgtttctctttctgaaaagagaacttatcctaaaattagccctgggcctgggacaaaggagccctctccgcccccaaaatgattattaaattgagatgagtccaggataaaactcagataccaaggataaatgaaacttatttagggataaaagtgggctgggcgcagtggctcactcctgtgatcccagcactttgggaggctgagacgggcggatcacaaggtcaggagatcaagaccatcctggctaatgcggtgaaacctcatctctactaaaaatacaaaaaattagctgggtgtgatgacaggtgcctgtagtcccagctactcgggaggctgaggcaggagaatggcgtgaacccgggagacggagcttgcagtaagccgagatcgcaccactgcactccagcctgggcgacagagcaagtctcaaaaaaaaaaaaaaaagtgatagaatcagagagtttttcctctaaccaaactgccaaagttggttttggctaagaatttcccaataatatttatgctgctgctcatttttttagttttctgagacaggggtctccctctgtcacccaggctggagtgcagtggtgacagatcactgcagcctccaactcctgggctcaagtgatcctcccacctcagcctcctaagtaactgggactacatatgtgcatcaccacgtccagttaatttttttttgagtagaggtgggggttttgctatgttgcctatctggtcgtgaactcctggcctcaagggatcctctggcatgccttggcctcccaaagggctaggatcacaggcaaaagccaccgtgtgtttatttttcccattcccttcctttatctgcaatgcttttttctttaaggcagcctaatttacaagcttggccttgaattaaaagagaacccagaacccgctcttggagtttacgttctcaaaccaacatcagaatggtaaccattctgatgttggagcggccgc

SEQ ID NO: 425061 - DNA, 452 bp, Homo sapiens
  misc_feature (365)..(365): n is a, c, g, or t
  misc_feature (367)..(367): n is a, c, g, or t
agtgccttccccgggctgcaggaattcggcacgaggagatcaaaaatggcggtagttggtgtgtcctcggtttctcggctgctgggtcggtcccgcccacagctggggcggcctatgtcgagtggcgcccatggcgaagagggctcagctcgcatgtggaagactctcaccttcttcgtcgcgctccccggggtggcagtcagcatgctgaatgtgtacctgaagtcgcaccacggagagcacgagagacccgagttcatcgcctacccccatctccgcatcaggaccaagccgtttccctggggagatggtaaccatactctattccataaccctcatgtgaatccacttccaactggctaccnanaaagggaaaattttggggggcaaaaaaaaaaaatttttttaaaaaaaaaaataaaagggggggcagaccgttactctgcacatgg

SEQ ID NO: 425062 - DNA, 505 bp, Homo sapiens
gggcaacagcgagactctgtctcaaaacaaaaacaaacaaacaaacaaaaattctcttttgttattttcaaacaggtaatatctctttgccaaagctggatgaacaagagccattcccacacagctgagtagctcattctggaaagggggtactctgtgaacatgtggaagcataatgacagtatttttttactgtgaatactaatgttcctgcttttttcagtcccctgaaaaaatggatgctcaagcatttcttaataacagattcttctgaagacagaattgggaaagatctggccccaacaaggcagtgagttcctgatgctaactgaggtgaaagaaaagcaaaagtcagcttccaaggaattcacttaacaggcctgttcagtatggaagacattatttatctgcctttaactccccccaaaggaccataccaactgcatgaaagtgaacttttctatctacgtaactggtagacggagcatcttgatcactatgtgac

SEQ ID NO: 425063 - DNA, 568 bp, Homo sapiens
agtgccttccccgggctgcaggaattcggcacgaggagatcaaaaatggcggtagttggtgtgtcctcggtttctcggctgctgggtcggtcccgcccacagctggggcggcctatgtcgagtggcgcccatggcgaagagggctcagctcgcatgtggaagactctcaccttcttcgtcgcgctccccggggtggcagtcagcatgctgaatgtgtacctgaagtcgcaccacggagagcacgagagacccgagttcatcgcctacccccatctccgcatcaggaccaagccgtttccctggggagatggtaaccatactctattccataaccctcatgtgaatccacttccaactggctacgaagatgaataaagagaatctggaccactacccgggcaccagggaccacagcactggtttggaccgttactctgcacatggaccagaaaaagtatatgggaccttaagctcaccttctttacttgtatcaaatgatgactggtatactggtctcccatccctttgcttgtggcaggagatggcttaaataaataacttaaactta

SEQ ID NO: 425064 - DNA, 739 bp, Homo sapiens
agtgccttccccgggctgcaggaattcggcacgaggagatcaaaaatggcggtagttggtgtgtcctcggtttctcggctgctgggtcggtcccgcccacagctggggcggcctatgtcgagtggcgcccatggcgaagagggctcagctcgcatgtggaagactctcaccttcttcgtcgcgctccccggggtggcagtcagcatgctgaatgtgtacctgaagtcgcaccacggagagcacgagagacccgagttcatcgcctacccccatctccgcatcaggaccaagccgtttccctggggagatggtaaccatactctattccataaccctcatgtgaatccacttccaactggctacgaagatgaataaagagaatctggaccactacccgggcaccagggaccacagcactggtttggaccgttactctgcacatggaccagaaaaagtatatgggaccttaagctcaccttctttacttgtatcaaatgatgactggtatactggtctcccatccctttgcttgtggcaggagatggcttaaataaataacttaaacttactaaaaaaaaaaaaaaaacttgaggggggcccgttcccattcgcctataggagtcgattacaatcactggcctcgtttacaccgcggactggaaaccctggcgtaccaacttatcgccttgaacatccccctttgcagttgcctaattacaaaggccgaaccatgccctac

SEQ ID NO: 425065 - DNA, 2471 bp, Homo sapiens
agtgccttccccgggctgcaggaattcggcacgaggagatcaaaaatggcggtagttggtgtgtcctcggtttctcggctgctgggtcggtcccgcccacagctggggcggcctatgtcgagtggcgcccatggcgaagagggctcagctcgcatgtggaagactctcaccttcttcgtcgcgctccccggggtggcagtcagcatgctgaatgtgtacctgaagtcgcaccacggagagcacgagagacccgagttcatcgcctacccccatctccgcatcaggaccaagccgtttccctggggagatggtaaccatactctattccataaccctcatgtgaatccacttccaactggctacgaagatgaataaagagaatctggaccactacccgggcaccagggaccacagcactggtttggaccgttactctgcacatggaccagaaaaagtatatgggaccttaagctcaccttctttacttgtatcaaatgatgactggtatactggtctcccatccctttgcttgtggcaggagatggcttaaataaataacttaaacttaaaaaaaaaacaaaaaaaaaaaaaaaaaaaaaaaaaaaaaaaaaaaattaaaaaaatttcctaagacactaaatcctcaatctggaatgtagattctgagcacaaagcagctcagttaacctaaaaaataaagaaaaaattcccatcacctgtctcagtagggcctgaaaggagagaagtagtgtggggaacccctgctttggtatggagagtcacggccccttgacccagaccgagaccgtgagtagccatagctggtgcttctctcaggataaactcggatgtaggaagtttcaccctgaaatgcaaacaaaaacaaaaagagtaaaggggaaaaaaatcagagccagaagaataagcaaaccaacatctaacaataatagttaagtattgagcacttactgtgtactctgtgcctggcatgaggctatctcattaaaccttcataacattatgaggtaggtactcttactatcccatttcaagaatgaagaaaattaagacttaagttatatcatttgcccaaggtaacacaataaatgccaatttgacatgttgatactcaattaactatgataaacaatatatctgaattactgccattgatccccctcaaagctaagaactggaaaggatctcaggggtcatatagtttaatcccctgccacctcatgtatgcatctttggatgggcatctatggaaggagctagcctgtatttaataccttccagatgtgaggacctgagctagatgctttagacgttatcctcttgctctagattcctggcaagtcttgtgatggtgctattatgtgaccattttgcccatgaaggaatcgaggtcccaagagtagttcaggtaaggaattaataagcagcagaggaggcatgtccaggctggcttgtccccaggccctctgccttcagccaccattctcagaagatccaaagatgccaaggggaaagaagccggatgctttttcaccttaggtgaaagtcagtaattggagttaccctttctgaggccctgctttgcagtataactgaggatcaggtgctgttctgtttctgcttcaaattcaagtcctagaggacagtctgaacaaaagcatcattaaaccagggaaggaccaacctctaagccaaaaactaggcaattatatgaatcctcagaaaaagaaatgagcccagagacctgtgtccccaaacatccgtaaatctcatagtaaggcaggacaggataaccagaaaaaaacaatgtccaactggtggtctggtttctggtctcaatggtaccaaagggatagtcaccacctcaatcaaactgagatccaaaacagcagctgctttcctacaaggaaagacatcaagaactactgagtctgaagggtgacataatcaaccacaagaaaatgttacggtttagcctggcacagtggtgcatgcctgcagtcccaactactggagaggctgaggtgggaggactgcttgggcccaggagttcaaggtcagcctcggcaatataatgagactctgtctctaaaatcaaaaattagagaaatataaaaattataaaattaaaaaagaaaatgtcatgatagctcaggtttcagagaggatgctgcactactctgggaaaaaagtgaagtgacagctcagccctgacagcaggacctagaagggctgagatgaagaggctgacctgtagagctcagcctggacccacaggaggggtagttgagttcacagagggatactgccatttaagctggttgtgaatggggtggtatgaagaccgactgcactagtattctctccaggttacaaataccatgaccaaactgtgtaatgtgatactaatatgcagaataaagcatattaaaaaacaaaaaaaaaccatgaat

SEQ ID NO: 425066 - DNA, 1242 bp, Homo sapiens
  misc_feature (1080)..(1080): n is a, c, g, or t
  misc_feature (1170)..(1170): n is a, c, g, or t
agtgccttccccgggctgcaggaattcggcacgaggagatcaaaaatggcggtagttggtgtgtcctcggtttctcggctgctgggtcggtcccgcccacagctggggcggcctatgtcgagtggcgcccatggcgaagagggctcagctcgcatgtggaagactctcaccttcttcgtcgcgctccccggggtggcagtcagcatgctgaatgtgtacctgaagtcgcaccacggagagcacgagagacccgagttcatcgcctacccccatctccgcatcaggaccaagccgtttccctggggagatggtaaccatactctattccataaccctcatgtgaatccacttccaactggctacgaagatgaataaagagaatctggaccactacccgggcaccagggaccacagcactggtttggaccgttactctgcacatggaccagaaaaagtatatgggaccttaagctcaccttctttacttgtatcaaatgatgactggtatactggtctcccatccctttgcttgtggcaggagatggcttaaataaataacttaaacttaaaaaaaaaacaaaaaaaaaaaaaaaaaaaaaaaaaaaaaaaaaaaattaaaaaaatttcctaagacactaaatcctcaatctggaatgtagattctgagcacaaagcagctcagttaacctaaaaaataaagaaaaaattcccatcacctgtctcagtagggcctgaaaggagagaagtagtgtggggaacccctgctttggtatggagagtcacggccccttgacccagaccgagaccgtgagtagccatagctggtgcttctctcaggataaactcggatgtaggaagtttcaccctcatgagagcggaatttggtgtcatccagtttacgcagggcatattccatgtcttcttttctgagatactcgaccatccccactccatccttctgcacatcagcataacagacatccccagcttctctggcccgatttatcatatcccttttctcctccaaatgtttctcctctcaccttttctctgggacttaagctgctatatcccctcagngctcacaaatgcctttacattctttccctgacctcctgattttttttttcttttctcaaatgttacctacaaagacatgcctggggtaancacccggctccctaattcctcagtaacctccatctaaaatctccaaggaagcaataaattccttttatgaga

SEQ ID NO: 425067 - DNA, 832 bp, Homo sapiens
agtgccttccccgggctgcaggaattcggcacgaggagatcaaaaatggcggtagttggtgtgtcctcggtttctcggctgctgggtcggtcccgcccacagctggggcggcctatgtcgagtggcgcccatggcgaagagggctcagctcgcatgtggaagactctcaccttcttcgtcgcgctccccggggtggcagtcagcatgctgaatgtgtacctgaagtcgcaccacggagagcacgagagacccgagttcatcgcctacccccatctccgcatcaggaccaagccgtttccctggggagatggtaaccatactctattccataaccctcatgtgaatccacttccaactggctacgaagatgaataaagagaatctggaccactacccgggcaccagggaccacagcactggtttggaccgttactctgcacatggaccagaaaaagtatatgggaccttaagcggatcagcgctgatccgcttaagctcctatgcaggcttctcttgagcccagagacaaggcagcttggtctagtggagatagcactgtgcttggagttcaggggacctaggacaaatcccagccagttagttattcactgtgctcctgtttcctcagctgaaaaaggaagttggttatgccaccttcttggccttaatggcattaaatgaaatttataggaagaaggtttttgctcagtacctggcatgcaacagacattggataaatgttagttggatccagatatacacagaaagatatctgcttcctgccaggctggataactgttgaatggacacttgtccatgtctagaaacccca

SEQ ID NO: 425068 - DNA, 1812 bp, Homo sapiens
ggcgcactgcgggggccaaggaaggaagaaatgtggtcgcggttggtgtggctgggccttcgggcccctctgggcgggcgccagggcttcacctccaaggcggatcctcagggcagtggccggatcacggctgcggtgatcgagcacctggagcgtctagcgcttgtggacttcggcagccgcgaggcagtggcgcgactggagaaagctatcgccttcgccgaccggctacgcgccgtggacacagacggggtggagcccatggaatcggtcctggaggacagatgtctatacctgagatccgacaatgtggtagaaggcaactgtgctgatgaattactacaaaactcccatcgcgtcgtggaggagtactttgtggcccccccaggtaatatctctttgccaaagctggatgaacaagagccattcccacacagctgagtagctcattctggaaagggggtactctgtgaacatgtggaagcataatgacagtatttttttactgtgaatactaatgttcctgcttttttcagtcccctgaaaaaatggatgctcaagcatttcttaataacagattcttctgaagacagaattgggaaagatctggccccaacaaggcagtgagttcctgatgctaactgaggtgaaagaaaagcaaaagtcagcttccaaggaattcacttaacaggcctgttcagtatggaagacattatttatctgcctttaactccccccaaaggaccataccaactgcatgaaagtgaacttttctatctacgtaactggtagacggagcatcttgatcactatgtgacaaccttggctgtcatttttagttgccatttgcattgatttgagcagccctatctttaccgaacatacctgaatttgttcctgggctcccactttcttcccagaagagggctaacttcctactaaggtctgaagagtgttgaaagtagactagagcttgggaactcctaacctagaactatctgccatcccacaaagtgattatatgccaaagggatactagtcatacctagtgtttctctttctgaaaagagaacttatcctaaaattagccctgggcctgggacaaaggagccctctccgcccccaaaatgattattaaattgagatgagtccaggataaaactcagataccaaggataaatgaaacttatttagggataaaagtgggctgggcgcagtggctcactcctgtgatcccagcactttgggaggctgagacgggcggatcacaaggtcaggagatcaagaccatcctggctaatgcggtgaaacctcatctctactaaaaatacaaaaaattagctgggtgtgatgacaggtgcctgtagtcccagctactcgggaggctgaggcaggagaatggcgtgaacccgggagacggagcttgcagtaagccgagatcgcaccactgcactccagcctgggcgacagagcaagtctcaaaaaaaaaaaaaaaagtgatagaatcagagagtttttcctctaaccaaactgccaaagttggttttggctaagaatttcccaataatatttatgctgctgctcatttttttagttttctgagacaggggtctccctctgtcacccaggctggagtgcagtggtgacagatcactgcagcctccaactcctgggctcaagtgatcctcccacctcagctcccagctacttgggaggctgaggcaggagaatggcgtgaacccgggaggcggagcttgcagtgagctgaaatcgcgccactgaattccagcctgggtgacagagcgagactct

SEQ ID NO: 425069 - DNA, 1306 bp, Homo sapiens
ctaatgtgtcttagatttaccaactatcctaatgtgtagtcaattgataaactaaatttttctttaggatagttcacatccagtagaacttctaccttggaaaacattcttagccttgtttattttgaatgtatgtgtgtgtgtgtgcatgtgtggaaaacaagaaaaatacaagctctagagtagtggcctcacattgatttatattagtgtgccagtctttcccctacctccctaatatttcaaacttcttgtggacaatgacattcattttcatacctttatatttccagtgccaccagaaacacaaaagcagcttagtgttgatttaatgaagtagcaaaatgttaaatacataacaaaacagattgtcctgtcacctaaaacaaattagtgatgtttgagtaattagggttttgcatgtgtatatagaaaggctattttgcaaacagtggttcagtctgtattgggcacaggtgaattctgccctgcgattgccatctttagcacttttcagagaatttgttgccatttatgacactgatcttcagacacactgtgtagtgccttggcttaaactgtcagactggcaacagctgaggctgcccatcataggacacgttccttgcagttatgcttcagtgaactttaaaacatttggcactcgtatcttagaaatgtccttccgaaactcactctacaacagctttgtgggctccctactatttactagagtcaatcctgattttgtttggcataatgagacctgatatgctatgactctccctatcctataaagccacagctttcagcggtccccgtatactaatgaaatggagtcgccagtatccaaaagttccaagtgattatttagaacatttccattaaccataaaggcaaagtggtatagagaaaataatacagtctttgaagtcacacaggcctgatttcaaatcccagctctgtcatttacaaactgggtggtcctggataaattacttaacctctgtggtcttcagtttcctcccaactttgtagggttattgtgagcattgaatgataccaagttataagtgcataggtattcaatcagtgttcattcccttctgtatcaaagacttataatggccttttcatggaattgtctctacctataattatgtgactgtgccttcagattatcaaaattatatgaattgtccatgtgcccttggttttgaatgttcaattctgtattgcaggaatgcctactcagttgcttgaatgggtgtttggagttaataaaatggctgtacaattgaaaagg

SEQ ID NO: 425070 - DNA, 782 bp, Homo sapiens
taggcatggggagcaagttggaaagtgaggttattattttttttccttaaaattggtgttactgtctttagtggcttgaggctaaagaaagctgatactttatctttgccaaataattatttataagatttatttttaaataagcccaatctctcacctgcagttaagaatcatcattttctgtgactgacactaaagctcttccttatcagagcttgttctcaatctgtgatcacagtccacagtggcaaagacaactctttgattaggaaggaaaccatgtttgggatgcacagaggtgccctgtccatacggttttcttcttacatgaaagaattgacctttctgttgacctataccattctgtttttataaagtgggattagaatttgagcatatctagtaaatgccgtgtggtcagtccgctgatgcttgcccgccgtctttgccgtgccttggcatcctaggggtgctggtgatggtcagtgggcatcatcggtcagcagtgcacgtgtaaggcaatctcctctcctccaggttagttcagaaggtcgttgccagttccactattcttcatcttcaccaccttctactggtcagtctttcatcactcagcctccgaagtgctgggattacaggcgagagccactgtgcccctccctgagtagagtgatctgaacagagcatccacagatgggcggtgtttggacattcagaaatggagaaggtgttccaggagaagcaagcagcatgagcagttgggatacctcgtagtttgtgta

SEQ ID NO: 425071 - DNA, 4434 bp, Homo sapiens
  misc_feature (4434)..(4434): n is a, c, g, or t
catttatttccaaaatttttcaaaaaacttttactcagttctgctgttatttattaacttaagagtgctcccatccccatatttcagctataggaaaattgtgctacccctgattcatatggaattaaaaaaaaatacatccctttattttgagttttaagttgttattttgctatacatttattactggagtatctggtggtctgaaatagtcaaaagtagagttggtattaaatgttccaatgacatttatttttaatacttaaaaaatcatgtactttgaaatatgtcaaagcaacttctgataatatacctgaatttgtagttgtctcttgagcatcatttacttcatcttagatatagtgaagatctaggaaagctctatatgctgttcttttctacagttgtatttttgcagcatctcctggtttcattcactcttgttttgggatttttttttagatctgcatatttcttgtacatatgcatgcaaatgaaagaagggagtttgtactggtgccatttctcccttcagttgctggttaatgggatttgctagaaaaaattctcccggttgaagggtgaaaacagacccttatgtgtatatctgtacagagatgtgtatatgggatgtggtggcactttgctgaatgtgaacttgccttgtcaatggaaagattgaaaagtattatgtttatttatacatttgtataaatctatatatacacgtatgtatatgtgtgtgtatagataaagctatatacatatatttcccttaaaaatgtgtgtgtataataggtaaacagcctttgttaagcaagattaatgtctatggaaagttctggattattctgtaagccagaggaggtgacagtctagagtacatcatcagaacatactaaaatggaagtcctttggattatagttttgtttatggatattacacaatgaatgcttgtctgaacagttcttacttgccagttccactattcttcatcttcaccaccttctactggtcagtctttcatcacttaaaaaaaaaaaatcacacatcattgtggtttttttcccccttaattctgtctcttctagccagaagcatctggcttaagcatatttcatcaacttctctgttatttcttttaaagatctttatctctgaaattttcccagaagatacaagttttggtaatattatcaataggaattttgagacttgggcattcatctttgtctcaaaaacaaacagaaagccaaccttcaaataaaacaaatttgaaagttttagctcaataatttggggacattttacttaaattacaaaagaacataattatgattttatgatcgatattagtgttaggtttatttccacacttactgtcattaatttgtcatttacatatttttatttgctttgtagtttaatcataacttcaccatttacattttaatggaaagcatacaaggtcacatgttagcctcttgaattctgtaactaactcatttttctcatgatgaaactgctttgatgaattcctgtgtgatgaattctgctatatttccttttgacttttctcagtttgtgacattctgtattaactttgctgcagctctctagaaaacttgcatccctatatattgtgcctttaaagctcttatgcacacacagacaaaagtgtatatatacatgtcagagcatgtgtacatatgctttcgtatgtactcacacagtatgtctctagtatatattgtgggagtagatatatagatattcaaaggcaatgaaatattgctctccagatatatatgtatataaatagtgttgatataactgtatatacacatgtatatgtatgagttttaaatggcaatcttttacatttagcaaaatgctgcccctactggaatattgtcactgcagtggcagttgtatgtaatgatttaaaatacattatcaaaagttatttaaagaacatttaaagtctcatctaaagacatccacacactatttatttatcttccttttccttttattgttgtgtttttcttaactgaaagggagactgtcattttaaaaatgccatctgtcccatgagagtaagaaagagctggagattcacttgaggagctttgtgcatttttcctctctctgaagtggagatgttccacagaccagactgtttatttcacttataaagcaatcctaatatttccgttagtgtatgtcagccaccatctcctagatcaacttaattcaccaatttgcctcctcctttcattaataaataatgattattgagatcattttgcctgggggaagttaactactcccatgctgcagggaaatatatcacctaattgttattttgccttgttcaaaattcaaatttgaaagaaggcagctctctcatgaagctgtcttaagcacattttagttaagggccctcccaaactcttttttctttctttctttctttctttttttttttttttggcgagttccaagttgcatgtgcttgaaatagatttaattcttattccccacagtttaggtatttttcattagtacatcaatttgacacactgaatgcaagactattaaggaagaacgattaaatattattttattttgtgaagagttggcagcagattacatctcaagaacttgcagagagaggaaggtagatggacaatcctaaattgtaagatgttacaaaaaacagtgaagtaagagtactcctgaagactaaaatagagaggctggggtttgagccattttactgagtagcttagctggaacctgatatcagaagtagcctttaacaaaaagcctcttggcaattgtatggtactaacaactagagtactgaagtgtaagttgaaaccaagttgcagtgggaaatcaaaggtgaggtagcttatttgaaaccagcaaatgagacaggttggacagttttaaaatctcttctaacaaagaaactgcacggtagcaaggactagcggttctcaaagcccttctttttcagtgttctcattcaccttggcacccaagtatgtttaacaggccatgcattaaaaataaatacaaaaatataaaagccgcttaaagggaacttacaaactgacaatctctcctctgtatttgtgttcatagtggctgggagtttaattatatgcacaaaagttaggagccacttgtttctgcacagactgtaggagcaagatgaggagatgggcaggttttggtaagagcccccagttctggtggacaggcatacttgtggcattgggtgcggcattgctgggaggaccacgtcttgggaggcgattgacttttggtttgtaatttccctttaaacaagaagagatggctcacattttccatatatatctcaatgaatgtactgtattactgttttaaaaatttgatgaaataataatgaattggtctccttttgttatctggtccttgtttaatttgtttaagggtttttgtatacaaaagtttacatttttatgtatatttttcttgtgtaaaaactgatgtaatatgtgtatgaaacactgtatgtattatctgtatatagtgtgacaaaatcatttttctttctttcttttggatgtattaataaatcttgctgtgaagtaaaaaaaaaacacacaaaaaccaacacaacaaacacacacacacacccaacaccaacacacgaccaaccacaacccacaaacaacaacacaaacacaaaaacaagacacacaaacagcaccaccccaccacccaccaccaaccaccacaacaccccaacgaccaacaacaaacaaccaccccagcacaaaccaaaacacaccacggcggggccgcaacccactccacaccgggagacacccaaaccactacagaccaactaacacgacgaagcacaagacagccccctgcaccgaccggataccaacgtccactacacagacaacgccgcaccaacgacacaaccaaaccgaggagcgaagaaacacaacaccgcaagcagacgctaacaagagaaccaaccaccccaccgcgggacaccaacacagccagacccccaccacccagcaaactccccacaccgaccacacaaaacgcacccgccagccgcaggcaccacacacaaacgtccgcccacctccatacctcccccgccagccaaacgacacaaaaccaccggcccaagccgatcaagaccgcccagccagcaacaaacaagctgacagacacaaccggagagaacggcgcatccaccacgaacgcaagcagaatcagccaagcccaagccaaccacgtcacccaaagcgcgcaccagaccgccaacaacatcgagacccagcacacacacgccaacaacaccaggccgcaacaactcacccacagcaaagaccaatcatgacacaaan

SEQ ID NO: 425072 - DNA, 4228 bp, Homo sapiens
catttatttccaaaatttttcaaaaaacttttactcagttctgctgttatttattaacttaagagtgctcccatccccatatttcagctataggaaaattgtgctacccctgattcatatggaattaaaaaaaaatacatccctttattttgagttttaagttgttattttgctatacatttattactggagtatctggtggtctgaaatagtcaaaagtagagttggtattaaatgttccaatgacatttatttttaatacttaaaaaatcatgtactttgaaatatgtcaaagcaacttctgataatatacctgaatttgtagttgtctcttgagcatcatttacttcatcttagatatagtgaagatctaggaaagctctatatgctgttcttttctacagttgtatttttgcagcatctcctggtttcattcactcttgttttgggatttttttttagatctgcatatttcttgtacatatgcatgcaaatgaaagaagggagtttgtactggtgccatttctcccttcagttgctggttaatgggatttgctagaaaaaattctcccggttgaagggtgaaaacagacccttatgtgtatatctgtacagagatgtgtatatgggatgtggtggcactttgctgaatgtgaacttgccttgtcaatggaaagattgaaaagtattatgtttatttatacatttgtataaatctatatatacacgtatgtatatgtgtgtgtatagataaagctatatacatatatttcccttaaaaatgtgtgtgtataataggtaaacagcctttgttaagcaagattaatgtctatggaaagttctggattattctgtaagccagaggaggtgacagtctagagtacatcatcagaacatactaaaatggaagtcctttggattatagttttgtttatggatattacacaatgaatgcttgtctgaacagttcttacttgccagttccactattcttcatcttcaccaccttctactggtcagtctttcatcacttaaaaaaaaaaaatcacacatcattgtggtttttttcccccttaattctgtctcttctagccagaagcatctggcttaagcatatttcatcaacttctctgttatttcttttaaagatctttatctctgaaattttcccagaagatacaagttttggtaatattatcaataggaattttgagacttgggcattcatctttgtctcaaaaacaaacagaaagccaaccttcaaataaaacaaatttgaaagttttagctcaataatttggggacattttacttaaattacaaaagaacataattatgattttatgatcgatattagtgttaggtttatttccacacttactgtcattaatttgtcatttacatatttttatttgctttgtagtttaatcataacttcaccatttacattttaatggaaagcatacaaggtcacatgttagcctcttgaattctgtaactaactcatttttctcatgatgaaactgctttgatgaattcctgtgtgatgaattctgctatatttccttttgacttttctcagtttgtgacattctgtattaactttgctgcagctctctagaaaacttgcatccctatatattgtgcctttaaagctcttatgcacacacagacaaaagtgtatatatacatgtcagagcatgtgtacatatgctttcgtatgtactcacacagtatgtctctagtatatattgtgggagtagatatatagatattcaaaggcaatgaaatattgctctccagatatatatgtatataaatagtgttgatataactgtatatacacatgtatatgtatgagttttaaatggcaatcttttacatttagcaaaatgctgcccctactggaatattgtcactgcagtggcagttgtatgtaatgatttaaaatacattatcaaaagttatttaaagaacatttaaagtctcatctaaagacatccacacactatttatttatcttccttttccttttattgttgtgtttttcttaactgaaagggagactgtcattttaaaaatgccatctgtcccatgagagtaagaaagagctggagattcacttgaggagctttgtgcatttttcctctctctgaagtggagatgttccacagaccagactgtttatttcacttataaagcaatcctaatatttccgttagtgtatgtcagccaccatctcctagatcaacttaattcaccaatttgcctcctcctttcattaataaataatgattattgagatcattttgcctgggggaagttaactactcccatgctgcagggaaatatatcacctaattgttattttgccttgttcaaaattcaaatttgaaagaaggcagctctctcatgaagctgtcttaagcacattttagttaagggccctcccaaactcttttttctttctttctttctttctttttttttttttttggcgagttccaagttgcatgtgcttgaaatagatttaattcttattccccacagtttaggtatttttcattagtacatcaatttgacacactgaatgcaagactattaaggaagaacgattaaatattattttattttgtgaagagttggcagcagattacatctcaagaacttgcagagagaggaaggtagatggacaatcctaaattgtaagatgttacaaaaaacagtgaagtaagagtactcctgaagactaaaatagagaggctggggtttgagccattttactgagtagcttagctggaacctgatatcagaagtagcctttaacaaaaagcctcttggcaattgtatggtactaacaactagagtactgaagtgtaagttgaaaccaagttgcagtgggaaatcaaaggtgaggtagcttatttgaaaccagcaaatgagacaggttggacagttttaaaatctcttctaacaaagaaactgcacggtagcaaggactagcggttctcaaagcccttctttttcagtgttctcattcaccttggcacccaagtatgtttaacaggccatgcattaaaaataaatacaaaaatataaaagccgcttaaagggaacttacaaactgacaatctctcctctgtatttgtgttcatagtggctgggagtttaattatatgcacaaaagttaggagccacttgtttctgcacagactgtaggagcaagatgaggagatgggcaggttttggtaagagcccccagttctggtggacaggcatacttgtggcattgggtgcggcattgctgggaggaccacgtcttgggaggcgattgacttttggtttgtaatttccctttaaacaagaagagatggctcacattttccatatatatctcaatgaatgtactgtattactgttttaaaaatttgatgaaataataatgaattggtctccttttgttatctggtccttgtttaatttgtttaagggtttttgtatacaaaagtttacatttttatgtatatttttcttgtgtaaaaactgatgtaatatgtgtatgaaacactgtatgtattatctgtatatagtgtgacaaaatcatttttctttctttcttttggatgtattaataaatcttgctgtgaagtaaaaatttttttaaaaaaaaaaaaaaaaaaaaaaaaaaaaaaaaaaaaaaaaaaaaaaaaaaaaaaaaaaaaaaaaaaaaaaaaaaaaaaaaaaaaaaaaaaaaaaaaaaaaaaaaaacctttggccccccctcgccccctgttttttttaacccggccaagttttttctgccccccccattttggttctttttgcccaattccccctaagggggggggttaaaaaaatcacgggccgggttttaaaaacgggggggtgggaaaaccccgggggttccccaatttaatgcctttgaaaacaaccccctttttcccggttggggaaaataaaaaaggcgcccccccccccccccttccaaaaatttccccaccctataggggcaagggaaatctgacgcgtaaattttttgtaaaatcgggctaatatttttgttaaaaacactttttttttaacccaatgggccccgattggaacaatccctttataacaaaaaaaatcccccgcggagggctttggggtttcttcccattgaaacgagagccctttttaaaggcgggtgccccaccccgaaagggga

SEQ ID NO: 425073 - DNA, 4380 bp, Homo sapiens
  misc_feature (4380)..(4380): n is a, c, g, or t
catttatttccaaaatttttcaaaaaacttttactcagttctgctgttatttattaacttaagagtgctcccatccccatatttcagctataggaaaattgtgctacccctgattcatatggaattaaaaaaaaatacatccctttattttgagttttaagttgttattttgctatacatttattactggagtatctggtggtctgaaatagtcaaaagtagagttggtattaaatgttccaatgacatttatttttaatacttaaaaaatcatgtactttgaaatatgtcaaagcaacttctgataatatacctgaatttgtagttgtctcttgagcatcatttacttcatcttagatatagtgaagatctaggaaagctctatatgctgttcttttctacagttgtatttttgcagcatctcctggtttcattcactcttgttttgggatttttttttagatctgcatatttcttgtacatatgcatgcaaatgaaagaagggagtttgtactggtgccatttctcccttcagttgctggttaatgggatttgctagaaaaaattctcccggttgaagggtgaaaacagacccttatgtgtatatctgtacagagatgtgtatatgggatgtggtggcactttgctgaatgtgaacttgccttgtcaatggaaagattgaaaagtattatgtttatttatacatttgtataaatctatatatacacgtatgtatatgtgtgtgtatagataaagctatatacatatatttcccttaaaaatgtgtgtgtataataggtaaacagcctttgttaagcaagattaatgtctatggaaagttctggattattctgtaagccagaggaggtgacagtctagagtacatcatcagaacatactaaaatggaagtcctttggattatagttttgtttatggatattacacaatgaatgcttgtctgaacagttcttacttgccagttccactattcttcatcttcaccaccttctactggtcagtctttcatcacttaaaaaaaaaaaatcacacatcattgtggtttttttcccccttaattctgtctcttctagccagaagcatctggcttaagcatatttcatcaacttctctgttatttcttttaaagatctttatctctgaaattttcccagaagatacaagttttggtaatattatcaataggaattttgagacttgggcattcatctttgtctcaaaaacaaacagaaagccaaccttcaaataaaacaaatttgaaagttttagctcaataatttggggacattttacttaaattacaaaagaacataattatgattttatgatcgatattagtgttaggtttatttccacacttactgtcattaatttgtcatttacatatttttatttgctttgtagtttaatcataacttcaccatttacattttaatggaaagcatacaaggtcacatgttagcctcttgaattctgtaactaactcatttttctcatgatgaaactgctttgatgaattcctgtgtgatgaattctgctatatttccttttgacttttctcagtttgtgacattctgtattaactttgctgcagctctctagaaaacttgcatccctatatattgtgcctttaaagctcttatgcacacacagacaaaagtgtatatatacatgtcagagcatgtgtacatatgctttcgtatgtactcacacagtatgtctctagtatatattgtgggagtagatatatagatattcaaaggcaatgaaatattgctctccagatatatatgtatataaatagtgttgatataactgtatatacacatgtatatgtatgagttttaaatggcaatcttttacatttagcaaaatgctgcccctactggaatattgtcactgcagtggcagttgtatgtaatgatttaaaatacattatcaaaagttatttaaagaacatttaaagtctcatctaaagacatccacacactatttatttatcttccttttccttttattgttgtgtttttcttaactgaaagggagactgtcattttaaaaatgccatctgtcccatgagagtaagaaagagctggagattcacttgaggagctttgtgcatttttcctctctctgaagtggagatgttccacagaccagactgtttatttcacttataaagcaatcctaatatttccgttagtgtatgtcagccaccatctcctagatcaacttaattcaccaatttgcctcctcctttcattaataaataatgattattgagatcattttgcctgggggaagttaactactcccatgctgcagggaaatatatcacctaattgttattttgccttgttcaaaattcaaatttgaaagaaggcagctctctcatgaagctgtcttaagcacattttagttaagggccctcccaaactcttttttctttctttctttctttctttttttttttttttggcgagttccaagttgcatgtgcttgaaatagatttaattcttattccccacagtttaggtatttttcattagtacatcaatttgacacactgaatgcaagactattaaggaagaacgattaaatattattttattttgtgaagagttggcagcagattacatctcaagaacttgcagagagaggaaggtagatggacaatcctaaattgtaagatgttacaaaaaacagtgaagtaagagtactcctgaagactaaaatagagaggctggggtttgagccattttactgagtagcttagctggaacctgatatcagaagtagcctttaacaaaaagcctcttggcaattgtatggtactaacaactagagtactgaagtgtaagttgaaaccaagttgcagtgggaaatcaaaggtgaggtagcttatttgaaaccagcaaatgagacaggttggacagttttaaaatctcttctaacaaagaaactgcacggtagcaaggactagcggttctcaaagcccttctttttcagtgttctcattcaccttggcacccaagtatgtttaacaggccatgcattaaaaataaatacaaaaatataaaagccgcttaaagggaacttacaaactgacaatctctcctctgtatttgtgttcatagtggctgggagtttaattatatgcatgggcaggttttggtaagagcccccagttctggtggacaggcatacttgtggcattgggtgcggcattgctgggaggaccacgtcttgggaggcgattgacttttggtttgtaatttccctttaaacaagaagagatggctcacattttccatatatatctcaatgaatgtactgtattactgttttaaaaatttgatgaaataataatgaattggtctccttttgttatctggtccttgtttaatttgtttaagggtttttgtatacaaaagtttacatttttatgtatatttttcttgtgtaaaaactgatgtaatatgtgtatgaaacactgtatgtattatctgtatatagtgtgacaaaatcatttttctttctttcttttggatgtattaataaatcttgctgtgaagtaaaaaaaaaacacacaaaaaccaacacaacaaacacacacacacacccaacaccaacacacgaccaaccacaacccacaaacaacaacacaaacacaaaaacaagacacacaaacagcaccaccccaccacccaccaccaaccaccacaacaccccaacgaccaacaacaaacaaccaccccagcacaaaccaaaacacaccacggcggggccgcaacccactccacaccgggagacacccaaaccactacagaccaactaacacgacgaagcacaagacagccccctgcaccgaccggataccaacgtccactacacagacaacgccgcaccaacgacacaaccaaaccgaggagcgaagaaacacaacaccgcaagcagacgctaacaagagaaccaaccaccccaccgcgggacaccaacacagccagacccccaccacccagcaaactccccacaccgaccacacaaaacgcacccgccagccgcaggcaccacacacaaacgtccgcccacctccatacctcccccgccagccaaacgacacaaaaccaccggcccaagccgatcaagaccgcccagccagcaacaaacaagctgacagacacaaccggagagaacggcgcatccaccacgaacgcaagcagaatcagccaagcccaagccaaccacgtcacccaaagcgcgcaccagaccgccaacaacatcgagacccagcacacacacgccaacaacaccaggccgcaacaactcacccacagcaaagaccaatcatgacacaaan

SEQ ID NO: 425074 - DNA, 2819 bp, Homo sapiens
  misc_feature (2819)..(2819): n is a, c, g, or t
aggcaattgagagatagaactagttctctctctcctgtgcctcttatgcacacacagacaaaagtgtatatatacatgtcagagcatgtgtacatatgctttcgtatgtactcacacagtatgtctctagtatatattgtgggagtagatatatagatattcaaaggcaatgaaatattgctctccagatatatatgtatataaatagtgttgatataactgtatatacacatgtatatgtatgagttttaaatggcaatcttttacatttagcaaaatgctgcccctactggaatattgtcactgcagtggcagttgtatgtaatgatttaaaatacattatcaaaagttatttaaagaacatttaaagtctcatctaaagacatccacacactatttatttatcttccttttccttttattgttgtgtttttcttaactgaaagggagactgtcattttaaaaatgccatctgtcccatgagagtaagaaagagctggagattcacttgaggagctttgtgcatttttcctctctctgaagtggagatgttccacagaccagactgtttatttcacttataaagcaatcctaatatttccgttagtgtatgtcagccaccatctcctagatcaacttaattcaccaatttgcctcctcctttcattaataaataatgattattgagatcattttgcctgggggaagttaactactcccatgctgcagggaaatatatcacctaattgttattttgccttgttcaaaattcaaatttgaaagaaggcagctctctcatgaagctgtcttaagcacattttagttaagggccctcccaaactcttttttctttctttctttctttctttttttttttttttggcgagttccaagttgcatgtgcttgaaatagatttaattcttattccccacagtttaggtatttttcattagtacatcaatttgacacactgaatgcaagactattaaggaagaacgattaaatattattttattttgtgaagagttggcagcagattacatctcaagaacttgcagagagaggaaggtagatggacaatcctaaattgtaagatgttacaaaaaacagtgaagtaagagtactcctgaagactaaaatagagaggctggggtttgagccattttactgagtagcttagctggaacctgatatcagaagtagcctttaacaaaaagcctcttggcaattgtatggtactaacaactagagtactgaagtgtaagttgaaaccaagttgcagtgggaaatcaaaggtgaggtagcttatttgaaaccagcaaatgagacaggttggacagttttaaaatctcttctaacaaagaaactgcacggtagcaaggactagcggttctcaaagcccttctttttcagtgttctcattcaccttggcacccaagtatgtttaacaggccatgcattaaaaataaatacaaaaatataaaagccgcttaaagggaacttacaaactgacaatctctcctctgtatttgtgttcatagtggctgggagtttaattatatgcacaaaagttaggagccacttgtttctgcacagactgtaggagcaagatgaggagatgggcaggttttggtaagagcccccagttctggtggacaggcatacttgtggcattgggtgcggcattgctgggaggaccacgtcttgggaggcgattgacttttggtttgtaatttccctttaaacaagaagagatggctcacattttccatatatatctcaatgaatgtactgtattactgttttaaaaatttgatgaaataataatgaattggtctccttttgttatctggtccttgtttaatttgtttaagggtttttgtatacaaaagtttacatttttatgtatatttttcttgtgtaaaaactgatgtaatatgtgtatgaaacactgtatgtattatctgtatatagtgtgacaaaatcatttttctttctttcttttggatgtattaataaatcttgctgtgaagtaaaaaaaaaacacacaaaaaccaacacaacaaacacacacacacacccaacaccaacacacgaccaaccacaacccacaaacaacaacacaaacacaaaaacaagacacacaaacagcaccaccccaccacccaccaccaaccaccacaacaccccaacgaccaacaacaaacaaccaccccagcacaaaccaaaacacaccacggcggggccgcaacccactccacaccgggagacacccaaaccactacagaccaactaacacgacgaagcacaagacagccccctgcaccgaccggataccaacgtccactacacagacaacgccgcaccaacgacacaaccaaaccgaggagcgaagaaacacaacaccgcaagcagacgctaacaagagaaccaaccaccccaccgcgggacaccaacacagccagacccccaccacccagcaaactccccacaccgaccacacaaaacgcacccgccagccgcaggcaccacacacaaacgtccgcccacctccatacctcccccgccagccaaacgacacaaaaccaccggcccaagccgatcaagaccgcccagccagcaacaaacaagctgacagacacaaccggagagaacggcgcatccaccacgaacgcaagcagaatcagccaagcccaagccaaccacgtcacccaaagcgcgcaccagaccgccaacaacatcgagacccagcacacacacgccaacaacaccaggccgcaacaactcacccacagcaaagaccaatcatgacacaaan

SEQ ID NO: 425075 - DNA, 1075 bp, Homo sapiens
tcggcaaggcaagtccactggcctgtgcatcggacctctgagtaaaccaacatgtgtcagactgtggacatgcaagaatacttttctgtggacagagttcacagaccgcactttggcacgttgtcctcactgcaggaaagtgtcatctattgggcgcagatacccacgtaagagatgtatctgctgcttcttgcttggcttgcttttggcagtcactgccactggccttgcctttggcacatggaagcatgcacggcgatatggaggcatctatgcagcctgggcatttgtcatcctgttggctgtgctgtgtttgggccgggctctttattgggcctgtatgaaggtcagccaccctgtccagaacttctcctgagcctgatgacccacagactgtgcctggcccctccctggtggggacagtgacactacgaagggagctggggtagttaaaggctcccggggcttctagaaggaagccaagcagctgccttccttttccctggggagaggtaggaaggaaccaggccctcacttaggtttggaggggcagataagagcactgctgaccatctgctttcctccaagggttgctgtgtctagggtgaagtaggcaaaacgttgcccttaaaactgggccctgaagacggttccagccttgtccttcctgtgtgctccctgagagccattcctgtcccttacacattccagggcagggtgggggtgggtagccctgggggttcccctccctcttgtgcaccattaggactttgctgctgctattgcacttcaccagaggttggctctggcctcagtaccctcagtctcctctccccacattgtgtcctgtgggggtggggtcagccgctgctctgtacagaaccacaggaactgatgtgtatataactatttaatgtgggatatgttcccctattcctgtatttcccttaattcctcctcccgaccttttttacccccccagttgcagtatttaactgggctgggtagggttgctcagtctttgggggaggttagggacttatcctgtgcttgtaaataaataaggtcatgactc

SEQ ID NO: 425076 - DNA, 756 bp, Homo sapiens
cacgtgctgctagacggaacggggcggggcaggccacctgtccagaacttctcctgagcctgatgacccacagactgtgcctggcccctccctggtggggacagtgacactacgaagggagctggggtagttaaaggctcccggggcttctagaaggaagccaagcagctgccttccttttccctggggagaggtaggaaggaaccaggccctcacttaggtttggaggggcagataagagcactgctgaccatctgctttcctccaagggttgctgtgtctagggtgaagtaggcaaaacgttgcccttaaaactgggccctgaagacggttccagccttgtccttcctgtgtgctccctgagagccattcctgtcccttacacattccagggcagggtgggggtgggtagccctgggggttcccctccctcttgtgcaccattaggactttgctgctgctattgcacttcaccagaggttggctctggcctcagtaccctcagtctcctctccccacattgtgtcctgtgggggtggggtcagccgctgctctgtacagaaccacaggaactgatgtgtatataactatttaatgtgggatatgttcccctattcctgtatttcccttaattcctcctcccgaccttttttacccccccagttgcagtatttaactgggctgggtagggttgctcagtctttgggggaggttagggacttatcctgtgcttgtaaataaataaggtcatgactc

SEQ ID NO: 425077 - DNA, 1720 bp, Homo sapiens
cacgtgctgctagacggaacggggcggggcaggccactggttgcggagtgagctgggcgcgcggcgcgcaggcgccctggggacccggtagcggcggtggcggtggcggcggtggcggtggctgcggcgacggcagaggcgaagggagccggatcgccgacctgagcgggaggcggcggtggcggccatggcggcagatggagagcgttccccgctgctgtctgagcccatcgacggtggcgcgggcggcaacggtttagtggggcccggcgggagtggggctgggcccgggggaggcctgaccccctccgcaccaccgtacggagccgcatttcccccgtttcccgaggggcatccagccgtgttgcctggggaggacccacccccctattcacccttaactagcccggacagtgggagtgcccctatgatcacctgccgagtctgccaatctctcatcaacgtggaaggcaagatgcatcagcatgtagtcaaatgtggtgtctgcaatgaagccaccccaatcaagaatgcacccccagggaaaaaatatgttcgatgcccctgtaactgtctccttatctgcaaagtgacatcccaacggattgcatgccctcggccctactgcaaaagaatcatcaacctggggcctgtgcatcccggacctctgagtccagaaccccaacccatgggtgtcagggttatctgtggacattgcaagaatacttttctgtggacagagttcacagaccgcactttggcacgttgtcctcactgcaggaaagtgtcatctattgggcgcagatacccacgtaagagatgtatctgctgcttcttgcttggcttgcttttggcagtcactgccactggccttgcctttggcacatggaagcatgcacggcgatatggaggcatctatgcagcctgggcatttgtcatcctgttggctgtgctgtgtttgggccgggctctttattgggcctgtatgaaggtcagccaccctgtccagaacttctcctgagcctgatgacccacagactgtgcctggcccctccctggtggggacagtgacactacgaagggagctggggtagttaaaggctcccggggcttctagaaggaagccaagcagctgccttccttttccctggggagaggtaggaaggaaccaggccctcacttaggtttggaggggcagataagagcactgctgaccatctgctttcctccaagggttgctgtgtctagggtgaagtaggcaaaacgttgcccttaaaactgggccctgaagacggttccagccttgtccttcctgtgtgctccctgagagccattcctgtcccttacacattccagggcagggtgggggtgggtagccctgggggttcccctccctcttgtgcaccattaggactttgctgctgctattgcacttcaccagaggttggctctggcctcagtaccctcagtctcctctccccacattgtgtcctgtgggggtggggtcagccgctgctctgtacagaaccacaggaactgatgtgtatataactatttaatgtgggatatgttcccctattcctgtatttcccttaattcctcctcccgaccttttttacccccccagttgcagtatttaactgggctgggtagggttgctcagtctttgggggaggttagggacttatcctgtgcttgtaaataaataaggtcatgactc

SEQ ID NO: 425078 - DNA, 3562 bp, Homo sapiens
cacgtgctgctagacggaacggggcggggcaggccactggttgcggagtgagctgggcgcgcggcgcgcaggcgccctggggacccggtagcggcggtggcggtggcggcggtggcggtggctgcggcgacggcagaggcgaagggagccggatcgccgacctgagcgggaggcggcggtggcggccatggcggcagatggagagcgttccccgctgctgtctgagcccatcgacggtggcgcgggcggcaacggtttagtggggcccggcgggagtggggctgggcccgggggaggcctgaccccctccgcaccaccgtacggagccggtaaacatgccccgccccagggtaagccggggcgggtccgaggtgctccccggggtactctgaaagccggggagggggcgggaccgagggcggaggcgggtcccagtcgccaggtgcgggactgctgcacctgtgactgggcgaggcttccttccctccgtaatcgcgaccacagcctagggacggaagggggttctgagcaacctgatagaagtgccaattatgagaagccctccgagcttggtcagagggttgaagatcagaaggacttccctaccaccgtggagcatcagtgggggtgtaagtgatcccagcccttctatttgcttcctctccagcatttcccccgtttcccgaggggcatccagccgtgttgcctggggaggacccacccccctattcacccttaactagcccggacagtgggagtgcccctatgatcacctgccgagtctgccaatctctcatcaacgtggaaggcaagatgcatcagcatgtagtcaaatgtggtgtctgcaatgaagccaccgtgagttacacatatctatgaaatgggccctgtttcctggatcctctttctgatgtcttggttctagaccctgaccttccggctattagccaagtgcttttgatgatacccaggtttcagttccaggtgtctcacacagccatttccccagaagccactcaccaaagctaatgttcactttctctcacttttacacctagcctagttcctatttgcaaatctcatgatatagtctttcttttatttctccttcctggttagcaccttatttttctgatctcataaagtgtttttggagggaagtggaggggattgggattagaggtttgcttgctgatgaccctattattctctagccaatcaagaatgcacccccagggaaaaaatatgttcgatgcccctgtaactgtctccttatctgcaaagtgacatcccaacggattgcatgccctcggccctactggtaagaggcataaggtggggaagggcctaagtggggaactggaaagtcaaaaaaggatgagcgtatacagagaatgtaaaggtgagagagcctagtgtttatttaggagaaaaggctttgaagcatgtgcctcaggaatgttatagctgtctttctcgtttctcaataaaaatattgagatgaaatgatgtcgtttcggagaatagagagccttggggactgggtgtgttatcctgaggtcggaggggaattggggacctgaagtttaaacagtgctctttctttctcaaggattcttgagggtatacagttgggggacagagtatcttaagtacagagaagtcgagtgacttaatagacagggagtgggggatgtggaacagggactgtgaagatttttaggattaaaaatttttcaaacacaagtttgaaaatacaagtctttttcttttgtatagcaaaagaatcatcaacctggggcctgtgcatcccggacctctgagtccagaaccccaacccatgggtgtcagggttatctgtggacattgcaagaatacttttctggtgaggaaggggtattgggaaggggaggggaaaggagactaagagtcatttcgagtatatttcttagagtaatggtaatgacccctgaaaggtctgtcctatgggaacatgttctgcatccccaccccaaggttctcattgagggagaccctgcttgtgctattatttttgttttctttctccatagtggacagagttcacagaccgcactttggcacgttgtcctcactgcaggaaagtgtcatctattgggcgcagatacccacgtaagagatgtatctgctgcttcttgcttggcttgcttttggcagtcactgccactggccttgccgtgagtacccttgccccaacctctttcattctgcagcctcatctccataggctaagatttgggaaactgctaccctaaaaaaaagtggaagaaacttgggggactagtttgttttgttttaagatatggatgagctaaagtgcaaagtggctgatcaaacagactttattactactacaagagtgaaaaacagccttcctttctctgtaggatgaggataggacagtgaaattcttaatttaagagttgctatttttcaaacctggctcagttgtcagatattaagaaaaactgagatacagtgtgggatgggatgagtatgttacgcctaagggaaggaagctgatcagctctgcctttaagaaggtccctgagggtggctacatgtggataaggaacaaggactgaagcgtgagttattactgttcttagaactaataggaggtagtggagaccaacattaaccccatctttcttttcttctccctccttatcttcatcagtttggcacatggaagcatgcacggcgatatggaggcatctatgcagcctgggcatttgtcatcctgttggctgtgctgtgtttgggccgggctctttattgggcctgtatgaaggtcagccaccctgtccagaacttctcctgagcctgatgacccacagactgtgcctggcccctccctggtggggacagtgacactacgaagggagctggggtagttaaaggctcccggggcttctagaaggaagccaagcagctgccttccttttccctggggagaggtaggaaggaaccaggccctcacttaggtttggaggggcagataagagcactgctgaccatctgctttcctccaagggttgctgtgtctagggtgaagtaggcaaaacgttgcccttaaaactgggccctgaagacggttccagccttgtccttcctgtgtgctccctgagagccattcctgtcccttacacattccagggcagggtgggggtgggtagccctgggggttcccctccctcttgtgcaccattaggactttgctgctgctattgcacttcaccagaggttggctctggcctcagtaccctcagtctcctctccccacattgtgtcctgtgggggtggggtcagccgctgctctgtacagaaccacaggaactgatgtgtatataactatttaatgtgggatatgttcccctattcctgtatttcccttaattcctcctcccgaccttttttacccccccagttgcagtatttaactgggctgggtagggttgctcagtctttgggggaggttagggacttatcctgtgcttgtaaataaataaggtcatgactc

SEQ ID NO: 425079 - DNA, 1741 bp, Homo sapiens
cacgtgctgctagacggaacggggcggggcaggccactggttgcggagtgagctgggcgcgcggcgcgcaggcgccctggggacccggtagcggcggtggcggtggcggcggtggcggtggctgcggcgacggcagaggcgaagggagccggatcgccgacctgagcgggaggcggcggtggcggccatggcggcagatggagagcgttccccgctgctgtctgagcccatcgacggtggcgcgggcggcaacggtttagtggggcccggcgggagtggggctgggcccgggggaggcctgaccccctccgcaccaccgtacggagccggtaaacatgccccgccccaggcatttcccccgtttcccgaggggcatccagccgtgttgcctggggaggacccacccccctattcacccttaactagcccggacagtgggagtgcccctatgatcacctgccgagtctgccaatctctcatcaacgtggaaggcaagatgcatcagcatgtagtcaaatgtggtgtctgcaatgaagccaccccaatcaagaatgcacccccagggaaaaaatatgttcgatgcccctgtaactgtctccttatctgcaaagtgacatcccaacggattgcatgccctcggccctactgcaaaagaatcatcaacctggggcctgtgcatcccggacctctgagtccagaaccccaacccatgggtgtcagggttatctgtggacattgcaagaatacttttctgtggacagagttcacagaccgcactttggcacgttgtcctcactgcaggaaagtgtcatctattgggcgcagatacccacgtaagagatgtatctgctgcttcttgcttggcttgcttttggcagtcactgccactggccttgcctttggcacatggaagcatgcacggcgatatggaggcatctatgcagcctgggcatttgtcatcctgttggctgtgctgtgtttgggccgggctctttattgggcctgtatgaaggtcagccaccctgtccagaacttctcctgagcctgatgacccacagactgtgcctggcccctccctggtggggacagtgacactacgaagggagctggggtagttaaaggctcccggggcttctagaaggaagccaagcagctgccttccttttccctggggagaggtaggaaggaaccaggccctcacttaggtttggaggggcagataagagcactgctgaccatctgctttcctccaagggttgctgtgtctagggtgaagtaggcaaaacgttgcccttaaaactgggccctgaagacggttccagccttgtccttcctgtgtgctccctgagagccattcctgtcccttacacattccagggcagggtgggggtgggtagccctgggggttcccctccctcttgtgcaccattaggactttgctgctgctattgcacttcaccagaggttggctctggcctcagtaccctcagtctcctctccccacattgtgtcctgtgggggtggggtcagccgctgctctgtacagaaccacaggaactgatgtgtatataactatttaatgtgggatatgttcccctattcctgtatttcccttaattcctcctcccgaccttttttacccccccagttgcagtatttaactgggctgggtagggttgctcagtctttgggggaggttagggacttatcctgtgcttgtaaataaataaggtcatgactc

SEQ ID NO: 425080 - DNA, 1620 bp, Homo sapiens
cacgtgctgctagacggaacggggcggggcaggccactggttgcggagtgagctgggcgcgcggcgcgcaggcgccctggggacccggtagcggcggtggcggtggcggcggtggcggtggctgcggcgacggcagaggcgaagggagccggatcgccgactgggcccgggggaggcctgaccccctccgcaccaccgtacggagccggtaaacatgccccgccccaggcatttcccccgtttcccgaggggcatccagccgtgttgcctggggaggacccacccccctattcacccttaactagcccggacagtgggagtgcccctatgatcacctgccgagtctgccaatctctcatcaacgtggaaggcaagatgcatcagcatgtagtcaaatgtggtgtctgcaatgaagccaccccaatcaagaatgcacccccagggaaaaaatatgttcgatgcccctgtaactgtctccttatctgcaaagtgacatcccaacggattgcatgccctcggccctactgcaaaagaatcatcaacctggggcctgtgcatcccggacctctgagtccagaaccccaacccatgggtgtcagggttatctgtggacattgcaagaatacttttctgtggacagagttcacagaccgcactttggcacgttgtcctcactgcaggaaagtgtcatctattgggcgcagatacccacgtaagagatgtatctgctgcttcttgcttggcttgcttttggcagtcactgccactggccttgcctttggcacatggaagcatgcacggcgatatggaggcatctatgcagcctgggcatttgtcatcctgttggctgtgctgtgtttgggccgggctctttattgggcctgtatgaaggtcagccaccctgtccagaacttctcctgagcctgatgacccacagactgtgcctggcccctccctggtggggacagtgacactacgaagggagctggggtagttaaaggctcccggggcttctagaaggaagccaagcagctgccttccttttccctggggagaggtaggaaggaaccaggccctcacttaggtttggaggggcagataagagcactgctgaccatctgctttcctccaagggttgctgtgtctagggtgaagtaggcaaaacgttgcccttaaaactgggccctgaagacggttccagccttgtccttcctgtgtgctccctgagagccattcctgtcccttacacattccagggcagggtgggggtgggtagccctgggggttcccctccctcttgtgcaccattaggactttgctgctgctattgcacttcaccagaggttggctctggcctcagtaccctcagtctcctctccccacattgtgtcctgtgggggtggggtcagccgctgctctgtacagaaccacaggaactgatgtgtatataactatttaatgtgggatatgttcccctattcctgtatttcccttaattcctcctcccgaccttttttacccccccagttgcagtatttaactgggctgggtagggttgctcagtctttgggggaggttagggacttatcctgtgcttgtaaataaataaggtcatgactc

SEQ ID NO: 425081 - DNA, 2414 bp, Homo sapiens
cacgtgctgctagacggaacggggcggggcaggccactggttgcggagtgagctgggcgcgcggcgcgcaggcgccctggggacccggtagcggcggtggcggtggcggcggtggcggtggctgcggcgacggcagaggcgaagggagccggatcgccgacctgagcgggaggcggcggtggcggccatggcggcagatggagagcgttccccgctgctgtctgagcccatcgacggtggcgcgggcggcaacggtttagtggggcccggcgggagtggggctgggcccgggggaggcctgaccccctccgcaccaccgtacggagccggtaaacatgccccgccccagggtaagccggggcgggtccgaggtgctccccggggtactctgaaagccggggagggggcgggaccgagggcggaggcgggtcccagtcgccaggtgcgggactgctgcacctgtgactgggcgaggcttccttccctccgtaatcgcgaccacagcctagggacggaagggggttctgagcaacctgatagaagtgccaattatgagaagccctccgagcttggtcagagggttgaagatcagaaggacttccctaccaccgtggagcatcagtgggggtgtaagtgatcccagcccttctatttgcttcctctccagcatttcccccgtttcccgaggggcatccagccgtgttgcctggggaggacccacccccctattcacccttaactagcccggacagtgggagtgcccctatgatcacctgccgagtctgccaatctctcatcaacgtggaaggcaagatgcatcagcatgtagtcaaatgtggtgtctgcaatgaagccaccgtgagttacacatatctatgaaatgggccctgtttcctggatcctctttctgatgtcttggttctagaccctgaccttccggctattagccaagtgcttttgatgatacccaggtttcagttccaggtgtctcacacagccatttccccagaagccactcaccaaagctaatgttcactttctctcacttttacacctagcctagttcctatttgcaaatctcatgatatagtctttcttttatttctccttcctggttagcaccttatttttctgatctcataaagtgtttttggagggaagtggaggggattgggattagaggtttgcttgctgatgaccctattattctctagccaatcaagaatgcacccccagggaaaaaatatgttcgatgcccctgtaactgtctccttatctgcaaagtgacatcccaacggattgcatgccctcggccctactgcaaaagaatcatcaacctggggcctgtgcatcccggacctctgagtccagaaccccaacccatgggtgtcagggttatctgtggacattgcaagaatacttttctgtggacagagttcacagaccgcactttggcacgttgtcctcactgcaggaaagtgtcatctattgggcgcagatacccacgtaagagatgtatctgctgcttcttgcttggcttgcttttggcagtcactgccactggccttgcctttggcacatggaagcatgcacggcgatatggaggcatctatgcagcctgggcatttgtcatcctgttggctgtgctgtgtttgggccgggctctttattgggcctgtatgaaggtcagccaccctgtccagaacttctcctgagcctgatgacccacagactgtgcctggcccctccctggtggggacagtgacactacgaagggagctggggtagttaaaggctcccggggcttctagaaggaagccaagcagctgccttccttttccctggggagaggtaggaaggaaccaggccctcacttaggtttggaggggcagataagagcactgctgaccatctgctttcctccaagggttgctgtgtctagggtgaagtaggcaaaacgttgcccttaaaactgggccctgaagacggttccagccttgtccttcctgtgtgctccctgagagccattcctgtcccttacacattccagggcagggtgggggtgggtagccctgggggttcccctccctcttgtgcaccattaggactttgctgctgctattgcacttcaccagaggttggctctggcctcagtaccctcagtctcctctccccacattgtgtcctgtgggggtggggtcagccgctgctctgtacagaaccacaggaactgatgtgtatataactatttaatgtgggatatgttcccctattcctgtatttcccttaattcctcctcccgaccttttttacccccccagttgcagtatttaactgggctgggtagggttgctcagtctttgggggaggttagggacttatcctgtgcttgtaaataaataaggtcatgactc

SEQ ID NO: 425082 - DNA, 2058 bp, Homo sapiens
cacgtgctgctagacggaacggggcggggcaggccactggttgcggagtgagctgggcgcgcggcgcgcaggcgccctggggacccggtagcggcggtggcggtggcggcggtggcggtggctgcggcgacggcagaggcgaagggagccggatcgccgacctgagcgggaggcggcggtggcggccatggcggcagatggagagcgttccccgctgctgtctgagcccatcgacggtggcgcgggcggcaacggtttagtggggcccggcgggagtggggctgggcccgggggaggcctgaccccctccgcaccaccgtacggagccggtaaacatgccccgccccagggtaagccggggcgggtccgaggtgctccccggggtactctgaaagccggggagggggcgggaccgagggcggaggcgggtcccagtcgccaggtgcgggactgctgcacctgtgactgggcgaggcttccttccctccgtaatcgcgaccacagcctagggacggaagggggttctgagcaacctgatagaagtgccaattatgagaagccctccgagcttggtcagagggttgaagatcagaaggacttccctaccaccgtggagcatcagtgggggtgtaagtgatcccagcccttctatttgcttcctctccagcatttcccccgtttcccgaggggcatccagccgtgttgcctggggaggacccacccccctattcacccttaactagcccggacagtgggagtgcccctatgatcacctgccgagtctgccaatctctcatcaacgtggaaggcaagatgcatcagcatgtagtcaaatgtggtgtctgcaatgaagccaccccaatcaagaatgcacccccagggaaaaaatatgttcgatgcccctgtaactgtctccttatctgcaaagtgacatcccaacggattgcatgccctcggccctactgcaaaagaatcatcaacctggggcctgtgcatcccggacctctgagtccagaaccccaacccatgggtgtcagggttatctgtggacattgcaagaatacttttctgtggacagagttcacagaccgcactttggcacgttgtcctcactgcaggaaagtgtcatctattgggcgcagatacccacgtaagagatgtatctgctgcttcttgcttggcttgcttttggcagtcactgccactggccttgcctttggcacatggaagcatgcacggcgatatggaggcatctatgcagcctgggcatttgtcatcctgttggctgtgctgtgtttgggccgggctctttattgggcctgtatgaaggtcagccaccctgtccagaacttctcctgagcctgatgacccacagactgtgcctggcccctccctggtggggacagtgacactacgaagggagctggggtagttaaaggctcccggggcttctagaaggaagccaagcagctgccttccttttccctggggagaggtaggaaggaaccaggccctcacttaggtttggaggggcagataagagcactgctgaccatctgctttcctccaagggttgctgtgtctagggtgaagtaggcaaaacgttgcccttaaaactgggccctgaagacggttccagccttgtccttcctgtgtgctccctgagagccattcctgtcccttacacattccagggcagggtgggggtgggtagccctgggggttcccctccctcttgtgcaccattaggactttgctgctgctattgcacttcaccagaggttggctctggcctcagtaccctcagtctcctctccccacattgtgtcctgtgggggtggggtcagccgctgctctgtacagaaccacaggaactgatgtgtatataactatttaatgtgggatatgttcccctattcctgtatttcccttaattcctcctcccgaccttttttacccccccagttgcagtatttaactgggctgggtagggttgctcagtctttgggggaggttagggacttatcctgtgcttgtaaataaataaggtcatgactc

SEQ ID NO: 425083 - DNA, 3059 bp, Homo sapiens
cacgtgctgctagacggaacggggcggggcaggccactggttgcggagtgagctgggcgcgcggcgcgcaggcgccctggggacccggtagcggcggtggcggtggcggcggtggcggtggctgcggcgacggcagaggcgaagggagccggatcgccgacctgagcgggaggcggcggtggcggccatggcggcagatggagagcgttccccgctgctgtctgagcccatcgacggtggcgcgggcggcaacggtttagtggggcccggcgggagtggggctgggcccgggggaggcctgaccccctccgcaccaccgtacggagccggtaaacatgccccgccccagggtaagccggggcgggtccgaggtgctccccggggtactctgaaagccggggagggggcgggaccgagggcggaggcgggtcccagtcgccaggtgcgggactgctgcacctgtgactgggcgaggcttccttccctccgtaatcgcgaccacagcctagggacggaagggggttctgagcaacctgatagaagtgccaattatgagaagccctccgagcttggtcagagggttgaagatcagaaggacttccctaccaccgtggagcatcagtgggggtgtaagtgatcccagcccttctatttgcttcctctccagcatttcccccgtttcccgaggggcatccagccgtgttgcctggggaggacccacccccctattcacccttaactagcccggacagtgggagtgcccctatgatcacctgccgagtctgccaatctctcatcaacgtggaaggcaagatgcatcagcatgtagtcaaatgtggtgtctgcaatgaagccaccgtgagttacacatatctatgaaatgggccctgtttcctggatcctctttctgatgtcttggttctagaccctgaccttccggctattagccaagtgcttttgatgatacccaggtttcagttccaggtgtctcacacagccatttccccagaagccactcaccaaagctaatgttcactttctctcacttttacacctagcctagttcctatttgcaaatctcatgatatagtctttcttttatttctccttcctggttagcaccttatttttctgatctcataaagtgtttttggagggaagtggaggggattgggattagaggtttgcttgctgatgaccctattattctctagccaatcaagaatgcacccccagggaaaaaatatgttcgatgcccctgtaactgtctccttatctgcaaagtgacatcccaacggattgcatgccctcggccctactggtaagaggcataaggtggggaagggcctaagtggggaactggaaagtcaaaaaaggatgagcgtatacagagaatgtaaaggtgagagagcctagtgtttatttaggagaaaaggctttgaagcatgtgcctcaggaatgttatagctgtctttctcgtttctcaataaaaatattgagatgaaatgatgtcgtttcggagaatagagagccttggggactgggtgtgttatcctgaggtcggaggggaattggggacctgaagtttaaacagtgctctttctttctcaaggattcttgagggtatacagttgggggacagagtatcttaagtacagagaagtcgagtgacttaatagacagggagtgggggatgtggaacagggactgtgaagatttttaggattaaaaatttttcaaacacaagtttgaaaatacaagtctttttcttttgtatagcaaaagaatcatcaacctggggcctgtgcatcccggacctctgagtccagaaccccaacccatgggtgtcagggttatctgtggacattgcaagaatacttttctggtgaggaaggggtattgggaaggggaggggaaaggagactaagagtcatttcgagtatatttcttagagtaatggtaatgacccctgaaaggtctgtcctatgggaacatgttctgcatccccaccccaaggttctcattgagggagaccctgcttgtgctattatttttgttttctttctccatagtggacagagttcacagaccgcactttggcacgttgtcctcactgcaggaaagtgtcatctattgggcgcagatacccacgtaagagatgtatctgctgcttcttgcttggcttgcttttggcagtcactgccactggccttgcctttggcacatggaagcatgcacggcgatatggaggcatctatgcagcctgggcatttgtcatcctgttggctgtgctgtgtttgggccgggctctttattgggcctgtatgaaggtcagccaccctgtccagaacttctcctgagcctgatgacccacagactgtgcctggcccctccctggtggggacagtgacactacgaagggagctggggtagttaaaggctcccggggcttctagaaggaagccaagcagctgccttccttttccctggggagaggtaggaaggaaccaggccctcacttaggtttggaggggcagataagagcactgctgaccatctgctttcctccaagggttgctgtgtctagggtgaagtaggcaaaacgttgcccttaaaactgggccctgaagacggttccagccttgtccttcctgtgtgctccctgagagccattcctgtcccttacacattccagggcagggtgggggtgggtagccctgggggttcccctccctcttgtgcaccattaggactttgctgctgctattgcacttcaccagaggttggctctggcctcagtaccctcagtctcctctccccacattgtgtcctgtgggggtggggtcagccgctgctctgtacagaaccacaggaactgatgtgtatataactatttaatgtgggatatgttcccctattcctgtatttcccttaattcctcctcccgaccttttttacccccccagttgcagtatttaactgggctgggtagggttgctcagtctttgggggaggttagggacttatcctgtgcttgtaaataaataaggtcatgactc

SEQ ID NO: 425084 - DNA, 545 bp, Homo sapiens
ccaacccatgggtgtcagggttatctgtggacattgcaagaatacttttctggtgaggaaggggtattgggaaggggaggggaaaggagactaagagtcatttcgagtatatttcttagagtaatggtaatgacccctgaaaggtctgtcctatgggaacatgttctgcatccccaccccaaggttctcattgagggagaccctgcttgtgctattatttttgttttctttctccatagtggacagagttcacagaccgcactttggcacgttgtcctcactgcaggaaagtgtaagtgattagggattgagctggtaattgatgtatggagtaaaaactacaaggccatagaaagcatccatttctatttgcctccccacaggtcatctattgggcgcagatacccacgtaagagatgtatctgctgcttcttgcttggcttgcttttggcagtcactgccactggccttgccgtgagtacccttgccccaacctctttcattctgcagcctcatctccataggctaagatttgggaaactgct

SEQ ID NO: 425085 - DNA, 336 bp, Homo sapiens
gctggtctcgaactcctgacctcaagtgatccacctcccaaagtgctgggattacaggcgtgagccactgtacccagcctactcttctacatcttttacagaaaactatgtaagacaaatgtagagctcaggtgagcacttggtaaccagagtttgagaagtataaattatgctgggactccctctatatgccactctaaacacagctccaccctccataagttaccttgattttcttttttgagacagggtctggctctattgcccaggctggaatgcagtggtagtggcacaatttcactgcaaactccaccttctgagctcaagccatcctcc

SEQ ID NO: 425086 - DNA, 426 bp, Homo sapiens
cgcgtatctataaaaacacaaatacccaagaaatgtaaaacaacaataggttgtttctggatttttctctacattttctttgtgagaaacatactgtgttgtggcacccttgctgcttttttttttttttctctgagatcgtgccactccactccagcctaagtgagagcgagactccatctcaaataaataaagtaaaattgtaaaccattatatattaacataagtaaaccatttagtggaacctgttttcaatgacgaaaacaatgagaaagatggttttgttttcacaaatctgtttggcttaactgacagcttctggattctccttccgaattcaaacttagtgtctccgttcagcttctgaaatgctctagcatatactcagagtggctgtggaaacagcatggaatgttggtgttgtgc

SEQ ID NO: 425087 - DNA, 486 bp, Homo sapiens
gccccctcacctctgatacaccgatcagtctgcgcactggactcgactacacgtaaaattgaggatgtcacatgtacttcagtttgaggataaaagcagaaaagtgaaagatgcaagcatgcaagactcagatacatttgaaatctatgatcctcggaatccagtgaataaaagaaggagggaagaaagcaaaaagctgatgagagagaaaaaagaaagaagataaaatgagaataatgataaccagaacttgctggaaatgtgcctacaatggccttgtaacagccattgttcccaacagcatcacttaggggtgtgaaaagaagtatttttgaacctgttgtctggttttgaaaaacaattatcttgttttgcaaattgtggaatgatgtaagcaaatgcttttggttactggtacatgtgttttttcctagctgaccttttatattgctaaatctgaaataaaataactttccttccacatta

SEQ ID NO: 425088 - DNA, 943 bp, Homo sapiens
gctaggtgcgaggctgggtggtgcccactggacttaaggaagagtgtactcgtaggcggacagctttagtggccggccggccgctctcatcccccgtaaggagcagagtcctttgtactgaccaagatgagcaacatctacatccaggagcctcccacgaatgggaaggttttattgaaaactacagctggagatattgacatagagttgtggtccaaagaagctcctaaagcttgcagaaattttatccaactttgtttggaagcttattatgacaataccatttttcatagagttgtgcctggtttcatagtccaaggcggagatcctactggcacagggagtggtggagagtctatctatggagcgccattcaaagatgaatttcattcacggttgcgttttaatcggagaggactggttgccatggcaaatgctggttctcatgataatggcagccagtttttcttcacactgggtcgagcagatgaacttaacaataagcataccatctttggaaaggttacaggggatacagtatataacatgttgcgactgtcagaagtagacattgatgatgacgaaagaccacataatccacacaaaataaaaagctgtgaggttttgtttaatccttttgatgacatcattccaagggaaattaaaaggctgaaaaaagagaaaccagaggaggaagtaaagaaattgaaacccaaaggcacaaaaaattttagtttactttcatttggagaggaagctgaggaagaagaggaggaagtaaatcgagttagtcagagcatgaagggcaaaagcaaaagtagtcatgacttgcttaaggatgatccacatctcagttctgttccagttgtagaaaggccgtgttaaaggcaacaggggggccccgattgtgtgttggggaaataagtgccgcctgtgaaattgg

SEQ ID NO: 425089 - DNA, 985 bp, Homo sapiens
caggagcctcccacgaatgggaaggttttattgaaaactacagctggatgtagatgttgctcatcttggtcagtacaaaggactctgctccttacgggggatgagcaacatctacatccaggagcctcccacgaatgggaaggttttattgaaaactacagctggagatattgacatagagttgtggtccaaagaagctcctaaagcttgcagaaattttatccaactttgtttggaagcttattatgacaataccatttttcatagagttgtgcctggtttcatagtccaaggcggagatcctactggcacagggagtggtggagagtctatctatggagcgccattcaaagatgaatttcattcacggttgcgttttaatcggagaggactggttgccatggcaaatgctggttctcatgataatggcagccagtttttcttcacactgggtcgagcagatgaacttaacaataagcataccatctttggaaaggttacaggggatacagtatataacatgttgcgactgtcagaagtagacattgatgatgacgaaagaccacataatccacacaaaataaaaagctgtgaggttcgttaatccttttgatgactcattccaagggaaattaaagggtgaaaaaaaaaaaagggggcgttaattttcctcaggagcccacagtgagcgatcacagggatctggaaacacagggccccatagggagcgcgataaagcgagccggcgggtacaagtcggccggccacaggagacgcggacccgggcaggaccaacagtggggccacaggcacaccacagaagaggccaaggcacaaagagcaggctagggacgaaggctaacggacggaggcccaggagacaaacgagactgagcagcacggcggagaggcaagaaggaaagcgagcgagggagaggcacgcacaacagacgcacaccgcacacgacagaagcaacagagagaa

SEQ ID NO: 425090 - DNA, 3369 bp, Homo sapiens
ggagcggtgctcgggtccggtaacaacatggcggcgtccgtgaggggctcctttgggcaggggtagtgtttggtgtccctgtcttgcgtgatattgacaaactgaagctttcctgcaccactggacttaaggaagagtgtactcgtaggcggacagctttagtggccggccggccgctctcatcccccgtaaggagcagagtcctttgtactgaccaagatgagcaacatctacatccaggagcctcccacgaatgggaaggttttattgaaaactacagctggagatattgacatagagttgtggtccaaagaagctcctaaagcttgcagaaattttatccaactttgtttggaagcttattatgacaataccatttttcatagagttgtgcctggtttcatagtccaaggcggagatcctactggcacagggagtggtggagagtctatctatggagcgccattcaaagatgaatttcattcacggttgcgttttaatcggagaggactggttgccatggcaaatgctggttctcatgataatggcagccagtttttcttcacactgggtcgagcagatgaacttaacaataagcataccatctttggaaaggttacaggggatacagtatataacatgttgcgactgtcagaagtagacattgatgatgacgaaagaccacataatccacacaaaataaaaagctgtgaggttttgtttaatccttttgatgacatcattccaagggaaattaaaaggctgaaaaaagagaaaccagaggaggaagtaaagaaattgaaacccaaaggcacaaaaaattttagtttactttcatttggagaggaagctgaggaagaagaggaggaagtaaatcgagttagtcagagcatgaagggcaaaagcaaaagtagtcatgacttgcttaaggatgatccacatctcagttctgttccagttgtagaaagtgaaaaaggtgatgcaccagatttagttgatgatggagaagatgaaagtgcagagcatgatgaatatattgatggtgatgaaaagaacctgatgagagaaagaattgccaaaaaattaaaaaaggacacaagtgcgaatgttaaatcagctggagaaggagaagtggagaagaaatcagtcagccgcagtgaagagctcagaaaagaagcaagacaattaaaacgggaactcttagcagcaaaacaaaaaaaagtagaaaatgcagcaaaacaagcagaaaaaagaagtgaagaggaagaagcccctccagatggtgctgttgccgaatacagaagagaaaagcaaaagtatgaagctttgaggaagcaacagtcaaagaagggaacttcccgggaagatcagacccttgcactgctgaaccagtttaaatctaaactcactcaagcaattgctgaaacgcctgaaaatgacattcctgaaacagaagtagaagatgatgaaggatggatgtcacatgtacttcagtttgaggataaaagcagaaaagtgaaagatgcaagcatgcaagactcagatacatttgaaatctatgatcctcggaatccagtgaataaaagaaggagggaagaaagcaaaaagctgatgagagagaaaaaagaaagaagataaaatgagaataatgataaccagaacttgctggaaatgtgcctacaatggccttgtaacagccattgttcccaacagcatcacttaggggtgtgaaaagaagtatttttgaacctgttgtctggttttgaaaaacaattatcttgttttgcaaattgtggaatgatgtaagcaaatgcttttggttactggtacatgtgttttttcctagctgaccttttatattgctaaatctgaaataaaataactttccttccacattaaaaaaaaaaaacaaaacaacaaaaaaaaaaaaaaaaaaaaaaaacaaaacacacaaaacaaaaacacacaaaaacaaaaaacaagcacagaacacacaacaaaacaaaacaacacaagcgcagacacccacccacccccacgacacacccgcacccaacaggaagagacacactcacacacagacacggcgcatacacgacacccacagcacacaagcacaaccaacaacaaacaacatcacacacagcaacagaacggtagacatcaacacaaaacaaacagcacaccagagaagaaagacacaaaccacactcaggagcagaagacaaaagagaacaacacaacaaacagaaagaaacgagacgacggcaacaaacacacatacacaagcgaaccgaggtgcagacacactacactcctgtcgcacctcacaaaacaagacagtcaccacagagcaagaatcgcaccaagccaaacaggacaccagaaaacaacaagcacaccgcacgatcactcaccaccaatagaccaacaaggacgacaccggacacaaacatcacaaacacgcacagaacaagccaaaacaaacgtaagcacagtagcgccaccaaccaacacacgcaacacaacagacgccagcacacgcacaggactatcgaaaacggcagagcacaccagccacgcaacgacacgacacgaggagaggagcacgccacaccggccggcaacaacaaccacacgccaagcaacacgcaccgagacgcacaggcacacagcacagccccgaacagcaacgaacaacaccaaaggacagccccatcacgacgacgacccaacgacacaggcacacgccacgcaccaagcagcacaccagaaggaacaaaagaaagaaaaagcaggagacggaggaacagagagaggaaggacgaggaaaagaacacacaagagagaggcacgcgaaaagacgaggaggatcggacaagggagacaagacaaccaagagaaaagaggagggcaagagacaaggggaggaacagaggaggacgcgaggacagaacagcagggaccagagaggcacgccggacgcgccgcccgacagcagaagacgcgagggcggcacagccgaggagcaggacgagcggcccgcgacggccagaccggagggggacgaaggggcggagaacgaagaggcacgcgaccccgccagccagcggacagcgggacgaagcgcggggagcgcggcacaacacacacacgagcgaaggcgcgcgcggagaagccaagcgcacagggcacgagcgaagggcaggggcgcgacaacaggcagcgcagggaacacacaaacgcagcaacaacgcaagggagggacaggcgaaagaagcagcgaccgacggagaggcagaagcacgaaaaacaagaacaagagaaggaaaacggaaggagagaagagcaaaaacccacgcacagaag

SEQ ID NO: 425091 - DNA, 1681 bp, Homo sapiens
gagctggtggaaaggctatcacgggattctatttactatagaaggttttattgaaaactacagctggagatattgacatagagttgtggtccaaagaagctcctaaagcttgcagaaattttatccaactttgtttggaagcttattatgacaataccatttttcatagagttgtgcctggtttcatagtccaaggcggagatcctactggcacagggagtggtggagagtctatctatggagcgccattcaaagatgaatttcattcacggttgcgttttaatcggagaggactggttgccatggcaaatgctggttctcatgataatggcagccagtttttcttcacactgggtcgagcagatgaacttaacaataagcataccatctttggaaaggttacaggggatacagtatataacatgttgcgactgtcagaagtagacattgatgatgacgaaagaccacataatccacacaaaataaaaagctgtgaggttttgtttaatccttttgatgacatcattccaagggaaattaaaaggctgaaaaaagagaaaccagaggaggaagtaaagaaattgaaacccaaaggcacaaaaaattttagtttactttcatttggagaggaagctgaggaagaagaggaggaagtaaatcgagttagtcagagcatgaagggcaaaagcaaaagtagtcatgacttgcttaaggatgatccacatctcagttctgttccagttgtagaaagtgaaaaaggtgatgcaccagatttagttgatgatggagaagatgaaagtgcagagcatgatgaatatattgatggtgatgaaaagaacctgatgagagaaagaattgccaaaaaattaaaaaaggacacaagtgcgaatgttaaatcagctggagaaggagaagtggagaagaaatcagtcagccgcagtgaagagctcagaaaagaagcaagacaattaaaacgggaactcttagcagcaaaacaaaaaaaagtagaaaatgcagcaaaacaagcagaaaaaagaagtgaagaggaagaagcccctccagatggtgctgttgccgaatacagaagagaaaagcaaaagtatgaagctttgaggaagcaacagtcaaagaagggaacttcccgggaagatcagacccttgcactgctgaaccagtttaaatctaaactcactcaagcaattgctgaaacgcctgaaaatgacattcctgaaacagaagtagaagatgatgaaggatggatgtcacatgtacttcagtttgaggataaaagcagaaaagtgaaagatgcaagcatgcaagactcagatacatttgaaatctatgatcctcggaatccagtgaataaaagaaggagggaagaaagcaaaaagctgatgagagagaaaaaagaaagaagataaaatgagaataatgataaccagaacttgctggaaatgtgcctacaatggccttgtaacagccattgttcccaacagcatcacttaggggtgtgaaaagaagtatttttgaacctgttgtctggttttgaaaaacaattatcttgttttgcaaattgtggaatgatgtaagcaaatgcttttggttactggtacatgtgttttttcctagctgaccttttatattgctaaatctgaaataaaataactttccttccacatta

SEQ ID NO: 425092 - DNA, 940 bp, Homo sapiens
ctgtagtcccagctactcaggaggctgaggcaggataatcacttgaacctgggaggcagaggttgcagtgagccaagatcacgccactgcactccagcctgggcgacagagcaagactccatctcaaaaaaaaagacacaagtgcgaatgttaaatcagctggagaaggagaagtggagaagaaatcagtcagccgcagtgaagagctcagaaaagaagcaagacaattaaaacgggaactcttagcagcaaaacaaaaaaaagtagaaaatgcagcaaaacaagcagaaaaaagaagtgaagaggaagaagcccctccagatggtgctgttgccgaatacagaagagaaaagcaaaagtatgaagctttgaggaagcaacagtcaaagaagggaacttcccgggaagatcagacccttgcactgctgaaccagtttaaatctaaactcactcaagcaattgctgaaacgcctgaaaatgacattcctgaaacagaagtagaagatgatgaaggatggatgtcacatgtacttcagtttgaggataaaagcagaaaagtgaaagatgcaagcatgcaagactcagatacatttgaaatctatgatcctcggaatccagtgaataaaagaaggagggaagaaagcaaaaagctgatgagagagaaaaaagaaagaagataaaatgagaataatgataaccagaacttgctggaaatgtgcctacaatggccttgtaacagccattgttcccaacagcatcacttaggggtgtgaaaagaagtatttttgaacctgttgtctggttttgaaaaacaattatcttgttttgcaaattgtggaatgatgtaagcaaatgcttttggttactggtacatgtgttttttcctagctgaccttttatattgctaaatctgaaataaaataactttccttccacatta

SEQ ID NO: 425093 - DNA, 657 bp, Homo sapiens
  misc_feature (32)..(33): n is a, c, g, or t
ggcgggggccgcaggcggaccgttagtttggnnggcttcgagtagaccagttgatgtcacatgtacttcagtttgaggataaaagcagaaaagtgaaagatgcaagcatgcaagactcagatacatttgaaatctatgatcctcggaatccagtgaataaaagaaggagggaagaaagcaaaaagctgatgagagagaaaaaagaaagaagataaaatgagaataatgataaccagaacttgctggaaatgtgcctacaatggccttgtaacagccattgttcccaacagcatcacttaggggtgtgaaaagaagtatttttgaacctgttgtctggttttgaaaaacaattatcttgttttgcaaattgtggaatgatgtaagcaaatgcttttggttactggtacatgtgttttttcctagctgaccttttatattgctaaatctgaaataaaataactttccttccacattacatgttaaccattgcagactgcaagcctgtttgtgtccttttaccctaaaatatatgaaggcttccttttcaagatttttttataagaagttcctacagaaagaatatttgtgggaaacctccctttcactaacttcagaatataataaaatattataaataaaatatagaatataaatatg

SEQ ID NO: 425094 - DNA, 1898 bp, Homo sapiens
ggagcggtgctcgggtccggtaacaacatggcggcgtccgtgaggggctcctttgggcaggggtagtgtttggtgtccctgtcttgcgtgatattgacaaactgaagctttcctgcaccactggacttaaggaagagtgtactcgtaggcggacagctttagtggccggccggccgctctcatcccccgtaaggagcagagtcctttgtactgaccaagatgagcaacatctacatccaggagcctcccacgaatgggaaggttttattgaaaactacagctggagatattgacatagagttgtggtccaaagaagctcctaaagcttgcagaaattttatccaactttgtttggaagcttattatgacaataccatttttcatagagttgtgcctggtttcatagtccaaggcggagatcctactggcacagggagtggtggagagtctatctatggagcgccattcaaagatgaatttcattcacggttgcgttttaatcggagaggactggttgccatggcaaatgctggttctcatgataatggcagccagtttttcttcacactgggtcgagcagatgaacttaacaataagcataccatctttggaaaggttacaggggatacagtatataacatgttgcgactgtcagaagtagacattgatgatgacgaaagaccacataatccacacaaaataaaaagctgtgaggttttgtttaatccttttgatgacatcattccaagggaaattaaaaggctgaaaaaagagaaaccagaggaggaagtaaagaaattgaaacccaaaggcacaaaaaattttagtttactttcatttggagaggaagctgaggaagaagaggaggaagtaaatcgagttagtcagagcatgaagggcaaaagcaaaagtagtcatgacttgcttaaggatgatccacatctcagttctgttccagttgtagaaagtgaaaaaggtgatgcaccagatttagttgatgatggagaagatgaaagtgcagagcatgatgaatatattgatggtgatgaaaagaacctgatgagagaaagaattgccaaaaaattaaaaaaggacacaagtgcgaatgttaaatcagctggagaaggagaagtggagaagaaatcagtcagccgcagtgaagagctcagaaaagaagcaagacaattaaaacgggaactcttagcagcaaaacaaaaaaaagtagaaaatgcagcaaaacaagcagaaaaaagaagtgaagaggaagaagcccctccagatggtgctgttgccgaatacagaagagaaaagcaaaagtatgaagctttgaggaagcaacagtcaaagaagggaacttcccgggaagatcagacccttgcactgctgaaccagtttaaatctaaactcactcaagcaattgctgaaacgcctgaaaatgacattcctgaaacagaagtagaagatgatgaaggatggatgtcacatgtacttcagtttgaggataaaagcagaaaagtgaaagatgcaagcatgcaagactcagatacatttgaaatctatgatcctcggaatccagtgaataaaagaaggagggaagaaagcaaaaagctgatgagagagaaaaaagaaagaagataaaatgagaataatgataaccagaacttgctggaaatgtgcctacaatggccttgtaacagccattgttcccaacagcatcacttaggggtgtgaaaagaagtatttttgaacctgttgtctggttttgaaaaacaattatcttgttttgcaaattgtggaatgatgtaagcaaatgcttttggttactggtacatgtgttttttcctagctgaccttttatattgctaaatctgaaataaaataactttccttccacatta

SEQ ID NO: 425095 - DNA, 1957 bp, Homo sapiens
gccccctcacctctgatacaccgatcagtctgcgcactggactcgactacacgtaaaattgaggatgtcacatgtacttcagtttgaggataaaagcagaaaagtgaaagatgcaagcatgcaagactcagatacatttgaaatctatgatcctcggaatccagtgaataaaagaaggagggaagaaagcaaaaagctgatgagagagaaaaaagaaagaagataaaatgagaataatgataaccagaacttgctggaaatgtgcctacaatggccttgtaacagccattgttcccaacagcatcacttaggggtgtgaaaagaagtatttttgaacctgttgtctggttttgaaaaacaattatcttgttttgcaaattgtggaatgatgtaagcaaatgcttttggttactggtacatgtgttttttcctagctgaccttttatattgctaaatctgaaataaaataactttccttccacattaaaaaaaaaaaacaaaacaacaaaaaaaaaaaaaaaaaaaaaaaacaaaacacacaaaacaaaaacacacaaaaacaaaaaacaagcacagaacacacaacaaaacaaaacaacacaagcgcagacacccacccacccccacgacacacccgcacccaacaggaagagacacactcacacacagacacggcgcatacacgacacccacagcacacaagcacaaccaacaacaaacaacatcacacacagcaacagaacggtagacatcaacacaaaacaaacagcacaccagagaagaaagacacaaaccacactcaggagcagaagacaaaagagaacaacacaacaaacagaaagaaacgagacgacggcaacaaacacacatacacaagcgaaccgaggtgcagacacactacactcctgtcgcacctcacaaaacaagacagtcaccacagagcaagaatcgcaccaagccaaacaggacaccagaaaacaacaagcacaccgcacgatcactcaccaccaatagaccaacaaggacgacaccggacacaaacatcacaaacacgcacagaacaagccaaaacaaacgtaagcacagtagcgccaccaaccaacacacgcaacacaacagacgccagcacacgcacaggactatcgaaaacggcagagcacaccagccacgcaacgacacgacacgaggagaggagcacgccacaccggccggcaacaacaaccacacgccaagcaacacgcaccgagacgcacaggcacacagcacagccccgaacagcaacgaacaacaccaaaggacagccccatcacgacgacgacccaacgacacaggcacacgccacgcaccaagcagcacaccagaaggaacaaaagaaagaaaaagcaggagacggaggaacagagagaggaaggacgaggaaaagaacacacaagagagaggcacgcgaaaagacgaggaggatcggacaagggagacaagacaaccaagagaaaagaggagggcaagagacaaggggaggaacagaggaggacgcgaggacagaacagcagggaccagagaggcacgccggacgcgccgcccgacagcagaagacgcgagggcggcacagccgaggagcaggacgagcggcccgcgacggccagaccggagggggacgaaggggcggagaacgaagaggcacgcgaccccgccagccagcggacagcgggacgaagcgcggggagcgcggcacaacacacacacgagcgaaggcgcgcgcggagaagccaagcgcacagggcacgagcgaagggcaggggcgcgacaacaggcagcgcagggaacacacaaacgcagcaacaacgcaagggagggacaggcgaaagaagcagcgaccgacggagaggcagaagcacgaaaaacaagaacaagagaaggaaaacggaaggagagaagagcaaaaacccacgcacagaag

SEQ ID NO: 425096 - DNA, 2080 bp, Homo sapiens
ggagcggtgctcgggtccggtaacaacatggcggcgtccgtgaggggctcctttgggcaggggtagtgtttggtgtccctgtcttgcgtgatattgacaaactgaagctttcctgcaccactggacttaaggaagagtgtactcgtaggcggacagctttagtggccggccggccgctctcatcccccgtaaggagcagagtcctttgtactgaccaagatgagcaacatctacatccaggagcctcccacgaatgggaaggttttattgaaaactacagctggagatattgacatagagttgtggtccaaagaagctcctaaagcttgcagaaattttatccaactttgtttggaagcttattatgacaataccatttttcatagagttgtgcctggtttcatagtccaaggcggagatcctactggcacagggagtggtggagagtctatctatggagcgccattcaaagatgaatttcattcacggttgcgttttaatcggagaggactggttgccatggcaaatgctggttctcatgataatggcagccagtttttcttcacactgggtcgagcagatgaacttaacaataagcataccatctttggaaaggttacaggggatacagtatataacatgttgcgactgtcagaagtagacattgatgatgacgaaagaccacataatccacacaaaataaaaagctgtgaggttttgtttaatccttttgatgacatcattccaagggaaattaaaaggctgaaaaaagagaaaccagaggaggaagtaaagaaattgaaacccaaaggcacaaaaaattttagtttactttcatttggagaggaagctgaggaagaagaggaggaagtaaatcgagttagtcagagcatgaagggcaaaagcaaaagtagtcatgacttgcttaaggatgatccacatctcagttctgttccagttgtagaaagtgaaaaaggtgatgcaccagatttagttgatgatggagaagatgaaagtgcagagcatgatgaatatattgatggtgatgaaaagaacctgatgagagaaagaattgccaaaaaattaaaaaaggacacaagtgcgaatgttaaatcagctggagaaggagaagtggagaagaaatcagtcagccgcagtgaagagctcagaaaagaagcaagacaattaaaacgggaactcttagcagcaaaacaaaaaaaagtagaaaatgcagcaaaacaagcagaaaaaagaagtgaagaggaagaagcccctccagatggtgctgttgccgaatacagaagagaaaagcaaaagtatgaagctttgaggaagcaacagtcaaagaagggaacttcccgggaagatcagacccttgcactgctgaaccagtttaaatctaaactcactcaagcaattgctgaaacgcctgaaaatgacattcctgaaacagaagtagaagatgatgaaggatggatgtcacatgtacttcagtttgaggataaaagcagaaaagtgaaagatgcaagcatgcaagactcagatacatttgaaatctatgatcctcggaatccagtgaataaaagaaggagggaagaaagcaaaaagctgatgagagagaaaaaagaaagaagataaaatgagaataatgataaccagaacttgctggaaatgtgcctacaatggccttgtaacagccattgttcccaacagcatcacttaggggtgtgaaaagaagtatttttgaacctgttgtctggttttgaaaaacaattatcttgttttgcaaattgtggaatgatgtaagcaaatgcttttggttactggtacatgtgttttttcctagctgaccttttatattgctaaatctgaaataaaataactttccttccacattacatgttaaccattgcagactgcaagcctgtttgtgtccttttaccctaaaatatatgaaggcttccttttcaagatttttttataagaagttcctacagaaagaatatttgtgggaaacctccctttcactaacttcagaatataataaaatattataaataaaatatagaatataaatatg

SEQ ID NO: 425097 - DNA, 1970 bp, Homo sapiens
  misc_feature (972)..(974): n is a, c, g, or t
  misc_feature (976)..(976): n is a, c, g, or t
  misc_feature (979)..(981): n is a, c, g, or t
  misc_feature (988)..(988): n is a, c, g, or t
  misc_feature (990)..(991): n is a, c, g, or t
  misc_feature (993)..(993): n is a, c, g, or t
ggagcggtgctcgggtccggtaacaacatggcggcgtccgtgaggggctcctttgggcaggggtagtgtttggtgtccctgtcttgcgtgatattgacaaactgaagctttcctgcaccactggacttaaggaagagtgtactcgtaggcggacagctttagtggccggccggccgctctcatcccccgtaaggagcagagtcctttgtactgaccaagatgagcaacatctacatccaggagcctcccacgaatgggaaggttttattgaaaactacagctggagatattgacatagagttgtggtccaaagaagctcctaaagcttgcagaaattttatccaactttgtttggaagcttattatgacaataccatttttcatagagttgtgcctggtttcatagtccaaggcggagatcctactggcacagggagtggtggagagtctatctatggagcgccattcaaagatgaatttcattcacggttgcgttttaatcggagaggactggttgccatggcaaatgctggttctcatgataatggcagccagtttttcttcacactgggtcgagcagatgaacttaacaataagcataccatctttggaaaggttacaggggatacagtatataacatgttgcgactgtcagaagtagacattgatgatgacgaaagaccacataatccacacaaaataaaaagctgtgaggttttgtttaatccttttgatgacatcattccaagggaaattaaaaggctgaaaaaagagaaaccagaggaggaagtaaagaaattgaaacccaaaggcacaaaaaattttagtttactttcatttggagaggaagctgaggaagaagaggaggaagtaaatcgagttagtcagagcatgaagggcaaaagcaaaagtagtcatgacttgcttaaggatgatccacatctcagttctgttccagttgtagaaagaaannntnatnnnccatttntnnangatggagaagatgaaagtgcagagcatgatgaatatattgatggtgatgaaaagaacctgatgagagaaagaattgccaaaaaattaaaaaaggacacaagtgcgaatgttaaatcagctggagaaggagaagtggagaagaaatcagtcagccgcagtgaagagctcagaaaagaagcaagacaattaaaacgggaactcttagcagcaaaacaaaaaaaagtagaaaatgcagcaaaacaagcagaaaaaagaagtgaagaggaagaagcccctccagatggtgctgttgccgaatacagaagagaaaagcaaaagtatgaagctttgaggaagcaacagtcaaagaagggaacttcccgggaagatcaggatgtcacatgtacttcagtttgaggataaaagcagaaaagtgaaagatgcaagcatgcaagactcagatacatttgaaatctatgatcctcggaatccagtgaataaaagaaggagggaagaaagcaaaaagctgatgagagagaaaaaagaaagaagataaaatgagaataatgataaccagaacttgctggaaatgtgcctacaatggccttgtaacagccattgttcccaacagcatcacttaggggtgtgaaaagaagtatttttgaacctgttgtctggttttgaaaaacaattatcttgttttgcaaattgtggaatgatgtaagcaaatgcttttggttactggtacatgtgttttttcctagctgaccttttatattgctaaatctgaaataaaataactttccttccacattacatgttaaccattgcagactgcaagcctgtttgtgtccttttaccctaaaatatatgaaggcttccttttcaagatttttttataagaagttcctacagaaagaatatttgtgggaaacctccctttcactaacttcagaatataataaaatattataaataaaatatagaatataaatatg

SEQ ID NO: 425098 - DNA, 1060 bp, Homo sapiens
agcggagtttggatagatagccaattagggctagaatggggctgatggaccatgaactacagttaaggaattggctttcattattatgggaatatgtgcaagcttagtagaaatgaaaggctgaaaaagttaaaaagtgaagagctcagaaaagaagcaagacaattaaaacgggaactcttagcagcaaaacaaaaaaaagtagaaaatgcagcaaaacaagcagaaaaaagaagtgaagaggaagaagcccctccagatggtgctgttgccgaatacagaagagaaaagcaaaagtatgaagctttgaggaagcaacagtcaaagaagggaacttcccgggaagatcagacccttgcactgctgaaccagtttaaatctaaactcactcaagcaattgctgaaacgcctgaaaatgacattcctgaaacagaagtagaagatgatgaaggatggatgtcacatgtacttcagtttgaggataaaagcagaaaagtgaaagatgcaagcatgcaagactcagatacatttgaaatctatgatcctcggaatccagtgaataaaagaaggagggaagaaagcaaaaagctgatgagagagaaaaaagaaagaagataaaatgagaataatgataaccagaacttgctggaaatgtgcctacaatggccttgtaacagccattgttcccaacagcatcacttaggggtgtgaaaagaagtatttttgaacctgttgtctggttttgaaaaacaattatcttgttttgcaaattgtggaatgatgtaagcaaatgcttttggttactggtacatgtgttttttcctagctgaccttttatattgctaaatctgaaataaaataactttccttccacattacatgttaaccattgcagactgcaagcctgtttgtgtccttttaccctaaaatatatgaaggcttccttttcaagatttttttataagaagttcctacagaaagaatatttgtgggaaacctccctttcactaacttcagaatataataaaatattataaataaaatatagaatataaatatg

SEQ ID NO: 425099 - DNA, 573 bp, Homo sapiens
aatacagacataatatttttataagtttagagaaatttttattggctaacaaatagtaccttgtgttatgtttgaatgcctttatgttcaactcagtatttttcccccttgttttttttagttcttcaccaaaggacatggatgaaaatgaaagcaaccagtctctgatgacaagcagccaatatcctaaagaagcagtaagaaaacgtcaaaattcagcacggaattccggagcaagtgattcttctaggttttctaggaaaagcttcaaactggattatagactagaagaagatgtaactaaatccaagaaaggaaaagatgggagatttgtgaatccgtggccaacatggaaaaacccctctattccaaatgttctcagatggctgataatggagaaagatcacagcagtgttccaagttctaaagaggtagcgcttggcttttttgagtgctttatatttgctcttcatatatgacactctagttatttgagcccttgtatattaataggggtttgctttaaccccgaaaaaaaaggaacgctttatttttaacctaaggccctaaaat

SEQ ID NO: 425100 - DNA, 5127 bp, Homo sapiens
  misc_feature (3123)..(3123): n is a, c, g, or t
  misc_feature (3131)..(3131): n is a, c, g, or t
tcatcgctgtcgggaacagcgatgactggagcgggctgagagtgggtttcccgtccccgagccctccctcatctcggagatgccgcacttgtgagcgacagggcttcatttgaattttcgcacctcgcgagttgcggagcctgcatctctgaagctgcctcggtgaagagccacagcattattttttttctctttgggagagtagctgtctgggatttgagatcctatcttccctgcaaattaccaggttgcatcttcactgataggaatacatttcttcaccaaaggacatggatgaaaatgaaagcaaccagtctctgatgacaagcagccaatatcctaaagaagcagtaagaaaacgtcaaaattcagcacggaattccggagcaagtgattcttctaggttttctaggaaaagcttcaaactggattatagactagaagaagatgtaactaaatccaagaaaggaaaagatgggagatttgtgaatccgtggccaacatggaaaaacccctctattccaaatgttctcagatggctgataatggagaaagatcacagcagtgttccaagttctaaagaggaactagacaaagaactcccagtgcttaagccatattttatcactaaccctgaagaagctggagtgagggaagctggcttaagagtcacatggctgggacatgccacggtaatggtggaaatggatgagctcatatttctcacggatcccatctttagctctcgtgcttcaccatcgcagtacatgggtccaaagcgatttcgtcgttccccgtgcacaataagtgaactccctccaatagatgcggtccttatcagtcacaaccactatgaccatctggactacaattctgtcattgctttgaatgagcgatttggtaatgagttgagatggtttgtgcctttgggtctccttgactggatgcaaaaatgtggctgtgagaatgtgattgagttggactggtgggaggagaattgtgtccccggacatgataaggtcacttttgtctttacaccttcccagcactggtgtaaaaggactctaatggatgacaacaaggtgctatggggcagctggtctgtcttggggccttggaatcgattttttttcgcaggagatactggttattgccctgcttttgaagagataggaaaaagatttggaccttttgaccttgcagctattcccatcggagcttatgaaccgaggtggtttatgaaataccagcatgtagacccagaagaagctgtaaggattcacactgatgtccaaacaaagaaatctatggcaattcactggggaacttttgccttagcaaatgagcattacttagagcctccagtgaagctgaatgaagctctagagagatacggacttaacgctgaagatttttttgtcttgaagcatggagaatcaagatacctaaataataatgatgaaaacttttaataaatgtgagcacaggcacttttaatgaaaaaggcatcatctaagtttaaaaacaaatgaaaagacttagaaattcatgaatattgtgattattttacatttggaaacaacttctgcaagtttatgttttatgttttgtgtaataacttgcttcctagtatgatcagctcatgtacactatgagagggttcaggggtgggtcatttaaataatgaattggctaatgtggattttaaatttcatatcatgatataagcactgcaatggaaatgtttttactaaaacattatatttttgtggtactagaatttcctgaggtgaaaaaccgatattgaagattcatttttcttttttccattcttcaggaccttcggcaaggtgagtcaaggctctctacctacctagatgtttttcagaggcctacaaatacaagtatctttcttatatgcacattctaataaatgatgaaattcagtccaacatgcttattataaacatagcaattcttgctctatcaaattagcttatatgccaaatattaaatatggtttatttaggtaagcataaaaacataggggctatcatttttaaagacttgattttctctattgtggtaaaatatataaatacatatttgccattttaaacatttaccattttaaccatttttaagtgtacagttctttcgcattaatgcacccatgaccaccattcacttaaatttttaaaagaacagtatattctttttttcctagagccttcagatgagagggaacagtatattctattgcacgtctacaattcccaaaagacctcttactttgggaggccaaggtgggtgggtcacttgaacccaggagtttgacatcaacctgggcaacatggtgacctcccgtctctctcggaaaataaaaaacaaaaaagaaaaagccgggtgaggtggtgtgtacctgtagtcacaggtacttgggaggctgaggtgggaggatcacttgagcccaggagatagaggctgcagtgagctgtgatcgtaccactgcactccagcctgggcgacaaaatgagaccctgtctcaaaagaaagccctctccttagctgagcagaggaagggaaggagtgtggctatgagaatatgatttatgccattttctgtttttaaatctagaagatcttctaagcacaaatacagctacaatgaaatattttacagacaaaatgttaatagaccatattctttgaattaaatttgtttttaattttctctacacattttttttttcctggagtctcttagctctaaatatatcaatcagatttataattttttttacctgattcagatgtcttacatttttatattaaatgaaccttaagcatgattcttttggtaagccagtatgaatgccagtggttggggggcgggggggggagtcagttgacataagatttagtcctaataaggactctgtattcacttgattattctgacccttcctaagggagggaggtggattagataccactggaggcccattctgtattcctaatccagtctcagcactttattcatacaaaataatcaaaataggttttctacaccaaatgctacccaggcagtgctctataatttatttgcacacctgtatgtgnggtgccangttagccactaaatctgaacttttaccctgctttcatcatggatttttttgtgtaacctgaaacaagtcaccaatgctcactgtgcctgtttcctcatttgcaacaagaggataattccgacctacctctgaaaaatgtgtagattaaatgagtttttaaagcactttagaaaatataagggagaaaatgatttcttaagatatcactgcctaatatagacaggtatatttgaaagctaaatacaggttaatgcttttgataatgtattgttcctgttgcaaatttaagcattatatattaggagactaaacattgaaaactttcactgatttttaaattggagtaatagcctaaataagtgtaaataatctttatcaaaatttagtgtttatctacaaagatgcgaatcagtcaaggggaaatgtgtatgcaatgtgtgtgtatatgatgtatgcgaacatatgtgattttggggtactaaagcacaaaaaaatcccccataaaataaaccttcctgaaaagactgatcataaactttttcactccaagcagatgtgaatcaagatgttaggtttatggtgagttagctttgaggtgtgttgccctaatactagccagcgttgttgtagccatattccctgctgctgcacgccgaattgaaaatccatctcttacctcttctctatgaagcaagccaggtatgtcttgcttaagtatttcttctccatgaatggccttaacattattttgtattcacgtgtactgtttaactgagggtctcaaagcactttaaactgttgtgttctatttccactcgtctggcctgcctcatttttctaggcccttttgtaagctgtaattttttattaccactcatgttctttctacactgacactattcattaagaacatcaagcttcatctctgcttacagaatctcaccttattgagtgggttccactttatttttcatttgttatctacattttgaagggtttatgtgcaaagtgaaaacaaattttgaaaaataagacaaatccattctcttcttcaattcagtctaatatgcattgtagtgtcttttaatcagtcttatcctctaagtcaacttcattttcctctttgtgaatacccatagcaatatgtaagattttattgaagtttcctgtgataactgaggaacactttgctatgcctcactgcccaatagggtgggtcatcaattaggagaaatcccaaattataaaagccaacatatgccgtgacctacgtaggaaaagatgtatttgtgcatcttctttctgggtagttaaaaattactccctcttttctctagcattttgacatttcagactcaatgctctgatctctagggagtgtgattattcaaactaatgagaggacaagaagacacagttttagaatctactgctgctaaagcacattaaaaacaaatcctggtttttaatgtatgcatagtttcatatttaatgaatatgctttcattaaatagggaggtagatttgaaaaaactgttataaagaaatgtgccttttggggaatgaatacttttgttcatgtctagcccactgggaattttgttttcaccttatactgagtcctttttctaatgtaaaaatatttcttccaagtttgatttctgtatcagggtaacattgagaacacacatatttctgtttgaggatttgtgacttcctatggaaacagtcttgcatctatgtatttacaaatgaaatttaaagtattcttaaagctttgccttaaatactgcttgcatactgatttacttaatgctaagcatggcaggggttataaatttaaatactataagacctggctgaatcccagatgtatcaataaattgttatagtagcttatggaaaatgctattaaagataaattttcatacattgtatttttagtcaagtaaaatatggatgaaaattaataaagtactgtcaaggggaaaaaata

SEQ ID NO: 425101 - DNA, 4102 bp, Homo sapiens
  misc_feature (2098)..(2098): n is a, c, g, or t
  misc_feature (2106)..(2106): n is a, c, g, or t
ttgtttttacaatctagccttgacctggccttcagacttggtttctagctcatcctccccaaaactgcatgttttatcccagtggttcttaattctcaacatccatagtcctgcgcagaatcttaaagtttggttaagtgaaacagattttagaatttagtgtatatctcaaaggtcagaattaagaaattgccatgtttcttcaggtggtttatgaaataccagcatgtagacccagaagaagctgtaaggattcacactgatgtccaaacaaagaaatctatggcaattcactggggaacttttgccttagcaaatgagcattacttagagcctccagtgaagctgaatgaagctctagagagatacggacttaacgctgaagatttttttgtcttgaagcatggagaatcaagatacctaaataataatgatgaaaacttttaataaatgtgagcacaggcacttttaatgaaaaaggcatcatctaagtttaaaaacaaatgaaaagacttagaaattcatgaatattgtgattattttacatttggaaacaacttctgcaagtttatgttttatgttttgtgtaataacttgcttcctagtatgatcagctcatgtacactatgagagggttcaggggtgggtcatttaaataatgaattggctaatgtggattttaaatttcatatcatgatataagcactgcaatggaaatgtttttactaaaacattatatttttgtggtactagaatttcctgaggtgaaaaaccgatattgaagattcatttttcttttttccattcttcaggaccttcggcaaggtgagtcaaggctctctacctacctagatgtttttcagaggcctacaaatacaagtatctttcttatatgcacattctaataaatgatgaaattcagtccaacatgcttattataaacatagcaattcttgctctatcaaattagcttatatgccaaatattaaatatggtttatttaggtaagcataaaaacataggggctatcatttttaaagacttgattttctctattgtggtaaaatatataaatacatatttgccattttaaacatttaccattttaaccatttttaagtgtacagttctttcgcattaatgcacccatgaccaccattcacttaaatttttaaaagaacagtatattctttttttcctagagccttcagatgagagggaacagtatattctattgcacgtctacaattcccaaaagacctcttactttgggaggccaaggtgggtgggtcacttgaacccaggagtttgacatcaacctgggcaacatggtgacctcccgtctctctcggaaaataaaaaacaaaaaagaaaaagccgggtgaggtggtgtgtacctgtagtcacaggtacttgggaggctgaggtgggaggatcacttgagcccaggagatagaggctgcagtgagctgtgatcgtaccactgcactccagcctgggcgacaaaatgagaccctgtctcaaaagaaagccctctccttagctgagcagaggaagggaaggagtgtggctatgagaatatgatttatgccattttctgtttttaaatctagaagatcttctaagcacaaatacagctacaatgaaatattttacagacaaaatgttaatagaccatattctttgaattaaatttgtttttaattttctctacacattttttttttcctggagtctcttagctctaaatatatcaatcagatttataattttttttacctgattcagatgtcttacatttttatattaaatgaaccttaagcatgattcttttggtaagccagtatgaatgccagtggttggggggcgggggggggagtcagttgacataagatttagtcctaataaggactctgtattcacttgattattctgacccttcctaagggagggaggtggattagataccactggaggcccattctgtattcctaatccagtctcagcactttattcatacaaaataatcaaaataggttttctacaccaaatgctacccaggcagtgctctataatttatttgcacacctgtatgtgnggtgccangttagccactaaatctgaacttttaccctgctttcatcatggatttttttgtgtaacctgaaacaagtcaccaatgctcactgtgcctgtttcctcatttgcaacaagaggataattccgacctacctctgaaaaatgtgtagattaaatgagtttttaaagcactttagaaaatataagggagaaaatgatttcttaagatatcactgcctaatatagacaggtatatttgaaagctaaatacaggttaatgcttttgataatgtattgttcctgttgcaaatttaagcattatatattaggagactaaacattgaaaactttcactgatttttaaattggagtaatagcctaaataagtgtaaataatctttatcaaaatttagtgtttatctacaaagatgcgaatcagtcaaggggaaatgtgtatgcaatgtgtgtgtatatgatgtatgcgaacatatgtgattttggggtactaaagcacaaaaaaatcccccataaaataaaccttcctgaaaagactgatcataaactttttcactccaagcagatgtgaatcaagatgttaggtttatggtgagttagctttgaggtgtgttgccctaatactagccagcgttgttgtagccatattccctgctgctgcacgccgaattgaaaatccatctcttacctcttctctatgaagcaagccaggtatgtcttgcttaagtatttcttctccatgaatggccttaacattattttgtattcacgtgtactgtttaactgagggtctcaaagcactttaaactgttgtgttctatttccactcgtctggcctgcctcatttttctaggcccttttgtaagctgtaattttttattaccactcatgttctttctacactgacactattcattaagaacatcaagcttcatctctgcttacagaatctcaccttattgagtgggttccactttatttttcatttgttatctacattttgaagggtttatgtgcaaagtgaaaacaaattttgaaaaataagacaaatccattctcttcttcaattcagtctaatatgcattgtagtgtcttttaatcagtcttatcctctaagtcaacttcattttcctctttgtgaatacccatagcaatatgtaagattttattgaagtttcctgtgataactgaggaacactttgctatgcctcactgcccaatagggtgggtcatcaattaggagaaatcccaaattataaaagccaacatatgccgtgacctacgtaggaaaagatgtatttgtgcatcttctttctgggtagttaaaaattactccctcttttctctagcattttgacatttcagactcaatgctctgatctctagggagtgtgattattcaaactaatgagaggacaagaagacacagttttagaatctactgctgctaaagcacattaaaaacaaatcctggtttttaatgtatgcatagtttcatatttaatgaatatgctttcattaaatagggaggtagatttgaaaaaactgttataaagaaatgtgccttttggggaatgaatacttttgttcatgtctagcccactgggaattttgttttcaccttatactgagtcctttttctaatgtaaaaatatttcttccaagtttgatttctgtatcagggtaacattgagaacacacatatttctgtttgaggatttgtgacttcctatggaaacagtcttgcatctatgtatttacaaatgaaatttaaagtattcttaaagctttgccttaaatactgcttgcatactgatttacttaatgctaagcatggcaggggttataaatttaaatactataagacctggctgaatcccagatgtatcaataaattgttatagtagcttatggaaaatgctattaaagataaattttcatacattgtatttttagtcaagtaaaatatggatgaaaattaataaagtactgtcaaggggaaaaaata

SEQ ID NO: 425102 - DNA, 4974 bp, Homo sapiens
  misc_feature (2970)..(2970): n is a, c, g, or t
  misc_feature (2978)..(2978): n is a, c, g, or t
aatacagacataatatttttataagtttagagaaatttttattggctaacaaatagtaccttgtgttatgtttgaatgcctttatgttcaactcagtatttttcccccttgttttttttagttcttcaccaaaggacatggatgaaaatgaaagcaaccagtctctgatgacaagcagccaatatcctaaagaagcagtaagaaaacgtcaaaattcagcacggaattccggagcaagtgattcttctaggttttctaggaaaagcttcaaactggattatagactagaagaagatgtaactaaatccaagaaaggaaaagatgggagatttgtgaatccgtggccaacatggaaaaacccctctattccaaatgttctcagatggctgataatggagaaagatcacagcagtgttccaagttctaaagaggaactagacaaagaactcccagtgcttaagccatattttatcactaaccctgaagaagctggagtgagggaagctggcttaagagtcacatggctgggacatgccacggtaatggtggaaatggatgagctcatatttctcacggatcccatctttagctctcgtgcttcaccatcgcagtacatgggtccaaagcgatttcgtcgttccccgtgcacaataagtgaactccctccaatagatgcggtccttatcagtcacaaccactatgaccatctggactacaattctgtcattgctttgaatgagcgatttggtaatgagttgagatggtttgtgcctttgggtctccttgactggatgcaaaaatgtggctgtgagaatgtgattgagttggactggtgggaggagaattgtgtccccggacatgataaggtcacttttgtctttacaccttcccagcactggtgtaaaaggactctaatggatgacaacaaggtgctatggggcagctggtctgtcttggggccttggaatcgattttttttcgcaggagatactggttattgccctgcttttgaagagataggaaaaagatttggaccttttgaccttgcagctattcccatcggagcttatgaaccgaggtggtttatgaaataccagcatgtagacccagaagaagctgtaaggattcacactgatgtccaaacaaagaaatctatggcaattcactggggaacttttgccttagcaaatgagcattacttagagcctccagtgaagctgaatgaagctctagagagatacggacttaacgctgaagatttttttgtcttgaagcatggagaatcaagatacctaaataataatgatgaaaacttttaataaatgtgagcacaggcacttttaatgaaaaaggcatcatctaagtttaaaaacaaatgaaaagacttagaaattcatgaatattgtgattattttacatttggaaacaacttctgcaagtttatgttttatgttttgtgtaataacttgcttcctagtatgatcagctcatgtacactatgagagggttcaggggtgggtcatttaaataatgaattggctaatgtggattttaaatttcatatcatgatataagcactgcaatggaaatgtttttactaaaacattatatttttgtggtactagaatttcctgaggtgaaaaaccgatattgaagattcatttttcttttttccattcttcaggaccttcggcaaggtgagtcaaggctctctacctacctagatgtttttcagaggcctacaaatacaagtatctttcttatatgcacattctaataaatgatgaaattcagtccaacatgcttattataaacatagcaattcttgctctatcaaattagcttatatgccaaatattaaatatggtttatttaggtaagcataaaaacataggggctatcatttttaaagacttgattttctctattgtggtaaaatatataaatacatatttgccattttaaacatttaccattttaaccatttttaagtgtacagttctttcgcattaatgcacccatgaccaccattcacttaaatttttaaaagaacagtatattctttttttcctagagccttcagatgagagggaacagtatattctattgcacgtctacaattcccaaaagacctcttactttgggaggccaaggtgggtgggtcacttgaacccaggagtttgacatcaacctgggcaacatggtgacctcccgtctctctcggaaaataaaaaacaaaaaagaaaaagccgggtgaggtggtgtgtacctgtagtcacaggtacttgggaggctgaggtgggaggatcacttgagcccaggagatagaggctgcagtgagctgtgatcgtaccactgcactccagcctgggcgacaaaatgagaccctgtctcaaaagaaagccctctccttagctgagcagaggaagggaaggagtgtggctatgagaatatgatttatgccattttctgtttttaaatctagaagatcttctaagcacaaatacagctacaatgaaatattttacagacaaaatgttaatagaccatattctttgaattaaatttgtttttaattttctctacacattttttttttcctggagtctcttagctctaaatatatcaatcagatttataattttttttacctgattcagatgtcttacatttttatattaaatgaaccttaagcatgattcttttggtaagccagtatgaatgccagtggttggggggcgggggggggagtcagttgacataagatttagtcctaataaggactctgtattcacttgattattctgacccttcctaagggagggaggtggattagataccactggaggcccattctgtattcctaatccagtctcagcactttattcatacaaaataatcaaaataggttttctacaccaaatgctacccaggcagtgctctataatttatttgcacacctgtatgtgnggtgccangttagccactaaatctgaacttttaccctgctttcatcatggatttttttgtgtaacctgaaacaagtcaccaatgctcactgtgcctgtttcctcatttgcaacaagaggataattccgacctacctctgaaaaatgtgtagattaaatgagtttttaaagcactttagaaaatataagggagaaaatgatttcttaagatatcactgcctaatatagacaggtatatttgaaagctaaatacaggttaatgcttttgataatgtattgttcctgttgcaaatttaagcattatatattaggagactaaacattgaaaactttcactgatttttaaattggagtaatagcctaaataagtgtaaataatctttatcaaaatttagtgtttatctacaaagatgcgaatcagtcaaggggaaatgtgtatgcaatgtgtgtgtatatgatgtatgcgaacatatgtgattttggggtactaaagcacaaaaaaatcccccataaaataaaccttcctgaaaagactgatcataaactttttcactccaagcagatgtgaatcaagatgttaggtttatggtgagttagctttgaggtgtgttgccctaatactagccagcgttgttgtagccatattccctgctgctgcacgccgaattgaaaatccatctcttacctcttctctatgaagcaagccaggtatgtcttgcttaagtatttcttctccatgaatggccttaacattattttgtattcacgtgtactgtttaactgagggtctcaaagcactttaaactgttgtgttctatttccactcgtctggcctgcctcatttttctaggcccttttgtaagctgtaattttttattaccactcatgttctttctacactgacactattcattaagaacatcaagcttcatctctgcttacagaatctcaccttattgagtgggttccactttatttttcatttgttatctacattttgaagggtttatgtgcaaagtgaaaacaaattttgaaaaataagacaaatccattctcttcttcaattcagtctaatatgcattgtagtgtcttttaatcagtcttatcctctaagtcaacttcattttcctctttgtgaatacccatagcaatatgtaagattttattgaagtttcctgtgataactgaggaacactttgctatgcctcactgcccaatagggtgggtcatcaattaggagaaatcccaaattataaaagccaacatatgccgtgacctacgtaggaaaagatgtatttgtgcatcttctttctgggtagttaaaaattactccctcttttctctagcattttgacatttcagactcaatgctctgatctctagggagtgtgattattcaaactaatgagaggacaagaagacacagttttagaatctactgctgctaaagcacattaaaaacaaatcctggtttttaatgtatgcatagtttcatatttaatgaatatgctttcattaaatagggaggtagatttgaaaaaactgttataaagaaatgtgccttttggggaatgaatacttttgttcatgtctagcccactgggaattttgttttcaccttatactgagtcctttttctaatgtaaaaatatttcttccaagtttgatttctgtatcagggtaacattgagaacacacatatttctgtttgaggatttgtgacttcctatggaaacagtcttgcatctatgtatttacaaatgaaatttaaagtattcttaaagctttgccttaaatactgcttgcatactgatttacttaatgctaagcatggcaggggttataaatttaaatactataagacctggctgaatcccagatgtatcaataaattgttatagtagcttatggaaaatgctattaaagataaattttcatacattgtatttttagtcaagtaaaatatggatgaaaattaataaagtactgtcaaggggaaaaaata

SEQ ID NO: 425103 - DNA, 4449 bp, Homo sapiens
  misc_feature (2445)..(2445): n is a, c, g, or t
  misc_feature (2453)..(2453): n is a, c, g, or t
tcatcgctgtcgggaacagcgatgactggagcgggctgagagtgggtttcccgtccccgagccctccctcatctcggagatgccgcacttgtgagcgacagggcttcatttgaattttcgcacctcgcgagttgcggagcctgcatctctgaagctgcctcggtgaagagccacagcattattttttttctctttgggagagtagctgtctgggatttgagatcctatcttccctgcaaattaccaggttgcatcttcactgataggaatacatttcttcaccaaaggacatggatgaaaatgaaagcaaccagtctctgatgacaagcagccaatatcctaaagaagcagtaagaaaacgtcaaaattcagcacggaattccggagcaagtgattcttctaggttttctaggaaaagcttcaaactggattatagactagaagaagatgtaactaaatccaagaaaggaaaagatgggagatttgtgaatccgtggccaacatggaaaaacccctctattccaaatgttctcagatggctgataatggagaaagatcacagcagtgttccaagttctaaagaggaactagacaaagaactcccagtgcttaagccatattttatcactaaccctgaagaagctggagtgagggaagctggcttaagagtcacatggctgggacatgccacggtaatggtggaaatggatgagctcatatttctcacggatcccatctttagctctcgtgcttcaccatcgcagtacatgggtccaaagcgatttcgtcgttccccgtgcacaataagtgaactccctccaatagatgcggtccttatcagtcacaaccactatgaccatctggactacaattctgtcattgctttgaatgagcgatttggtaatgagttgagatggtttgtgcctttgggtctccttgactggatgcaaaaatgtggctgtgagaatgtgattgagttggactggtgggaggagaattgtgtccccggacatgataaggtcacttttgtctttacaccttcccagcactggtgtaaaaggactctaatggatgacaacaaggtgctatggggcagctggtctgtcttggggccttggaatcgattttttttcgcaggagatactggttattgccctgcttttgaagagataggaaaaagatttggaccttttgaccttgcagctattcccatcggagcttatgaaccgaggtggtttatgaaataccagcatgtagacccagaagaagctgtaaggattcacactgatgtccaaacaaagaaatctatggcaattcactggggaacttttgccttagcaaatgagcattacttagagcctccagtgaagctgaatgaagctctagagagatacggacttaacgctgaagatttttttgtcttgaagcatggagaatcaagatacctaaataataatgatgaaaacttttaataaataatttcctgaggtgaaaaaccgatattgaagattcatttttcttttttccattcttcaggaccttcggcaagagccttcagatgagagggaacagtatattctattgcacgtctacaattcccaaaagacctcttactttgggaggccaaggtgggtgggtcacttgaacccaggagtttgacatcaacctgggcaacatggtgacctcccgtctctctcggaaaataaaaaacaaaaaagaaaaagccgggtgaggtggtgtgtacctgtagtcacaggtacttgggaggctgaggtgggaggatcacttgagcccaggagatagaggctgcagtgagctgtgatcgtaccactgcactccagcctgggcgacaaaatgagaccctgtctcaaaagaaagccctctccttagctgagcagaggaagggaaggagtgtggctatgagaatatgatttatgccattttctgtttttaaatctagaagatcttctaagcacaaatacagctacaatgaaatattttacagacaaaatgttaatagaccatattctttgaattaaatttgtttttaattttctctacacattttttttttcctggagtctcttagctctaaatatatcaatcagatttataattttttttacctgattcagatgtcttacatttttatattaaatgaaccttaagcatgattcttttggtaagccagtatgaatgccagtggttggggggcgggggggggagtcagttgacataagatttagtcctaataaggactctgtattcacttgattattctgacccttcctaagggagggaggtggattagataccactggaggcccattctgtattcctaatccagtctcagcactttattcatacaaaataatcaaaataggttttctacaccaaatgctacccaggcagtgctctataatttatttgcacacctgtatgtgnggtgccangttagccactaaatctgaacttttaccctgctttcatcatggatttttttgtgtaacctgaaacaagtcaccaatgctcactgtgcctgtttcctcatttgcaacaagaggataattccgacctacctctgaaaaatgtgtagattaaatgagtttttaaagcactttagaaaatataagggagaaaatgatttcttaagatatcactgcctaatatagacaggtatatttgaaagctaaatacaggttaatgcttttgataatgtattgttcctgttgcaaatttaagcattatatattaggagactaaacattgaaaactttcactgatttttaaattggagtaatagcctaaataagtgtaaataatctttatcaaaatttagtgtttatctacaaagatgcgaatcagtcaaggggaaatgtgtatgcaatgtgtgtgtatatgatgtatgcgaacatatgtgattttggggtactaaagcacaaaaaaatcccccataaaataaaccttcctgaaaagactgatcataaactttttcactccaagcagatgtgaatcaagatgttaggtttatggtgagttagctttgaggtgtgttgccctaatactagccagcgttgttgtagccatattccctgctgctgcacgccgaattgaaaatccatctcttacctcttctctatgaagcaagccaggtatgtcttgcttaagtatttcttctccatgaatggccttaacattattttgtattcacgtgtactgtttaactgagggtctcaaagcactttaaactgttgtgttctatttccactcgtctggcctgcctcatttttctaggcccttttgtaagctgtaattttttattaccactcatgttctttctacactgacactattcattaagaacatcaagcttcatctctgcttacagaatctcaccttattgagtgggttccactttatttttcatttgttatctacattttgaagggtttatgtgcaaagtgaaaacaaattttgaaaaataagacaaatccattctcttcttcaattcagtctaatatgcattgtagtgtcttttaatcagtcttatcctctaagtcaacttcattttcctctttgtgaatacccatagcaatatgtaagattttattgaagtttcctgtgataactgaggaacactttgctatgcctcactgcccaatagggtgggtcatcaattaggagaaatcccaaattataaaagccaacatatgccgtgacctacgtaggaaaagatgtatttgtgcatcttctttctgggtagttaaaaattactccctcttttctctagcattttgacatttcagactcaatgctctgatctctagggagtgtgattattcaaactaatgagaggacaagaagacacagttttagaatctactgctgctaaagcacattaaaaacaaatcctggtttttaatgtatgcatagtttcatatttaatgaatatgctttcattaaatagggaggtagatttgaaaaaactgttataaagaaatgtgccttttggggaatgaatacttttgttcatgtctagcccactgggaattttgttttcaccttatactgagtcctttttctaatgtaaaaatatttcttccaagtttgatttctgtatcagggtaacattgagaacacacatatttctgtttgaggatttgtgacttcctatggaaacagtcttgcatctatgtatttacaaatgaaatttaaagtattcttaaagctttgccttaaatactgcttgcatactgatttacttaatgctaagcatggcaggggttataaatttaaatactataagacctggctgaatcccagatgtatcaataaattgttatagtagcttatggaaaatgctattaaagataaattttcatacattgtatttttagtcaagtaaaatatggatgaaaattaataaagtactgtcaaggggaaaaaata

SEQ ID NO: 425104 - DNA, 5073 bp, Homo sapiens
  misc_feature (3123)..(3123): n is a, c, g, or t
  misc_feature (3131)..(3131): n is a, c, g, or t
tcatcgctgtcgggaacagcgatgactggagcgggctgagagtgggtttcccgtccccgagccctccctcatctcggagatgccgcacttgtgagcgacagggcttcatttgaattttcgcacctcgcgagttgcggagcctgcatctctgaagctgcctcggtgaagagccacagcattattttttttctctttgggagagtagctgtctgggatttgagatcctatcttccctgcaaattaccaggttgcatcttcactgataggaatacatttcttcaccaaaggacatggatgaaaatgaaagcaaccagtctctgatgacaagcagccaatatcctaaagaagcagtaagaaaacgtcaaaattcagcacggaattccggagcaagtgattcttctaggttttctaggaaaagcttcaaactggattatagactagaagaagatgtaactaaatccaagaaaggaaaagatgggagatttgtgaatccgtggccaacatggaaaaacccctctattccaaatgttctcagatggctgataatggagaaagatcacagcagtgttccaagttctaaagaggaactagacaaagaactcccagtgcttaagccatattttatcactaaccctgaagaagctggagtgagggaagctggcttaagagtcacatggctgggacatgccacggtaatggtggaaatggatgagctcatatttctcacggatcccatctttagctctcgtgcttcaccatcgcagtacatgggtccaaagcgatttcgtcgttccccgtgcacaataagtgaactccctccaatagatgcggtccttatcagtcacaaccactatgaccatctggactacaattctgtcattgctttgaatgagcgatttggtaatgagttgagatggtttgtgcctttgggtctccttgactggatgcaaaaatgtggctgtgagaatgtgattgagttggactggtgggaggagaattgtgtccccggacatgataaggtcacttttgtctttacaccttcccagcactggtgtaaaaggactctaatggatgacaacaaggtgctatggggcagctggtctgtcttggggccttggaatcgattttttttcgcaggagatactggttattgccctgcttttgaagagataggaaaaagatttggaccttttgaccttgcagctattcccatcggagcttatgaaccgaggtggtttatgaaataccagcatgtagacccagaagaagctgtaaggattcacactgatgtccaaacaaagaaatctatggcaattcactggggaacttttgccttagcaaatgagcattacttagagcctccagtgaagctgaatgaagctctagagagatacggacttaacgctgaagatttttttgtcttgaagcatggagaatcaagatacctaaataataatgatgaaaacttttaataaatgtgagcacaggcacttttaatgaaaaaggcatcatctaagtttaaaaacaaatgaaaagacttagaaattcatgaatattgtgattattttacatttggaaacaacttctgcaagtttatgttttatgttttgtgtaataacttgcttcctagtatgatcagctcatgtacactatgagagggttcaggggtgggtcatttaaataatgaattggctaatgtggattttaaatttcatatcatgatataagcactgcaatggaaatgtttttactaaaacattatatttttgtggtactagaatttcctgaggtgaaaaaccgatattgaagattcatttttcttttttccattcttcaggaccttcggcaaggtgagtcaaggctctctacctacctagatgtttttcagaggcctacaaatacaagtatctttcttatatgcacattctaataaatgatgaaattcagtccaacatgcttattataaacatagcaattcttgctctatcaaattagcttatatgccaaatattaaatatggtttatttaggtaagcataaaaacataggggctatcatttttaaagacttgattttctctattgtggtaaaatatataaatacatatttgccattttaaacatttaccattttaaccatttttaagtgtacagttctttcgcattaatgcacccatgaccaccattcacttaaatttttaaaagaacagtatattctttttttcctagagccttcagatgagagggaacagtatattctattgcacgtctacaattcccaaaagacctcttactttgggaggccaaggtgggtgggtcacttgaacccaggagtttgacatcaacctgggcaacatggtgacctcccgtctctctcggaaaataaaaaacaaaaaagaaaaagccgggtgaggtggtgtgtacctgtagtcacaggtacttgggaggctgaggtgggaggatcacttgagcccaggagatagaggctgcagtgagctgtgatcgtaccactgcactccagcctgggcgacaaaatgagaccctgtctcaaaagaaagccctctccttagctgagcagaggaagggaaggagtgtggctatgagaatatgatttatgccattttctgtttttaaatctagaagatcttctaagcacaaatacagctacaatgaaatattttacagacaaaatgttaatagaccatattctttgaattaaatttgtttttaattttctctacacattttttttttcctggagtctcttagctctaaatatatcaatcagatttataattttttttacctgattcagatgtcttacatttttatattaaatgaaccttaagcatgattcttttggtaagccagtatgaatgccagtggttggggggcgggggggggagtcagttgacataagatttagtcctaataaggactctgtattcacttgattattctgacccttcctaagggagggaggtggattagataccactggaggcccattctgtattcctaatccagtctcagcactttattcatacaaaataatcaaaataggttttctacaccaaatgctacccaggcagtgctctataatttatttgcacacctgtatgtgnggtgccangttagccactaaatctgaacttttaccctgctttcatcatggatttttttgtgtaacctgaaacaagtcaccaatgctcactgtgcctgtttcctcatttgcaacaagaggataattccgacctacctctgaaaaatgtgtagattaaatgagtttttaaagcactttagaaaatataagggagaaaatgatttcttaagatatcactgcctaatatagacaggtatatttgaaagctaaatacaggttaatgcttttgataatgtattgttcctgttgcaaatttaagcattatatattaggagactaaacattgaaaactttcactgatttttaaattggagtaatagcctaaataagtgtaaataatctttatcaaaatttagtgtttatctacaaagatgcgaatcagtcaaggggaaatgtgtatgcaatgtgtgtgtatatgatgtatgcgaacatatgtgattttggggtactaaagcacaaaaaaatcccccataaaataaaccttcctgaaaagactgatcataaactttttcactccaagcagatgtgaatcaagatgttaggtttatggtgagttagctttgaggtgtgttgccctaatactagccagcgttgttgtagccatattccctgctgctgcacgccgaattgatatttcttctccatgaatggccttaacattattttgtattcacgtgtactgtttaactgagggtctcaaagcactttaaactgttgtgttctatttccactcgtctggcctgcctcatttttctaggcccttttgtaagctgtaattttttattaccactcatgttctttctacactgacactattcattaagaacatcaagcttcatctctgcttacagaatctcaccttattgagtgggttccactttatttttcatttgttatctacattttgaagggtttatgtgcaaagtgaaaacaaattttgaaaaataagacaaatccattctcttcttcaattcagtctaatatgcattgtagtgtcttttaatcagtcttatcctctaagtcaacttcattttcctctttgtgaatacccatagcaatatgtaagattttattgaagtttcctgtgataactgaggaacactttgctatgcctcactgcccaatagggtgggtcatcaattaggagaaatcccaaattataaaagccaacatatgccgtgacctacgtaggaaaagatgtatttgtgcatcttctttctgggtagttaaaaattactccctcttttctctagcattttgacatttcagactcaatgctctgatctctagggagtgtgattattcaaactaatgagaggacaagaagacacagttttagaatctactgctgctaaagcacattaaaaacaaatcctggtttttaatgtatgcatagtttcatatttaatgaatatgctttcattaaatagggaggtagatttgaaaaaactgttataaagaaatgtgccttttggggaatgaatacttttgttcatgtctagcccactgggaattttgttttcaccttatactgagtcctttttctaatgtaaaaatatttcttccaagtttgatttctgtatcagggtaacattgagaacacacatatttctgtttgaggatttgtgacttcctatggaaacagtcttgcatctatgtatttacaaatgaaatttaaagtattcttaaagctttgccttaaatactgcttgcatactgatttacttaatgctaagcatggcaggggttataaatttaaatactataagacctggctgaatcccagatgtatcaataaattgttatagtagcttatggaaaatgctattaaagataaattttcatacattgtatttttagtcaagtaaaatatggatgaaaattaataaagtactgtcaaggggaaaaaata

SEQ ID NO: 425105 - DNA, 2257 bp, Homo sapiens
  misc_feature (253)..(253): n is a, c, g, or t
  misc_feature (261)..(261): n is a, c, g, or t
cgaagacgccgcgtcctccattcgggggggggagtcagttgacataagatttagtcctaataaggactctgtattcacttgattattctgacccttcctaagggagggaggtggattagataccactggaggcccattctgtattcctaatccagtctcagcactttattcatacaaaataatcaaaataggttttctacaccaaatgctacccaggcagtgctctataatttatttgcacacctgtatgtgnggtgccangttagccactaaatctgaacttttaccctgctttcatcatggatttttttgtgtaacctgaaacaagtcaccaatgctcactgtgcctgtttcctcatttgcaacaagaggataattccgacctacctctgaaaaatgtgtagattaaatgagtttttaaagcactttagaaaatataagggagaaaatgatttcttaagatatcactgcctaatatagacaggtatatttgaaagctaaatacaggttaatgcttttgataatgtattgttcctgttgcaaatttaagcattatatattaggagactaaacattgaaaactttcactgatttttaaattggagtaatagcctaaataagtgtaaataatctttatcaaaatttagtgtttatctacaaagatgcgaatcagtcaaggggaaatgtgtatgcaatgtgtgtgtatatgatgtatgcgaacatatgtgattttggggtactaaagcacaaaaaaatcccccataaaataaaccttcctgaaaagactgatcataaactttttcactccaagcagatgtgaatcaagatgttaggtttatggtgagttagctttgaggtgtgttgccctaatactagccagcgttgttgtagccatattccctgctgctgcacgccgaattgaaaatccatctcttacctcttctctatgaagcaagccaggtatgtcttgcttaagtatttcttctccatgaatggccttaacattattttgtattcacgtgtactgtttaactgagggtctcaaagcactttaaactgttgtgttctatttccactcgtctggcctgcctcatttttctaggcccttttgtaagctgtaattttttattaccactcatgttctttctacactgacactattcattaagaacatcaagcttcatctctgcttacagaatctcaccttattgagtgggttccactttatttttcatttgttatctacattttgaagggtttatgtgcaaagtgaaaacaaattttgaaaaataagacaaatccattctcttcttcaattcagtctaatatgcattgtagtgtcttttaatcagtcttatcctctaagtcaacttcattttcctctttgtgaatacccatagcaatatgtaagattttattgaagtttcctgtgataactgaggaacactttgctatgcctcactgcccaatagggtgggtcatcaattaggagaaatcccaaattataaaagccaacatatgccgtgacctacgtaggaaaagatgtatttgtgcatcttctttctgggtagttaaaaattactccctcttttctctagcattttgacatttcagactcaatgctctgatctctagggagtgtgattattcaaactaatgagaggacaagaagacacagttttagaatctactgctgctaaagcacattaaaaacaaatcctggtttttaatgtatgcatagtttcatatttaatgaatatgctttcattaaatagggaggtagatttgaaaaaactgttataaagaaatgtgccttttggggaatgaatacttttgttcatgtctagcccactgggaattttgttttcaccttatactgagtcctttttctaatgtaaaaatatttcttccaagtttgatttctgtatcagggtaacattgagaacacacatatttctgtttgaggatttgtgacttcctatggaaacagtcttgcatctatgtatttacaaatgaaatttaaagtattcttaaagctttgccttaaatactgcttgcatactgatttacttaatgctaagcatggcaggggttataaatttaaatactataagacctggctgaatcccagatgtatcaataaattgttatagtagcttatggaaaatgctattaaagataaattttcatacattgtatttttagtcaagtaaaatatggatgaaaattaataaagtactgtcaaggggaaaaaata

SEQ ID NO: 425106 - DNA, 2269 bp, Homo sapiens
  misc_feature (1033)..(1033): n is a, c, g, or t
tcatcgctgtcgggaacagcgatgactggagcgggctgagagtgggtttcccgtccccgagccctccctcatctcggagatgccgcacttgtgagcgacagggcttcatttgaattttcgcacctcgcgagttgcggagcctgcatctctgaagctgcctcggtgaagagccacagcattattttttttctctttgggagagtagctgtctgggatttgagatcctatcttccctgcaaattaccaggttgcatcttcactgataggaatacatttcttcaccaaaggacatggatgaaaatgaaagcaaccagtctctgatgacaagcagccaatatcctaaagaagcagtaagaaaacgtcaaaattcagcacggaattccggagcaagtgattcttctaggttttctaggaaaagcttcaaactggattatagactagaagaagatgtaactaaatccaagaaaggaaaagatgggagatttgtgaatccgtggccaacatggaaaaacccctctattccaaatgttctcagatggctgataatggagaaagatcacagcagtgttccaagttctaaagaggtagcgcttggcttttttgagtgctttatatttgctcttcatatatgacactctagttatttgagcccttgtatatcataaggcatagaattaggtctgaggagataaagtggataggtgtaacctaggccctaaagttcatcgttcagtagcagagtacatataggaataaccaaccctgatctggtggcaactagaggtaggaacagagtgctttagaggtacaggaaagaacgtgatgctgacaggaagagctggagatggcttcacagaggaggtgaatatttcagctgggcctagtcaactaaaaagtattttgacagtgattttccaggtagatgatggcatgaacaaggtcatgaaggtgagacagtgtattacctgctctggaaggtagtagcctggtacgtgtgtagaatatggatcatgagggtgaaggcatggctggnagtgcttggcttttaacccttggataaggctaccaaagctgtgaaagggagcttcagatgacctttccagaccttgaaaagttgactttaggttcctagcctttaaatgtactagttttacttaagatgattctacttggccttcttctattctgttagaatagacagatcacagttttgggttaagttgatttcatggtttacattgagtatatcaatatttttcattggtgaatgaagtaagtactatgactgtgtctcctttccttatatacctctccctctgctgtgttaacaacatctctttcatctgcttgactttctgtgtatttatgacaattatttccctgcctcctatggcctctcaatgccattttcctgagggaaagactctcaggtggtcgttcagcagtgggctgtagtctgagctgatgccttcccagggtctctgccgacttacattctagggcacccttcaccagcctcctgggctcccttgtgtcttctatggtcacccttgttttctgcatcccacttgttcctctttctgtgtcattttctcattttggtggagcatattttcagtgaacttcctgagaaagggtacatggaaagtaagttttttgaattcttgcttgtctgaaatgtctttattctcattcataattgataatttgggtatagaatttttgtttaaaacagttttctctcagaatttgagagtattgcctccataactttatttctagtgtggctgtggggaagttcagtgccgtccttactcttgatcctttgaacaggccctttgttttctctctagagactttgagaatcctctctttggcaccagtgttctgaaaattgccacgatgtgtagttctttatttattcattgtgctctgtgtgtggtgggccctttcagtctgaaaatccatttccttcagttctaggaaatttcatctgtatctttgaaaatgtccttccctatatgtttttattctaaaatgactattagttatagtagttctattttggacctcctggatcaattctctgtaatttaagaaaatttcttctatgttttatctttttaaaaatattacatggctaggtgcagtagctcatgcctataatacccacactttgggaggctgaggcaggtggattgcttgagctgaggagttcgagaccagccggggcaacatagcaaaatgccatctctaccaaaaaaaaaaa

SEQ ID NO: 425107 - DNA, 351 bp, Homo sapiens
ctgtttgaggatttgtgacttcctatggaaacagtcttgcatctatgtatttacaaatgaaatttaaagtattcttaaagctttgccttaaatactgcttgcatactgatttacttaatgctaagcatggcaggggttataaatttaaatactataagacctggctgaatcccagatgtatcaataaattgttatagtagcttatggaaaatgctattaaagataaattttcatacattgtatttttagtcaagtaaaatatggatgaaaattaataaagtactgtcaaggggaaaaaatatgtataaccttgtaagtgatttttctcccctttattaaaaaaagattata

SEQ ID NO: 425108 - DNA, 1492 bp, Homo sapiens
tgataactgggatgtcctcttccaggtgcctccccatattcagaggcaggttgctaagcgcgtgtggaagtccagcccggaagcacttgattttatcagacgcaggaacttgaggaagatccagagtgcacgcataaagatggaagaggatgcactactttctgatccagtggaaacctctgctgaagcccgggctgctgtccttgctcaaagcaagccttctgatgaaggttcctctgaggagccagctgtgccttccggcactgcccgttcccatgacgatgaggaaggagcgggtaaccctcccattccggagcaagaccgcccattgctccgtgtgccccgggagaaggaggccaaaactggcgtcagctacttctttccttagatgtttttccttctataaggtgccagacaggggaaaagggtgggggtacatctgggatgtcacaggaaacattaaggagagagttgaaggtaaagatctgaaggtaagaaggagttccacctgatgctcgggtcaggatgagaattccaaacacactgccagccccttcactggggatgcttggtctcttctgctggtaaaagcagagatgtttctgtgtcatgcccaagctccccggtgctaccttgcctttctcttttacccctgatcttggctttctctctctctctgcagactttcctttaattgatgtgacatttgtggtaaacacctttcccagggaacctcacaaatcttgagatgctttcccttccccaaatgggattgcatgatttccctgactttcctaccctcctccagagagctcagttggaaaggccctcaagaggcatgctagaacgttaggtcagcctactgacagctgacaaacaattaatgcgaaatcatgtcacaccaacccatagccgtgtccacgcagcaactccaccaccttaggatttccccctccaaattattcagaccaatggcttgccaaatggcctctcccaaaattctgtacagttttgctcaggtcacgccaacagggaaacctcaagtgtaggtctaattagtgtttctgggatccaaagttagaggaaaatttagattttattgcctggatctgctttaaagacaattggtgtttacaccctcttgtcagcaaaacagctagttaggtaaggacatatagttccaagtaggtaaagtcacttgattacaaatgttcttaactatcgtctctgtaattcctttatacaggacagtacaaaattgtgggacatgctctggtaacacacagatatgggttgcatatgatccagaattacagctgatattatggatgacaactgctaaggtccataaaatgaagactgtattgtattgagggatagaaattgatcatttaatgggtaacaactgctgagctcaaagatttgtgattgttaaaacttctctggcatttaatcattaataaacatctgtattgtgacagcagcatattca

SEQ ID NO: 425109 - DNA, 1869 bp, Homo sapiens
tgagtgtcttgggaggagccccaggacacaaccccgaccgcaggacgaagatggtatcgatacacagcctctctgagctggagcgtctgaagctgcaagagactgcttaccacgaactcgtggccagacatttcctctccgaattcaaacctgacagagctctgcctattgaccgtccgaacaccttggataagtggtttctgattttgagaggacagcagagggctgtatcacacaagacatttggcattagcctggaagaggtcctggtgaacgagtttacccgccgcaagcatcttgaactgacagccacgatgcaggttgaagaagccaccggtcaggctgcgggccgtcgtcggggaaacgtggtgcgaagggtgtttggccgcatccggcgctttttcagtcgcaggcggaatgagcccaccttgccccgggagttcactcgccgtgggcgtcgaggtgcagtgtctgtggatagtctggctgagctggaagacggagccctgctgctgcagaccctgcagctttcaaaaatttcctttccaattggccaacgacttctgggatccaaaaggaagatgagtctcaatccgattgcgaaacaaatcccccaggttgttgaggcttgctgccaattcattgaaaaacatggcttaagcgcagtggggatttttacccttgaatactccgtgcagcgagtgcgtcactccgtgaagaatttgatcaaggtctggatgtagtgctggatgacaatcagaatgtgcatgatgtggctgcactcctcaaggagtttttccgtgacatgaaggattctctgctgccagatgatctgtacatgtcattcctcctgacagcaactttaaagccccaggatcagctttctgcctgcagttgctggtctacctgatgccaccctgccacagtgataccctggagcgtctgctgaaggccctgcataaaatcactgagaactgcgaggactcaattggcattgatggacagttggtcccaggcaaccgtatgacttccactaacttggccttggtgtttggatctactttcctttaattgatgtgacatttgtggtaaacacctttcccagggaacctcacaaatcttgagatgctttcccttccccaaatgggattgcatgatttccctgactttcctaccctcctccagagagctcagttggaaaggccctcaagaggcatgctagaacgttaggtcagcctactgacagctgacaaacaattaatgcgaaatcatgtcacaccaacccatagccgtgtccacgcagcaactccaccaccttaggatttccccctccaaattattcagaccaatggcttgccaaatggcctctcccaaaattctgtacagttttgctcaggtcacgccaacagggaaacctcaagtgtaggtctaattagtgtttctgggatccaaagttagaggaaaatttagattttattgcctggatctgctttaaagacaattggtgtttacaccctcttgtcagcaaaacagctagttaggtaaggacatatagttccaagtaggtaaagtcacttgattacaaatgttcttaactatcgtctctgtaattcctttatacaggacagtacaaaattgtgggacatgctctggtaacacacagatatgggttgcatatgatccagaattacagctgatattatggatgacaactgctaaggtccataaaatgaagactgtattgtattgagggatagaaattgatcatttaatgggtaacaactgctgagctcaaagatttgtgattgttaaaacttctctggcatttaatcattaataaacatctgtattgtgacagcagcatattca

SEQ ID NO: 425110 - DNA, 1091 bp, Homo sapiens
  misc_feature (1061)..(1061): n is a, c, g, or t
  misc_feature (1082)..(1082): n is a, c, g, or t
tgagtgtcttgggaggagccccaggacacaaccccgaccgcaggacgaagatggtatcgatacacagcctctctgagctggagcgtctgaagctgcaagagactgcttaccacgaactcgtggccagacatttcctctccgaattcaaacctgacagagctctgcctattgaccgtccgaacaccttggataagtggtttctgattttgagaggacagcagagggctgtatcacacaagacatttggcattagcctggaagaggtcctggtgaacgagtttacccgccgcaagcatcttgaactgacagccacgatgcaggttgaagaagccaccggtcaggctgcgggccgtcgtcggggaaacgtggtgcgaagggtgtttggccgcatccggcgctttttcagtcgcaggcggaatgagcccaccttgccccgggagttcactcgccgtgggcgtcgaggtgcagtgtctgtggatagtctggctgagctggaagacggagccctgctgctgcagaccctgcagctttcaaaaatttcctttccaattggccaacgacttctgggatccaaaaggaagatgagtctcaatccgattgcgaaacaaatcccccaggttgttgaggcttgctgccaattcattgaaaaacatggcttaagcgcagtggggatttttacccttgaatactccgtgcagcgagtgcgtcactccgtgaagaatttgatcaaggtctggatgtagtgctggatgacaatcagaatgtgcatgatgtggctgcactcctcaaggagtttttccgtgacatgaaggattctctgctgccagatgatctgtacatgtcattcctcctgacagcaactttaaagccccaggatcagctttctgcctgcagttgctggtctacctgatgccaccctgccacagtgataccctggagcgtctgctgaaggccctgcataaaatcactgagaactgcgaggactcaattggcattgatggacagttggtccaggcaaccgatgacttcactacttggcttggggttggactgtctctganaaagtttgcaagagagagtcnggccttggg

SEQ ID NO: 425111 - DNA, 484 bp, Homo sapiens
tggaagaatggatggatggtagggaaaagaattatatgaatataaacagctcactctttcagggagcttgcctgagatggaaggcagagaataagctcttgaatggctagagttttttttttttttttttttcccctaaaggagagattttatagtccttaccagtataattttctatgtatattatttaccgtttgctaatttaggaatactgccaaaataagatctaggtttatgattttaaataacttaataataattgaattattattatttaaattcaagaagcatttattgaagtgagtattttgttcagcattacactagtttcattagggttttagaagctaaaaagaaactttgtttttatttgtcacctagttggagacatacatcacatacaggaaacaattagaaaaaatacatagtgtctcctttaaacatttggtgaatgaatgacataaatctctaaggtttaaaaaga

SEQ ID NO: 425112 - DNA, 596 bp, Homo sapiens
ctgtactggctataaggaatgctgggcaggcctcgctgccacaccacctcctgagagaagagacggggtcttactatgttgtccaggctggtttcaaactcctggaatcaagcgatcttcctgccttggcctccagaaatgctgggactgcgcctggaatagatacgggtaaagaaccttttacatcagactcttgtgtcctactcccagaatgctgattcagtagcctgcaagtgaggcctagaaatctgcattttcacaagctctcaggtttaatacacaatacatttaaagaaagcacagcccaaagggtgtcagtggggtgtatgaaggaagcctggttagtggggagagtgggattagggaacagctgcttaacctggcttgtttcaagtccccctttctccctttttgccctcaaaaagttcccctcattttttcccctctactttctaatttctcgccatgcactcacacagctatacggctatctccagagattactctgaaaactctgctataaagatgacctggtctaatgccttgatttgttttttgtttgtttgtttttttgagacagggtctcactctcctgg

SEQ ID NO: 425113 - DNA, 358 bp, Homo sapiens
catactgcttggtatctaaagtagtactgacccttttgacacctaatccaaagttttttcagctacctcaggttgcccctcatcttccagctgacaccatccagcacctttcagatactggcaaaggagcagtgtttcaaaattactttccaaatggcctcctacaaggcagtcctcagagagaagcaaggttctgcatcttaaaccttccttggtttcttaggttccaaagctgtttctatcagtctccaagcaaccaactctttagaattccatgagtctactcagagaacttgtgggttcagtcgggggtatatcttcaaccatttattaaatttccttctttgtaaactgaaaa

SEQ ID NO: 425114 - DNA, 654 bp, Homo sapiens
tctcatttttattctggcagttcgaagaaacttccccaaatctgacaagtgaatattctcatggttggtggaaaagtgcctgatgtaccagaaagagcactggacttggaaccagaagacctgggtttggggtggtagctggtaggcagctggctgagtgacctgaggctgatgctacgctcaggcacacagattttagtgaagaatgatgaacttgtgaaagttcagctgtttcaggagctccaggtcactggcagagagacggggtcttactatgttgtccaggctggtttcaaactcctggaatcaagcgatcttcctgccttggcctccagaaatgctgggactgcgcctggaatagatacgggttgcccctcatcttccagctgacaccatccagcacctttcagatactggcaaaggagcagtgtttcaaaattactttccaaatggcctcctacaaggcagtcctcagagagaagcaaggttctgcatcttaaaccttccttggtttcttaggttccaaagctgtttctatcagtctccaagcaaccaactctttagaattccatgagtctactcagagaacttgtgggttcagtcgggggtatatcttcaaccatttattaaatttccttctttgtaaactgaaaa

SEQ ID NO: 425115 - DNA, 643 bp, Homo sapiens
ctcccacgctctggcctccttctcaggaggcagaagccaggcttctctttcctccaggttcacatctagagaaggtggccgacccagcatatctggatgcatgcagggatgatggatgagagggcggggtgcttcccggacggtgctggctggctttgatttcttcagcttcttttcgggattggcagagctttctgtcttcacagccagggaggtgtctcctgttaagggacttgaggaacccaggaacttgaagctaacaggtttctgaggccgggccttcctgatctggggagtatggatgatgtcattggtattgtagaggtggtcaaagctgtactggctataaggaatgctgggcaggcctcgctgccacaccacctcctgagagaaggtaaggtttgcagcagccattttcaaatattggctcttgcggtgtagacggtactgtgagctgaagaagaccataggcacactggagacagaggcacactcctccttgcctttcaattttgagtagtttaaaatcatgccccatcccagtcgtgggggcagtgactgatagaagcaatgggggagaaaggtctttcccttctgggtcctggtcataccgcgtcccagcaaatgcttccttccacactgc

SEQ ID NO: 425116 - DNA, 495 bp, Homo sapiens
tctcctgggctcaggtgatcgcccctgagtatctcacactacaggtgcaccctaccatacctggctaatttttttgttttttagtagaaacaagtgaggtcttgtgttgcccaggctggtctcaaactcctggcctcaagtgatcctcctgcctcagcctcccaaagtgctgggattacaagcgttagccactgcacctagcccttatagcctttttttttttttgagttttgtatggttttttattactgcaattgctgctagtgccccactttttaatcattctgcaaagtaggccaaatttaggtagcttgatgatctttattataggtattcagtctctgccatatttagtatcttccctcagatccattattgccgggcatggtggctcacgcctgtaatcccagcattttgggaggctaaggtgggtggatcacttgagcccagtagctcgagagcagcctgggcaacgtggcaagacccatctctaca

SEQ ID NO: 425117 - DNA, 4841 bp, Homo sapiens
cttacggcagtctcgcgggatttccccctctcgcgggaattatttgaacgttcgagcggtaaatactccctggggctgtcatagaagactcctcggagagcgctgcctctgggttggcgggctggcaggctgtagccgagcgcgggcaggactcgtcccggcagggttccagagccatgggagcggaaaggaggctgctgtcgattaaggaggcctttcggctggcgcagcagccgcaccagaaccaggcgaagctggtggtggcgctgagccgcacctaccgcacgatggatgataagacagtttttcatgaggagttcattcattaccttaaatatgttatggtggtctataaacgtgaaccagctgtggagagggtaatagaatttgcagcaaagtttgttacctcatttcaccaatcagatatggaagatgatgaggaagaggaagatggtggccttttaaattatttgtttacttttctcttaaagtctcatgaagcaaacagcaatgcagtgagatttagagtgtgcctgctcataaacaagcttttgggaagtatgccagaaaatgctcagattgatgatgatgtgtttgataaaattaataaagccatgcttattagattgaaagataagattccaaatgtgagaatacaggcagttctggcgctttcacgacttcaggatcccaaggatgatgaatgcccagtggttaatgcatatgctactttgattgaaaatgattcaaatccagaagttagacgggcagtgttatcatgtattgcaccatcagcaaagactttgccaaaaattgtagggcgcaccaaggatgtgaaagaggctgtcagaaagctggcttatcaggttttagctgaaaaggttcatatgagagctatgtccattgctcagagagtaatgctccttcaacaaggtcttaatgacagatcagacgctgtgaaacaagctatgcagaagcatcttcttcaaggctggttacggttctctgaaggaaatatcttagagttgctccatcggttggatgtagaaaattcttctgaagtggcagtctctgttctcaatgccttgttttcaataactcctctcagtgaactggtgggactctgtaaaaacaatgatggcaggaaattgattccagtggaaacattaactcctgaaattgctttgtattggtgtgccctttgtgaatatttgaaatcaaaaggagatgaaggtgaagaatttttagagcagattttgccagagcctgtagtatatgcagactatttattgagttacatccagagcattccagttgttaatgaagaacacagaggtgatttttcctatattggaaatttgatgacaaaagaattcataggtcaacaattgattctaattattaagtctttggataccagtgaagaaggaggaagaaaaaaactgctggctgttttacaggagattcttattttacccacaatcccaatatccctggtttcttttcttgttgaaagactactccacatcattatagatgataataagagaacacaaattgttacagaaattatctcagagattcgggcgcccattgttactgttggtgttaataacgatccagctgatgtaagaaagaaagaactcaagatggctgaaataaaagttaagcttatcgaagccaaagaagctttggaaaattgcattaccttacaggattttaatcgggcatcagaattaaaagaagaaataaaagcattagaagatgccagaataaaccttttgaaagagacagagcaacttgaaattaaagaagtccacatagagaagaatgatgctgaaacattgcagaaatgtcttattttatgctatgaactgttgaagcagatgtccatttcaacaggcttaagtgcaaccatgaatggaatcatcgaatctttgattcttcctggaataataagtattcatcctgttgtaagaaacctggctgttttatgcttgggatgctgtggactacagaatcaggattttgcaaggaaacacttcgtattactattgcaggttttgcaaattgatgatgtcacaataaaaataagtgctttaaaggcaatctttgaccaactgatgacgttcgggattgaaccatttaaaactaaaaaaatcaaaacacttcattgtgaaggtacagaaataaacagtgatgatgagcaagaatcaaaagaagttgaagagactgctacagctaagaatgttctgaaactcctttctgatttcttagatagtgaggtatctgaacttaggactggagctgcagaaggactagccaagctgatgttctctgggcttttggtcagcagcaggattctttctcgtcttattttgttatggtacaatcctgtgactgaagaggatgttcaacttcgacattgcctaggcgtgttcttccccgtgtttgcttatgcaagcaggactaatcaggaatgctttgaagaagcttttcttccaaccctgcaaacactggccaatgcccctgcatcttctcctttagctgaaattgatatcacaaatgttgctgagttacttgtagatttgacaagaccaagtggattaaatcctcaggccaagacttcccaagattatcaggccttaacagtacatgacaatttggctatgaaaatttgcaatgagatcttaacaagtccgtgctcgccagaaattcgagtctatacaaaagccttgagttctttagaactcagtagccatcttgcaaaagatcttctggttctattgaatgagattctggagcaagtaaaagataggacatgtctgagagctttggagaaaatcaagattcagttagaaaaaggaaataaagaatttggtgaccaagctgaagcagcacaggatgccaccttgactacaactactttccaaaatgaagatgaaaagaataaagaagtatatatgactccactcaggggtgtaaaagcaacccaagcatcaaagtctactcagctaaagactaacagaggacagagaaaagtgacagtttcagctaggacgaacaggaggtgtcagactgctgaagccgactctgaaagtgatcatgaagttccagaaccagaatcagaaatgaagatgagactaccaagacgagccaaaaccgcagcactagaaaaaagtaaacttaaccttgcccaatttctcaatgaagatctaagttaggaaagacgatggaggtggaatcctttaagattatgtccagttatttgctttaataaagaagaagttacccttgtcaaaatcagaacaaacctgatgtctttctgaagattttctgctgtgcgcttccacgttactttggcctgtattaaagcagtagagcagcatcagttattatagtccagaaaaagtgtgcatcagtcagtcacacagatttatcacaatctgaggtgggcctaggaatctcatttttaaatagtctctccaagtgattcttatgaactctttatgtttaaaatcatgtcattatggaaaacttacaagtgtaactagctagtagcttgcatttgagaagcttatgacttagatgggcagaatcaacaaagatgaaaccgcctgaggacacatttaacaagtaacatttctagggaaaatgaaggaagtaccacaaactggctagaaaggagcttatcaatcaccagtgaggaagaccagtataacgttcaacaacagttattttgacaaaaacttattttgtgattcctacagtgaaaacatttttggtgatatctgcctgggaaatctctcttcctaaagtatttgtatatgggagtccttgtttgtgaatgtttcctggattagggaggtgtcaacataaatgtattattaaccatgaagctgctcgctatatttttggcataacaaaataatatttatttactgtggataataattctagtgggaatataatgtgacaggaacttctctttatatacgctaccaatttatgagcactattcactgtcaatttcatttcttgtcttttgaaattgacacttggcctgacttacgaaacttgtactatatgaaattggtcctcttttctgcaatacccaacgaaacaccttttctctttattattcagaaatgtcctaacatggatctgtttgttttaataattgtgctttttttaggcttatcatctactagaggccatttacttaaggtgaaattttaagatggagctaaagtaagatcactggtttttagaaccaaattgctatacatatgtgcctcatagaacttataaaaggagtcaaagtttcaaagcaagatagttattaagcaaaaggaaaaatggtaatgatagaaagtcagttaaaaatagatgattgttcttcattctgtttgttggctctgtgttctcctgtgcttcagattccttatgtgttgttgttttaaagacaatttgcagggggttgggagaaggactgaaaaggtacattaagtgtgctgtaaggaaaagtcttagaaacataataagctaaaatcccattcacacatggccaggctatccaaaaagaaaggagccatgttctcatgtggtttaccataccaaagcttgctttctctggcatgggaaaaataaatttaagcaccaaacctttagtattctgagtattcagtttttagacatagtcatgtagccattgctgaaactgtgctttgcactattaaaggtagggaatgtcctgcttttaaaagtcatccctttaactttaaaataaaaggctaaggtacaataaaacagatgtaaatccatttaccatttttcattca

SEQ ID NO: 425118 - DNA, 3849 bp, Homo sapiens
caagatctttttattgttttattatttcctcattacaaaagcaatgcatgcttattacagaagaatcagaaagtacatccagacaaactactataaggaacactaataatcccacccatgagccaaccatgattttgattttagaaatctattttttaaggcccttttcgatgcagatttaattttttctaaaatggagtctggtcataatattgttttgtaaccagtaaattatttaaataccaattgctggatattgttccaaattagtcccatattgttggatgttttcttggggataaatgcattagtaaaagcaggtaaggagtagaaaaaagtgtaacatgaatgaagtagagtatataattttcagactgtcacattgaacagtttggttttgatcagattttttttgtggtatatcacaccatgagaacaccatcctttttaatagaccaaacttcatatattcatattgttttattccttataaatgagaaacatcacaagccaaactttgtcttactccttaaccttgtaaatttctagtaagtagaatcttataatccccagtatataaaggttctagtttttacattgaaatatattttagaacacatttgaattggtcatgtatgttattttacaagaagccattattaccttactatgttttatcaccttccaagaaaaaaaaaagttgtttctttagcacctgtttatgcacctaacctacctttctaacccttaattttcatgagtctccacagactttgtgctatagcaataatagaggtacttcattataacacatttttcatatactgtcctcaaatacattgaactaaaatttgccttcttttaacttgcttgaaatttccttattttcccttactcattattagtgcttacaaaataaattaagttttaatcttgcttgggttcctttttctgtggcagtgataactggtaccaagatggctagaacaagtaggagatacatgtgttgaaaggattgttgtgttgaagacaaaggatttagttagcctagaaactagattaaaaacaaaaagcaactgataataaatcctgataatgaattatactatcttcaaggacagagaaaagtgacagtttcagctaggacgaacaggaggtgtcagactgctgaagccgactctgaaaggtatgtcatgcatgtctagaatatatggaggcctatcttcactttttatttctacaagtagaaaaaaactaattttcttgcgaatgagagagaatatataacaagatagtgaaaactataaatagctgtcttaggtatatagtctaaaattccatcatcaagagcatttgacttcttacggcgtgtttgcttttgcctattagctggcatggtctttagtactatctttaatatgttgtttcaatttttaattacatgatgtgactcctctttgatcttcagttagcaaactcttgattttgataatatttgggttctctacacttacatactgatagaataattctgtctataatttgggtatattgtgtggtagagtgttttatttttggcttctgtcagtcaagccactgttagagctgaaagttggtagctgtcttgtattcatttgcaaaattgtattgtgtgtattttcagtacatagttttacactgttgattaaatttgtcttttttggggggaaacttgttttttactatgtttttggaatttattgcttaaatcaagagagagaacttaatttttttgtcacttcttgagtttcaaagaaatctcttttggacagttatggtcctcgtttaattacaagcttcattacaagtttgtggctttttttcctgtataacaccaggttctgttatagtatataaaatcattagctagattttccctgattcactttgctagatagccaagtcagtgtttttttgacattgagattttagttttaagctaagtcaatggaatcaggctatcaattaaacactgatagaatgtgagtcagaaacaaaaaagttttatttataaataaactggttttaaagcttgtatctaaattcgtgtattttcaacatctatttagtgatcatgaagttccagaaccagaatcagaaatgaagatgagactaccaagacgagccaaaaccgcagcactagaaaaaagtaaacttaaccttgcccaatttctcaatgaagatctaagttaggaaagacgatggaggtggaatcctttaagattatgtccagttatttgctttaataaagaagaagttacccttgtcaaaatcagaacaaacctgatgtctttctgaagattttctgctgtgcgcttccacgttactttggcctgtattaaagcagtagagcagcatcagttattatagtccagaaaaagtgtgcatcagtcagtcacacagatttatcacaatctgaggtgggcctaggaatctcatttttaaatagtctctccaagtgattcttatgaactctttatgtttaaaatcatgtcattatggaaaacttacaagtgtaactagctagtagcttgcatttgagaagcttatgacttagatgggcagaatcaacaaagatgaaaccgcctgaggacacatttaacaagtaacatttctagggaaaatgaaggaagtaccacaaactggctagaaaggagcttatcaatcaccagtgaggaagaccagtataacgttcaacaacagttattttgacaaaaacttattttgtgattcctacagtgaaaacatttttggtgatatctgcctgggaaatctctcttcctaaagtatttgtatatgggagtccttgtttgtgaatgtttcctggattagggaggtgtcaacataaatgtattattaaccatgaagctgctcgctatatttttggcataacaaaataatatttatttactgtggataataattctagtgggaatataatgtgacaggaacttctctttatatacgctaccaatttatgagcactattcactgtcaatttcatttcttgtcttttgaaattgacacttggcctgacttacgaaacttgtactatatgaaattggtcctcttttctgcaatacccaacgaaacaccttttctctttattattcagaaatgtcctaacatggatctgtttgttttaataattgtgctttttttaggcttatcatctactagaggccatttacttaaggtgaaattttaagatggagctaaagtaagatcactggtttttagaaccaaattgctatacatatgtgcctcatagaacttataaaaggagtcaaagtttcaaagcaagatagttattaagcaaaaggaaaaatggtaatgatagaaagtcagttaaaaatagatgattgttcttcattctgtttgttggctctgtgttctcctgtgcttcagattccttatgtgttgttgttttaaagacaatttgcagggggttgggagaaggactgaaaaggtacattaagtgtgctgtaaggaaaagtcttagaaacataataagctaaaatcccattcacacatggccaggctatccaaaaagaaaggagccatgttctcatgtggtttaccataccaaagcttgctttctctggcatgggaaaaataaatttaagcaccaaacctttagtattctgagtattcagtttttagacatagtcatgtagccattgctgaaactgtgctttgcactattaaaggtagggaatgtcctgcttttaaaagtcatccctttaactttaaaataaaaggctaaggtacaataaaacagatgtaaatccatttaccatttttcattca

SEQ ID NO: 425119 - DNA, 420 bp, Homo sapiens
caatttaaaatatttcatgaggttatcttatttatattgttgtattattccctttaatagaaaagaataaagaagtatatatgactccactcaggggtgtaaaagcaacccaagcatcaaagtctactcagctaaagactaacagaggacagagaaaagtgacagtttcagctaggacgaacaggaggtgtcagactgctgaagccgactctgaaagtgatcatgaagttccagaaccagaatcagaaatgaagatgagactaccaagacgagccaaaaccgcagcactagaaaaaagtaaacttaaccttgcccaatttctcaatgaagatctaagttaggaaagacgatggaggtggaatcctttaagattatgtccagttatttgctttaataaagaagaagttacccttgtcaaaa

SEQ ID NO: 425120 - DNA, 559 bp, Homo sapiens
atggaagctagagggagcctttgttcacctatgtttcaaatgactcaatagacgctgtgaaacaagctatgcagaagcatcttcttcaaggctggttacggttctctgaaggaaatatcttagagttgctccatcggttggatgtagaaaattcttctgaagtggcagtctctgttctcaatgccttgttttcaataactcctctcagtgaactggtgggactctgtaaaaacaatgatggcaggaaattgattccagtggaaacattaactcctgaaattgctttgtattggtgtgccctttgtgaatatttgaaatcaaaaggagatgaaggtgaagaatttttagagcagattttgccagagcctgtagtatatgcagactatttattgagttacatccagagcattccagttgttaatgaagaacacagaggtgatttttcctatattggaaatttgatgacaaaagaattcataggtcaacaattgattctaattattaagtctttggataccagtgaagaaggaggaaggtatgtctaaatgttaacactcat

SEQ ID NO: 425121 - DNA, 3303 bp, Homo sapiens
cttacggcagtctcgcgggatttccccctctcgcgggaattatttgaacgttcgagcggtaaatactccctggggctgtcatagaagactcctcggagagcgctgcctctgggttggcgggctggcaggctgtagccgagcgcgggcaggactcgtcccggcagggttccagagccatgggagcggaaaggaggctgctgtcgattaaggaggcctttcggctggcgcagcagccgcaccagaaccaggcgaagctggtggtggcgctgagccgcacctaccgcacgatggatgataagacagtttttcatgaggagttcattcattaccttaaatatgttatggtggtctataaacgtgaaccagctgtggagagggtaatagaatttgcagcaaagtttgttacctcatttcaccaatcagatatggaagatgatgaggaagaggaagatggtggccttttaaattatttgtttacttttctcttaaagtctcatgaagcaaacagcaatgcagtgagatttagagtgtgcctgctcataaacaagcttttgggaagtatgccagaaaatgctcagattgatgatgatgtgtttgataaaattaataaagccatgcttattagattgaaagataagattccaaatgtgagaatacaggcagttctggcgctttcacgacttcaggatcccaaggatgatgaatgcccagtggttaatgcatatgctactttgattgaaaatgattcaaatccagaagttagacgggcagtgttatcatgtattgcaccatcagcaaagactttgccaaaaattgtagggcgcaccaaggatgtgaaagaggctgtcagaaagctggcttatcaggttttagctgaaaaggttcatatgagagctatgtccattgctcagagagtaatgctccttcaacaaggtcttaatgacagatcagacgctgtgaaacaagctatgcagaagcatcttcttcaaggctggttacggttctctgaaggaaatatcttagagttgctccatcggttggatgtagaaaattcttctgaagtggcagtctctgttctcaatgccttgttttcaataactcctctcagtgaactggtgggactctgtaaaaacaatgatggcaggaaattgattccagtggaaacattaactcctgaaattgctttgtattggtgtgccctttgtgaatatttgaaatcaaaaggagatgaaggtgaagaatttttagagcagattttgccagagcctgtagtatatgcagactatttattgagttacatccagagcattccagttgttaatgaagaacacagaggtgatttttcctatattggaaatttgatgacaaaagaattcataggtcaacaattgattctaattattaagtctttggataccagtgaagaaggaggaagaaaaaaactgctggctgttttacaggagattcttattttacccacaatcccaatatccctggtttcttttcttgttgaaagactactccacatcattatagatgataataagagaacacaaattgttacagaaattatctcagagattcgggcgcccattgttactgttggtgttaataacgatccagctgatgtaagaaagaaagaactcaagatggctgaaataaaagttaagcttatcgaagccaaagaagctttggaaaattgcattaccttacaggattttaatcgggcatcagaattaaaagaagaaataaaagcattagaagatgccagaataaaccttttgaaagagacagagcaacttgaaattaaagaagtccacatagagaagaatgatgctgaaacattgcagaaatgtcttattttatgctatgaactgttgaagcagatgtccatttcaacaggcttaagtgcaaccatgaatggaatcatcgaatctttgattcttcctggaataataagtattcatcctgttgtaagaaacctggctgttttatgcttgggatgctgtggactacagaatcaggattttgcaaggaaacacttcgtattactattgcaggttttgcaaattgatgatgtcacaataaaaataagtgctttaaaggcaatctttgaccaactgatgacgttcgggattgaaccatttaaaactaaaaaaatcaaaacacttcattgtgaaggtacagaaataaacagtgatgatgagcaagaatcaaaagaagttgaagagactgctacagctaagaatgttctgaaactcctttctgatttcttagatagtgaggtatctgaacttaggactggagctgcagaaggactagccaagctgatgttctctgggcttttggtcagcagcaggattctttctcgtcttattttgttatggtacaatcctgtgactgaagaggatgttcaacttcgacattgcctaggcgtgttcttccccgtgtttgcttatgcaagcaggactaatcaggaatgctttgaagaagcttttcttccaaccctgcaaacactggccaatgcccctgcatcttctcctttagctgaaattgatatcacaaatgttgctgagttacttgtagatttgacaagaccaagtggattaaatcctcaggccaagacttcccaagattatcaggccttaacagtacatgacaatttggctatgaaaatttgcaatgagatcttaacaagtccgtgctcgccagaaattcgagtctatacaaaagccttgagttctttagaactcagtagccatcttgcaaaagatcttctggttctattgaatgagattctggagcaagtaaaagataggacatgtctgagagctttggagaaaatcaagattcagttagaaaaaggaaataaagaatttggtgaccaagctgaagcagcacaggatgccaccttgactacaactactttccaaaatgaagatgaaaagaataaagaagtatatatgactccactcaggggtgtaaaagcaacccaagcatcaaagtctactcagctaaagactaacagaggacagagaaaagtgacagtttcagctaggacgaacaggaggtgtcagactgctgaagccgactctgaaagtgatcatgaagttccagaaccagaatcagaaatgaagatgagactaccaagacgagccaaaaccgcagcactagaaaaaagtaaacttaaccttgcccaatttctcaatgaagatctaagttaggaaagacgatggaggtggaatcctttaagattatgtccagttatttgctttaataaagaagaagttacccttgtcaaaa

SEQ ID NO: 425122 - DNA, 3253 bp, Homo sapiens
cttacggcagtctcgcgggatttccccctctcgcgggaattatttgaacgttcgagcggtaaatactccctggggctgtcatagaagactcctcggagagcgctgcctctgggttggcgggctggcaggctgtagccgagcgcgggcaggactcgtcccggcagggttccagagccatgggagcggaaaggaggctgctgtcgattaaggaggcctttcggctggcgcagcagccgcaccagaaccaggcgaagctggtggtggcgctgagccgcacctaccgcacgatggatgataagacagtttttcatgaggagttcattcattaccttaaatatgttatggtggtctataaacgtgaaccagctgtggagagggtaatagaatttgcagcaaagtttgttacctcatttcaccaatcagatatggaagatgatgaggaagaggaagatggtggccttttaaattatttgtttacttttctcttaaagtctcatgaagcaaacagcaatgcagtgagatttagagtgtgcctgctcataaacaagcttttgggaagtatgccagaaaatgctcagattgatgatgatgtgtttgataaaattaataaagccatgcttattagattgaaagataagattccaaatgtgagaatacaggcagttctggcgctttcacgacttcaggatcccaaggatgatgaatgcccagtggttaatgcatatgctactttgattgaaaatgattcaaatccagaagttagacgggcagtgttatcatgtattgcaccatcagcaaagactttgccaaaaattgtagggcgcaccaaggatgtgaaagaggctgtcagaaagctggcttatcaggttttagctgaaaaggttcatatgagagctatgtccattgctcagagagtaatgctccttcaacaaggtcttaatgacagatcagacgctgtgaaacaagctatgcagaagcatcttcttcaaggctggttacggttctctgaaggaaatatcttagagttgctccatcggttggatgtagaaaattcttctgaagtggcagtctctgttctcaatgccttgttttcaataactcctctcagtgaactggtgggactctgtaaaaacaatgatggcaggaaattgattccagtggaaacattaactcctgaaattgctttgtattggtgtgccctttgtgaatatttgaaatcaaaaggagatgaaggtgaagaatttttagagcagattttgccagagcctgtagtatatgcagactatttattgagttacatccagagcattccagttgttaatgaagaacacagaggtgatttttcctatattggaaatttgatgacaaaagaattcataggtcaacaattgattctaattattaagtctttggataccagtgaagaaggaggaagaaaaaaactgctggctgttttacaggagattcttattttacccacaatcccaatatccctggtttcttttcttgttgaaagactactccacatcattatagatgataataagagaacacaaattgttacagaaattatctcagagattcgggcgcccattgttactgttggtgttaataacgatccagctgatgtaagaaagaaagaactcaagatggctgaaataaaagttaagcttatcgaagccaaagaagctttggaaaattgcattaccttacaggattttaatcgggcatcagaattaaaagaagaaataaaagcattagaagatgccagaataaaccttttgaaagagacagagcaacttgaaattaaagaagtccacatagagaagaatgatgctgaaacattgcagaaatgtcttattttatgctatgaactgttgaagcagatgtccatttcaacaggcttaagtgcaaccatgaatggaatcatcgaatctttgattcttcctggaataataagtattcatcctgttgtaagaaacctggctgttttatgcttgggatgctgtggactacagaatcaggattttgcaaggaaacacttcgtattactattgcaggttttgcaaattgatgatgtcacaataaaaataagtgctttaaaggcaatctttgaccaactgatgacgttcgggattgaaccatttaaaactaaaaaaatcaaaacacttcattgtgaaggtacagaaataaacagtgatgatgagcaagaatcaaaagaagttgaagagactgctacagctaagaatgttctgaaactcctttctgatttcttagatagtgaggtatctgaacttaggactggagctgcagaaggactagccaagctgatgttctctgggcttttggtcagcagcaggattctttctcgtcttattttgttatggtacaatcctgtgactgaagaggatgttcaacttcgacattgcctaggcgtgttcttccccgtgtttgcttatgcaagcaggactaatcaggaatgctttgaagaagcttttcttccaaccctgcaaacactggccaatgcccctgcatcttctcctttagctgaaattgatatcacaaatgttgctgagttacttgtagatttgacaagaccaagtggattaaatcctcaggccaagacttcccaagattatcaggccttaacagtacatgacaatttggctatgaaaatttgcaatgagatcttaacaagtccgtgctcgccagaaattcgagtctatacaaaagccttgagttctttagaactcagtagccatcttgcaaaagatcttctggttctattgaatgagattctggagcaagtaaaagataggacatgtctgagagctttggagaaaatcaagattcagttagaaaaaggaaataaagaatttggtgaccaagctgaagcagcacaggatgccaccttgactacaactactttccaaaatgaagatgaaaagaataaagaagtatatatgactccactcaggggtgtaaaagcaacccaagcatcaaagtctactcagctaaagactaacagaggacagagaaaagtgacagtttcagctaggacgaacaggaggtgtcagactgctgaagccgactctgaaagataggacatgtctgagagctttggagaaaatcaagattcagttagaaaaaggaaataaagaatttggtgaccaagctgaagcagcacaggatgccaccttgactacaactactttccaaaatgaagatgaaaagaataaataagtatatatga

SEQ ID NO: 425123 - DNA, 3334 bp, Homo sapiens
cttacggcagtctcgcgggatttccccctctcgcgggaattatttgaacgttcgagcggtaaatactccctggggctgtcatagaagactcctcggagagcgctgcctctgggttggcgggctggcaggctgtagccgagcgcgggcaggactcgtcccggcagggttccagagccatgggagcggaaaggaggctgctgtcgattaaggaggcctttcggctggcgcagcagccgcaccagaaccaggcgaagctggtggtggcgctgagccgcacctaccgcacgatggatgataagacagtttttcatgaggagttcattcattaccttaaatatgttatggtggtctataaacgtgaaccagctgtggagagggtaatagaatttgcagcaaagtttgttacctcatttcaccaatcagatatggaagatgatgaggaagaggaagatggtggccttttaaattatttgtttacttttctcttaaagtctcatgaagcaaacagcaatgcagtgagatttagagtgtgcctgctcataaacaagcttttgggaagtatgccagaaaatgctcagattgatgatgatgtgtttgataaaattaataaagccatgcttattagattgaaagataagattccaaatgtgagaatacaggcagttctggcgctttcacgacttcaggatcccaaggatgatgaatgcccagtggttaatgcatatgctactttgattgaaaatgattcaaatccagaagttagacgggcagtgttatcatgtattgcaccatcagcaaagactttgccaaaaattgtagggcgcaccaaggatgtgaaagaggctgtcagaaagctggcttatcaggttttagctgaaaaggttcatatgagagctatgtccattgctcagagagtaatgctccttcaacaaggtcttaatgacagatcagacgctgtgaaacaagctatgcagaagcatcttcttcaaggctggttacggttctctgaaggaaatatcttagagttgctccatcggttggatgtagaaaattcttctgaagtggcagtctctgttctcaatgccttgttttcaataactcctctcagtgaactggtgggactctgtaaaaacaatgatggcaggaaattgattccagtggaaacattaactcctgaaattgctttgtattggtgtgccctttgtgaatatttgaaatcaaaaggagatgaaggtgaagaatttttagagcagattttgccagagcctgtagtatatgcagactatttattgagttacatccagagcattccagttgttaatgaagaacacagaggtgatttttcctatattggaaatttgatgacaaaagaattcataggtcaacaattgattctaattattaagtctttggataccagtgaagaaggaggaagaaaaaaactgctggctgttttacaggagattcttattttacccacaatcccaatatccctggtttcttttcttgttgaaagactactccacatcattatagatgataataagagaacacaaattgttacagaaattatctcagagattcgggcgcccattgttactgttggtgttaataacgatccagctgatgtaagaaagaaagaactcaagatggctgaaataaaagttaagcttatcgaagccaaagaagctttggaaaattgcattaccttacaggattttaatcgggcatcagaattaaaagaagaaataaaagcattagaagatgccagaataaaccttttgaaagagacagagcaacttgaaattaaagaagtccacatagagaagaatgatgctgaaacattgcagaaatgtcttattttatgctatgaactgttgaagcagatgtccatttcaacaggcttaagtgcaaccatgaatggaatcatcgaatctttgattcttcctggaataataagtattcatcctgttgtaagaaacctggctgttttatgcttgggatgctgtggactacagaatcaggattttgcaaggaaacacttcgtattactattgcaggttttgcaaattgatgatgtcacaataaaaataagtgctttaaaggcaatctttgaccaactgatgacgttcgggattgaaccatttaaaactaaaaaaatcaaaacacttcattgtgaaggtacagaaataaacagtgatgatgagcaagaatcaaaagaagttgaagagactgctacagctaagaatgttctgaaactcctttctgatttcttagatagtgaggtatctgaacttaggactggagctgcagaaggactagccaagctgatgttctctgggcttttggtcagcagcaggattctttctcgtcttattttgttatggtacaatcctgtgactgaagaggatgttcaacttcgacattgcctaggcgtgttcttccccgtgtttgcttatgcaagcaggactaatcaggaatgctttgaagaagcttttcttccaaccctgcaaacactggccaatgcccctgcatcttctcctttagctgaaattgatatcacaaatgttgctgagttacttgtagatttgacaagaccaagtggattaaatcctcaggccaagacttcccaagattatcaggccttaacagtacatgacaatttggctatgaaaatttgcaatgagatcttaacaagtccgtgctcgccagaaattcgagtctatacaaaagccttgagttctttagaactcagtagccatcttgcaaaagatcttctggttctattgaatgagattctggagcaagtaaaagataggacatgtctgagagctttggagaaaatcaagattcagttagaaaaaggaaataaagaatttggtgaccaagctgaagcagcacaggatgccaccttgactacaactactttccaaaatgaagatggtaatcacatactgaacagaatatttataagaaaagaataaagaagtatatatgactccactcaggggtgtaaaagcaacccaagcatcaaagtctactcagctaaagactaacagaggacagagaaaagtgacagtttcagctaggacgaacaggaggtgtcagactgctgaagccgactctgaaagtgatcatgaagttccagaaccagaatcagaaatgaagatgagactaccaagacgagccaaaaccgcagcactagaaaaaagtaaacttaaccttgcccaatttctcaatgaagatctaagttaggaaagacgatggaggtggaatcctttaagattatgtccagttatttgctttaataaagaagaagttacccttgtcaaaa

SEQ ID NO: 425124 - DNA, 1362 bp, Homo sapiens
cttacggcagtctcgcgggatttccccctctcgcgggaattatttgaacgttcgagcggtaaatactccctggggctgtcatagaagactcctcggagagcgctgcctctgggttggcgggctggcaggctgtagccgagcgcgggcaggactcgtcccggcagggttccagagccatgggagcggaaaggaggctgctgtcgattaaggaggcctttcggctggcgcagcagccgcaccagaaccaggcgaagctggtggtggcgctgagccgcacctaccgcacgatggatgataagacagtttttcatgaggagttcattcattaccttaaatatgttatggtggtctataaacgtgaaccagctgtggagagggtaatagaatttgcagcaaagtttgttacctcatttcaccaatcagatatggaagatgatgaggaagaggaagatggtggccttttaaattatttgtttacttttctcttaaagtctcatgaagcaaacagcaatgcagtgagatttagagtgtgcctgctcataaacaagcttttgggaagtatgccagaaaatgctcagattgatgatgatgtgtttgataaaattaataaagccatgcttattagattgaaagataagattccaaatgtgagaatacaggcagttctggcgctttcacgacttcaggatcccaaggatgatgaatgcccagtggttaatgcatatgctactttgattgaaaatgattcaaatccagaagttagacgggcagtgttatcatgtattgcaccatcagcaaagactttgccaaaaattgtagggcgcaccaaggatgtgaaagaggctgtcagaaagctggcttatcaggttttagctgaaaaggttcatatgagagctatgtccattgctcagagagtaatgctccttcaacaaggtcttaatgacagatcagacgctgtgaaacaagctatgcagaagcatcttcttcaaggctggttacggttctctgaaggaaatatcttagagttgctccatcggttggatgtagaaaattcttctgaagtggcagtctctgttctcaatgccttgttttcaataactcctctcagtgaactggtgggactgttacagaaattatctcagagattcgggcgcccattgttactgttggtgttaataacgatccagctgtatgaaggaattcagctccagtcaacagcagaaccagaattctcaactgatgatggagatgtattatttgccaggtgtcattctaaacactttacaactgaacttcacaattccacttccattagatgggttttcttatctccacttagctaaagaaactcgcctgccaccc

SEQ ID NO: 425125 - DNA, 355 bp, Homo sapiens
gtaagcgctcccggccccggccgccgcctctcgcccgccccggcccaccctccctcaggggccctccgtggccctcgggctcggcgcaccgtgactccagccttgttcaccttcgcgactcacttcatagggatctgaggttcggagaagtcagggacttacccgaggtcgcctgggcccaggccagaaagcctccgaagcctgggcgtcgttcacacgggccccgccttggcttttctgagccgacacccccagcttctgggcggcgtggaccgttattccttagtccgatcgtgaacgtggagagaaacatttacgaccaccgaggcgatcagacatcaaatattgaaccgca

SEQ ID NO: 425126 - DNA, 699 bp, Homo sapiens
gtctatacaaaagccttgagttctttagaactcagtagccatcttgcaaaagatcttctggttctattgaatgagattctggaggtaaagtagtttctcattactctaaattagtttgtgtttatatttatacatgtagaatttacatggttgtattagattatacatatgttagcatattgtgacttatttgaagtattttcttcataaatttcatataatttagtgtttttaaacaacttgatatgtattggtactattttcaaagattagggaatgcggtgtttacaaaatgttaataatgttttcttttatagcaagtaaaagataggacatgtctgagagctttggagaaaatcaagattcagttagaaaaaggaaataaagaatttggtgaccaagctgaagcagcacaggatgccaccttgactacaactactttccaaaatgaagatggtaatcacatactgaacagaatatttataaggttctgtttttttttttccatctttactgagacatatttttttctactctaacatgtttggttggacatcagaaatgaatgaaattttttttctaattaatcctcttgggaaagagcattactgataaatgtttattctgcttttcaagtgttttttggcatgcatttctcaacatatgaccatctttttaagagttttgcttctttttcca

SEQ ID NO: 425127 - DNA, 905 bp, Homo sapiens
  misc_feature (45)..(45): n is a, c, g, or t
  misc_feature (59)..(59): n is a, c, g, or t
gggctctcttgtctaaagaagatgttaatttgcacaggcgtaggngggtttcccgggtngctagcaccagactaatcaggaatgctttgaagaagcttttcttccaaccctgcaaacactggccaatgcccctgcatcttctcctttagctgaaattgatatcacaaatgttgctgagttacttgtagatttgacaagaccaagtggattaaatcctcaggccaagacttcccaagattatcaggccttaacagtacatgacaatttggctatgaaaatttgcaatgagatcttaacaagtccgtgctcgccagaaattcgagtctatacaaaagccttgagttctttagaactcagtagccatcttgcaaaagatcttctggttctattgaatgagattctggagcaagtaaaagataggacatgtctgagagctttggagaaaatcaagattcagttagaaaaaggaaataaagaatttggtgaccaagctgaagcagcacaggatgccaccttgactacaactactttccaaaatgaagatgaaaagaataaagaagtatatatgactccactcaggggtgtaaaagcaacccaagcatcaaagtctactcagctaaagactaacagaggacagagaaaagtgacagtttcagctaggacgaacaggaggtgtcagactgctgaagccgactctgaaagtgatcatgaagttccagaaccagaatcagaaatgaagatgagactaccaagacgagccaaaaccgcagcactagaaaaaagtaaacttaaccttgcccaatttctcaatgaagatctaagttaggaaagacgatggaggtggaatcctttaagattatgtccagttatttgctttaataaagaagaagttacccttgtcaaaa

SEQ ID NO: 425128 - DNA, 3941 bp, Homo sapiens
atggaagctagagggagcctttgttcacctatgtttcaaatgactcaatagacgctgtgaaacaagctatgcagaagcatcttcttcaaggctggttacggttctctgaaggaaatatcttagagttgctccatcggttggatgtagaaaattcttctgaagtggcagtctctgttctcaatgccttgttttcaataactcctctcagtgaactggtgggactctgtaaaaacaatgatggcaggaaattgattccagtggaaacattaactcctgaaattgctttgtattggtgtgccctttgtgaatatttgaaatcaaaaggagatgaaggtgaagaatttttagagcagattttgccagagcctgtagtatatgcagactatttattgagttacatccagagcattccagttgttaatgaagaacacagaggtgatttttcctatattggaaatttgatgacaaaagaattcataggtcaacaattgattctaattattaagtctttggataccagtgaagaaggaggaagaaaaaaactgctggctgttttacaggagattcttattttacccacaatcccaatatccctggtttcttttcttgttgaaagactactccacatcattatagatgataataagagaacacaaattgttacagaaattatctcagagattcgggcgcccattgttactgttggtgttaataacgatccagctgatgtaagaaagaaagaactcaagatggctgaaataaaagttaagcttatcgaagccaaagaagctttggaaaattgcattaccttacaggattttaatcgggcatcagaattaaaagaagaaataaaagcattagaagatgccagaataaaccttttgaaagagacagagcaacttgaaattaaagaagtccacatagagaagaatgatgctgaaacattgcagaaatgtcttattttatgctatgaactgttgaagcagatgtccatttcaacaggcttaagtgcaaccatgaatggaatcatcgaatctttgattcttcctggaataataagtattcatcctgttgtaagaaacctggctgttttatgcttgggatgctgtggactacagaatcaggattttgcaaggaaacacttcgtattactattgcaggttttgcaaattgatgatgtcacaataaaaataagtgctttaaaggcaatctttgaccaactgatgacgttcgggattgaaccatttaaaactaaaaaaatcaaaacacttcattgtgaaggtacagaaataaacagtgatgatgagcaagaatcaaaagaagttgaagagactgctacagctaagaatgttctgaaactcctttctgatttcttagatagtgaggtatctgaacttaggactggagctgcagaaggactagccaagctgatgttctctgggcttttggtcagcagcaggattctttctcgtcttattttgttatggtacaatcctgtgactgaagaggatgttcaacttcgacattgcctaggcgtgttcttccccgtgtttgcttatgcaagcaggactaatcaggaatgctttgaagaagcttttcttccaaccctgcaaacactggccaatgcccctgcatcttctcctttagctgaaattgatatcacaaatgttgctgagttacttgtagatttgacaagaccaagtggattaaatcctcaggccaagacttcccaagattatcaggccttaacagtacatgacaatttggctatgaaaatttgcaatgagatcttaacaagtccgtgctcgccagaaattcgagtctatacaaaagccttgagttctttagaactcagtagccatcttgcaaaagatcttctggttctattgaatgagattctggagcaagtaaaagataggacatgtctgagagctttggagaaaatcaagattcagttagaaaaaggaaataaagaatttggtgaccaagctgaagcagcacaggatgccaccttgactacaactactttccaaaatgaagatgaaaagaataaagaagtatatatgactccactcaggggtgtaaaagcaacccaagcatcaaagtctactcagctaaagactaacagaggacagagaaaagtgacagtttcagctaggacgaacaggaggtgtcagactgctgaagccgactctgaaagtgatcatgaagttccagaaccagaatcagaaatgaagatgagactaccaagacgagccaaaaccgcagcactagaaaaaagtaaacttaaccttgcccaatttctcaatgaagatctaagttaggaaagacgatggaggtggaatcctttaagattatgtccagttatttgctttaataaagaagaagttacccttgtcaaaatcagaacaaacctgatgtctttctgaagattttctgctgtgcgcttccacgttactttggcctgtattaaagcagtagagcagcatcagttattatagtccagaaaaagtgtgcatcagtcagtcacacagatttatcacaatctgaggtgggcctaggaatctcatttttaaatagtctctccaagtgattcttatgaactctttatgtttaaaatcatgtcattatggaaaacttacaagtgtaactagctagtagcttgcatttgagaagcttatgacttagatgggcagaatcaacaaagatgaaaccgcctgaggacacatttaacaagtaacatttctagggaaaatgaaggaagtaccacaaactggctagaaaggagcttatcaatcaccagtgaggaagaccagtataacgttcaacaacagttattttgacaaaaacttattttgtgattcctacagtgaaaacatttttggtgatatctgcctgggaaatctctcttcctaaagtatttgtatatgggagtccttgtttgtgaatgtttcctggattagggaggtgtcaacataaatgtattattaaccatgaagctgctcgctatatttttggcataacaaaataatatttatttactgtggataataattctagtgggaatataatgtgacaggaacttctctttatatacgctaccaatttatgagcactattcactgtcaatttcatttcttgtcttttgaaattgacacttggcctgacttacgaaacttgtactatatgaaattggtcctcttttctgcaatacccaacgaaacaccttttctctttattattcagaaatgtcctaacatggatctgtttgttttaataattgtgctttttttaggcttatcatctactagaggccatttacttaaggtgaaattttaagatggagctaaagtaagatcactggtttttagaaccaaattgctatacatatgtgcctcatagaacttataaaaggagtcaaagtttcaaagcaagatagttattaagcaaaaggaaaaatggtaatgatagaaagtcagttaaaaatagatgattgttcttcattctgtttgttggctctgtgttctcctgtgcttcagattccttatgtgttgttgttttaaagacaatttgcagggggttgggagaaggactgaaaaggtacattaagtgtgctgtaaggaaaagtcttagaaacataataagctaaaatcccattcacacatggccaggctatccaaaaagaaaggagccatgttctcatgtggtttaccataccaaagcttgctttctctggcatgggaaaaataaatttaagcaccaaacctttagtattctgagtattcagtttttagacatagtcatgtagccattgctgaaactgtgctttgcactattaaaggtagggaatgtcctgcttttaaaagtcatccctttaactttaaaataaaaggctaaggtacaataaaacagatgtaaatccatttaccatttttcattca

SEQ ID NO: 425129 - DNA, 5763 bp, Homo sapiens
cttacggcagtctcgcgggatttccccctctcgcgggaattatttgaacgttcgagcggtaaatactccctggggctgtcatagaagactcctcggagagcgctgcctctgggttggcgggctggcaggctgtagccgagcgcgggcaggactcgtcccggcagggttccagagccatgggagcggaaaggaggctgctgtcgattaaggaggcctttcggctggcgcagcagccgcaccagaaccaggcgaagctggtggtggcgctgagccgcacctaccgcacgatggatgataagacagtttttcatgaggagttcattcattaccttaaatatgttatggtggtctataaacgtgaaccagctgtggagagggtaatagaatttgcagcaaagtttgttacctcatttcaccaatcagatatggaagatgatgaggaagaggaagatggtggccttttaaattatttgtttacttttctcttaaagtctcatgaagcaaacagcaatgcagtgagatttagagtgtgcctgctcataaacaagcttttgggaagtatgccagaaaatgctcagattgatgatgatgtgtttgataaaattaataaagccatgcttattagattgaaagataagattccaaatgtgagaatacaggcagttctggcgctttcacgacttcaggatcccaaggatgatgaatgcccagtggttaatgcatatgctactttgattgaaaatgattcaaatccagaagttagacgggcagtgttatcatgtattgcaccatcagcaaagactttgccaaaaattgtagggcgcaccaaggatgtgaaagaggctgtcagaaagctggcttatcaggttttagctgaaaaggttcatatgagagctatgtccattgctcagagagtaatgctccttcaacaaggtcttaatgacagatcagacgctgtgaaacaagctatgcagaagcatcttcttcaaggctggttacggttctctgaaggaaatatcttagagttgctccatcggttggatgtagaaaattcttctgaagtggcagtctctgttctcaatgccttgttttcaataactcctctcagtgaactggtgggactctgtaaaaacaatgatggcaggaaattgattccagtggaaacattaactcctgaaattgctttgtattggtgtgccctttgtgaatatttgaaatcaaaaggagatgaaggtgaagaatttttagagcagattttgccagagcctgtagtatatgcagactatttattgagttacatccagagcattccagttgttaatgaagaacacagaggtgatttttcctatattggaaatttgatgacaaaagaattcataggtcaacaattgattctaattattaagtctttggataccagtgaagaaggaggaagaaaaaaactgctggctgttttacaggagattcttattttacccacaatcccaatatccctggtttcttttcttgttgaaagactactccacatcattatagatgataataagagaacacaaattgttacagaaattatctcagagattcgggcgcccattgttactgttggtgttaataacgatccagctgatgtaagaaagaaagaactcaagatggctgaaataaaagttaagcttatcgaagccaaagaagctttggaaaattgcattaccttacaggattttaatcgggcatcagaattaaaagaagaaataaaagcattagaagatgccagaataaaccttttgaaagagacagagcaacttgaaattaaagaagtccacatagagaagaatgatgctgaaacattgcagaaatgtcttattttatgctatgaactgttgaagcagatgtccatttcaacaggcttaagtgcaaccatgaatggaatcatcgaatctttgattcttcctggaataataagtattcatcctgttgtaagaaacctggctgttttatgcttgggatgctgtggactacagaatcaggattttgcaaggaaacacttcgtattactattgcaggttttgcaaattgatgatgtcacaataaaaataagtgctttaaaggcaatctttgaccaactgatgacgttcgggattgaaccatttaaaactaaaaaaatcaaaacacttcattgtgaaggtacagaaataaacagtgatgatgagcaagaatcaaaagaagttgaagagactgctacagctaagaatgttctgaaactcctttctgatttcttagatagtgaggtatctgaacttaggactggagctgcagaaggactagccaagctgatgttctctgggcttttggtcagcagcaggattctttctcgtcttattttgttatggtacaatcctgtgactgaagaggatgttcaacttcgacattgcctaggcgtgttcttccccgtgtttgcttatgcaagcaggactaatcaggaatgctttgaagaagcttttcttccaaccctgcaaacactggccaatgcccctgcatcttctcctttagctgaaattgatatcacaaatgttgctgagttacttgtagatttgacaagaccaagtggattaaatcctcaggccaagacttcccaagattatcaggccttaacagtacatgacaatttggctatgaaaatttgcaatgagatcttaacaagtccgtgctcgccagaaattcgagtctatacaaaagccttgagttctttagaactcagtagccatcttgcaaaagatcttctggttctattgaatgagattctggagcaagtaaaagataggacatgtctgagagctttggagaaaatcaagattcagttagaaaaaggaaataaagaatttggtgaccaagctgaagcagcacaggatgccaccttgactacaactactttccaaaatgaagatgaaaagaataaagaagtatatatgactccactcaggggtgtaaaagcaacccaagcatcaaagtctactcagctaaagactaacagaggacagagaaaagtgacagtttcagctaggacgaacaggaggtgtcagactgctgaagccgactctgaaaggtatgtcatgcatgtctagaatatatggaggcctatcttcactttttatttctacaagtagaaaaaaactaattttcttgcgaatgagagagaatatataacaagatagtgaaaactataaatagctgtcttaggtatatagtctaaaattccatcatcaagagcatttgacttcttacggcgtgtttgcttttgcctattagctggcatggtctttagtactatctttaatatgttgtttcaatttttaattacatgatgtgactcctctttgatcttcagttagcaaactcttgattttgataatatttgggttctctacacttacatactgatagaataattctgtctataatttgggtatattgtgtggtagagtgttttatttttggcttctgtcagtcaagccactgttagagctgaaagttggtagctgtcttgtattcatttgcaaaattgtattgtgtgtattttcagtacatagttttacactgttgattaaatttgtcttttttggggggaaacttgttttttactatgtttttggaatttattgcttaaatcaagagagagaacttaatttttttgtcacttcttgagtttcaaagaaatctcttttggacagttatggtcctcgtttaattacaagcttcattacaagtttgtggctttttttcctgtataacaccaggttctgttatagtatataaaatcattagctagattttccctgattcactttgctagatagccaagtcagtgtttttttgacattgagattttagttttaagctaagtcaatggaatcaggctatcaattaaacactgatagaatgtgagtcagaaacaaaaaagttttatttataaataaactggttttaaagcttgtatctaaattcgtgtattttcaacatctatttagtgatcatgaagttccagaaccagaatcagaaatgaagatgagactaccaagacgagccaaaaccgcagcactagaaaaaagtaaacttaaccttgcccaatttctcaatgaagatctaagttaggaaagacgatggaggtggaatcctttaagattatgtccagttatttgctttaataaagaagaagttacccttgtcaaaatcagaacaaacctgatgtctttctgaagattttctgctgtgcgcttccacgttactttggcctgtattaaagcagtagagcagcatcagttattatagtccagaaaaagtgtgcatcagtcagtcacacagatttatcacaatctgaggtgggcctaggaatctcatttttaaatagtctctccaagtgattcttatgaactctttatgtttaaaatcatgtcattatggaaaacttacaagtgtaactagctagtagcttgcatttgagaagcttatgacttagatgggcagaatcaacaaagatgaaaccgcctgaggacacatttaacaagtaacatttctagggaaaatgaaggaagtaccacaaactggctagaaaggagcttatcaatcaccagtgaggaagaccagtataacgttcaacaacagttattttgacaaaaacttattttgtgattcctacagtgaaaacatttttggtgatatctgcctgggaaatctctcttcctaaagtatttgtatatgggagtccttgtttgtgaatgtttcctggattagggaggtgtcaacataaatgtattattaaccatgaagctgctcgctatatttttggcataacaaaataatatttatttactgtggataataattctagtgggaatataatgtgacaggaacttctctttatatacgctaccaatttatgagcactattcactgtcaatttcatttcttgtcttttgaaattgacacttggcctgacttacgaaacttgtactatatgaaattggtcctcttttctgcaatacccaacgaaacaccttttctctttattattcagaaatgtcctaacatggatctgtttgttttaataattgtgctttttttaggcttatcatctactagaggccatttacttaaggtgaaattttaagatggagctaaagtaagatcactggtttttagaaccaaattgctatacatatgtgcctcatagaacttataaaaggagtcaaagtttcaaagcaagatagttattaagcaaaaggaaaaatggtaatgatagaaagtcagttaaaaatagatgattgttcttcattctgtttgttggctctgtgttctcctgtgcttcagattccttatgtgttgttgttttaaagacaatttgcagggggttgggagaaggactgaaaaggtacattaagtgtgctgtaaggaaaagtcttagaaacataataagctaaaatcccattcacacatggccaggctatccaaaaagaaaggagccatgttctcatgtggtttaccataccaaagcttgctttctctggcatgggaaaaataaatttaagcaccaaacctttagtattctgagtattcagtttttagacatagtcatgtagccattgctgaaactgtgctttgcactattaaaggtagggaatgtcctgcttttaaaagtcatccctttaactttaaaataaaaggctaaggtacaataaaacagatgtaaatccatttaccatttttcattca

SEQ ID NO: 425130 - DNA, 3383 bp, Homo sapiens
  misc_feature (3329)..(3329): n is a, c, g, or t
  misc_feature (3360)..(3360): n is a, c, g, or t
  misc_feature (3368)..(3368): n is a, c, g, or t
cttacggcagtctcgcgggatttccccctctcgcgggaattatttgaacgttcgagcggtaaatactccctggggctgtcatagaagactcctcggagagcgctgcctctgggttggcgggctggcaggctgtagccgagcgcgggcaggactcgtcccggcagggttccagagccatgggagcggaaaggaggctgctgtcgattaaggaggcctttcggctggcgcagcagccgcaccagaaccaggcgaagctggtggtggcgctgagccgcacctaccgcacgatggatgataagacagtttttcatgaggagttcattcattaccttaaatatgttatggtggtctataaacgtgaaccagctgtggagagggtaatagaatttgcagcaaagtttgttacctcatttcaccaatcagatatggaagatgatgaggaagaggaagatggtggccttttaaattatttgtttacttttctcttaaagtctcatgaagcaaacagcaatgcagtgagatttagagtgtgcctgctcataaacaagcttttgggaagtatgccagaaaatgctcagattgatgatgatgtgtttgataaaattaataaagccatgcttattagattgaaagataagattccaaatgtgagaatacaggcagttctggcgctttcacgacttcaggatcccaaggatgatgaatgcccagtggttaatgcatatgctactttgattgaaaatgattcaaatccagaagttagacgggcagtgttatcatgtattgcaccatcagcaaagactttgccaaaaattgtagggcgcaccaaggatgtgaaagaggctgtcagaaagctggcttatcaggttttagctgaaaaggttcatatgagagctatgtccattgctcagagagtaatgctccttcaacaaggtcttaatgacagatcagacgctgtgaaacaagctatgcagaagcatcttcttcaaggctggttacggttctctgaaggaaatatcttagagttgctccatcggttggatgtagaaaattcttctgaagtggcagtctctgttctcaatgccttgttttcaataactcctctcagtgaactggtgggactctgtaaaaacaatgatggcaggaaattgattccagtggaaacattaactcctgaaattgctttgtattggtgtgccctttgtgaatatttgaaatcaaaaggagatgaaggtgaagaatttttagagcagattttgccagagcctgtagtatatgcagactatttattgagttacatccagagcattccagttgttaatgaagaacacagaggtgatttttcctatattggaaatttgatgacaaaagaattcataggtcaacaattgattctaattattaagtctttggataccagtgaagaaggaggaagaaaaaaactgctggctgttttacaggagattcttattttacccacaatcccaatatccctggtttcttttcttgttgaaagactactccacatcattatagatgataataagagaacacaaattgttacagaaattatctcagagattcgggcgcccattgttactgttggtgttaataacgatccagctgatgtaagaaagaaagaactcaagatggctgaaataaaagttaagcttatcgaagccaaagaagctttggaaaattgcattaccttacaggattttaatcgggcatcagaattaaaagaagaaataaaagcattagaagatgccagaataaaccttttgaaagagacagagcaacttgaaattaaagaagtccacatagagaagaatgatgctgaaacattgcagaaatgtcttattttatgctatgaactgttgaagcagatgtccatttcaacaggcttaagtgcaaccatgaatggaatcatcgaatctttgattcttcctggaataataagtattcatcctgttgtaagaaacctggctgttttatgcttgggatgctgtggactacagaatcaggattttgcaaggaaacacttcgtattactattgcaggttttgcaaattgatgatgtcacaataaaaataagtgctttaaaggcaatctttgaccaactgatgacgttcgggattgaaccatttaaaactaaaaaaatcaaaacacttcattgtgaaggtacagaaataaacagtgatgatgagcaagaatcaaaagaagttgaagagactgctacagctaagaatgttctgaaactcctttctgatttcttagatagtgaggtatctgaacttaggactggagctgcagaaggactagccaagctgatgttctctgggcttttggtcagcagcaggattctttctcgtcttattttgttatggtacaatcctgtgactgaagaggatgttcaacttcgacattgcctaggcgtgttcttccccgtgtttgcttatgcaagcaggactaatcaggaatgctttgaagaagcttttcttccaaccctgcaaacactggccaatgcccctgcatcttctcctttagctgaaattgatatcacaaatgttgctgagttacttgtagatttgacaagaccaagtggattaaatcctcaggccaagacttcccaagattatcaggccttaacagtacatgacaatttggctatgaaaatttgcaatgagatcttaacaagtccgtgctcgccagaaattcgagtctatacaaaagccttgagttctttagaactcagtagccatcttgcaaaagatcttctggttctattgaatgagattctggagcaagtaaaagataggacatgtctgagagctttggagaaaatcaagattcagttagaaaaaggaaataaagaatttggtgaccaagctgaagcagcacaggatgccaccttgactacaactactttccaaaatgaagatgaaaagaataaagaagtatatatgactccactcaggggtgtaaaagcaacccaagcatcaaagtctactcagctaaagactaacagaggacagagaaaagtgacagtttcagctaggacgaacaggaggtgtcagactgctgaagccgactctgaaagtgatcatgaagttccagaaccagaatcagaaatgaagatgagactaccaagacgagccaaaaccgcagcactagaaaaaagtaaacttaaccttgcccaatttctcaatgaagatctaagttaggaaagacgatggaggtggaatcctttaagattatgtccagttatttgctttaataaagaagaagttacccttgtcaaaaaaaaaaaaaaaaaaaaaaaaatttgnggggggcttgggcccgaaaaagttttttaancccatcgnttgggggcggcgggg

SEQ ID NO: 425131 - DNA, 2821 bp, Homo sapiens
  misc_feature (1)..(1): n is a, c, g, or t
ntcgatgcggcactgactctcttaactaccacggctacaggttttgcaaattgatgatgtcacaataaaaataagtgctttaaaggcaatctttgaccaactgatgacgttcgggattgaaccatttaaaactaaaaaaatcaaaacacttcattgtgaaggtacagaaataaacagtgatgatgagcaagaatcaaaagaagttgaagagactgctacagctaagaatgttctgaaactcctttctgatttcttagatagtgaggtatctgaacttaggactggagctgcagaaggactagccaagctgatgttctctgggcttttggtcagcagcaggattctttctcgtcttattttgttatggtacaatcctgtgactgaagaggatgttcaacttcgacattgcctaggcgtgttcttccccgtgtttgcttatgcaagcaggactaatcaggaatgctttgaagaagcttttcttccaaccctgcaaacactggccaatgcccctgcatcttctcctttagctgaaattgatatcacaaatgttgctgagttacttgtagatttgacaagaccaagtggattaaatcctcaggccaagacttcccaagattatcaggccttaacagtacatgacaatttggctatgaaaatttgcaatgagatcttaacaagtccgtgctcgccagaaattcgagtctatacaaaagccttgagttctttagaactcagtagccatcttgcaaaagatcttctggttctattgaatgagattctggagcaagtaaaagataggacatgtctgagagctttggagaaaatcaagattcagttagaaaaaggaaataaagaatttggtgaccaagctgaagcagcacaggatgccaccttgactacaactactttccaaaatgaagatgaaaagaataaagaagtatatatgactccactcaggggtgtaaaagcaacccaagcatcaaagtctactcagctaaagactaacagaggacagagaaaagtgacagtttcagctaggacgaacaggaggtgtcagactgctgaagccgactctgaaagtgatcatgaagttccagaaccagaatcagaaatgaagatgagactaccaagacgagccaaaaccgcagcactagaaaaaagtaaacttaaccttgcccaatttctcaatgaagatctaagttaggaaagacgatggaggtggaatcctttaagattatgtccagttatttgctttaataaagaagaagttacccttgtcaaaatcagaacaaacctgatgtctttctgaagattttctgctgtgcgcttccacgttactttggcctgtattaaagcagtagagcagcatcagttattatagtccagaaaaagtgtgcatcagtcagtcacacagatttatcacaatctgaggtgggcctaggaatctcatttttaaatagtctctccaagtgattcttatgaactctttatgtttaaaatcatgtcattatggaaaacttacaagtgtaactagctagtagcttgcatttgagaagcttatgacttagatgggcagaatcaacaaagatgaaaccgcctgaggacacatttaacaagtaacatttctagggaaaatgaaggaagtaccacaaactggctagaaaggagcttatcaatcaccagtgaggaagaccagtataacgttcaacaacagttattttgacaaaaacttattttgtgattcctacagtgaaaacatttttggtgatatctgcctgggaaatctctcttcctaaagtatttgtatatgggagtccttgtttgtgaatgtttcctggattagggaggtgtcaacataaatgtattattaaccatgaagctgctcgctatatttttggcataacaaaataatatttatttactgtggataataattctagtgggaatataatgtgacaggaacttctctttatatacgctaccaatttatgagcactattcactgtcaatttcatttcttgtcttttgaaattgacacttggcctgacttacgaaacttgtactatatgaaattggtcctcttttctgcaatacccaacgaaacaccttttctctttattattcagaaatgtcctaacatggatctgtttgttttaataattgtgctttttttaggcttatcatctactagaggccatttacttaaggtgaaattttaagatggagctaaagtaagatcactggtttttagaaccaaattgctatacatatgtgcctcatagaacttataaaaggagtcaaagtttcaaagcaagatagttattaagcaaaaggaaaaatggtaatgatagaaagtcagttaaaaatagatgattgttcttcattctgtttgttggctctgtgttctcctgtgcttcagattccttatgtgttgttgttttaaagacaatttgcagggggttgggagaaggactgaaaaggtacattaagtgtgctgtaaggaaaagtcttagaaacataataagctaaaatcccattcacacatggccaggctatccaaaaagaaaggagccatgttctcatgtggtttaccataccaaagcttgctttctctggcatgggaaaaataaatttaagcaccaaacctttagtattctgagtattcagtttttagacatagtcatgtagccattgctgaaactgtgctttgcactattaaaggtagggaatgtcctgcttttaaaagtcatccctttaactttaaaataaaaggctaaggtacaataaaacagatgtaaatccatttaccatttttcattca

SEQ ID NO: 425132 - DNA, 2240 bp, Homo sapiens
  misc_feature (2186)..(2186): n is a, c, g, or t
  misc_feature (2217)..(2217): n is a, c, g, or t
  misc_feature (2225)..(2225): n is a, c, g, or t
cttacggcagtctcgcgggatttccccctctcgcgggaattatttgaacgttcgagcggtaaatactccctggggctgtcatagaagactcctcggagagcgctgcctctgggttggcgggctggcaggctgtagccgagcgcgggcaggactcgtcccggcagggttccagagccatgggagcggaaaggaggctgctgtcgattaaggaggcctttcggctggcgcagcagccgcaccagaaccaggcgaagctggtggtggcgctgagccgcacctaccgcacgatggatgataagacagtttttcatgaggagttcattcattaccttaaatatgttatggtggtctataaacgtgaaccagctgtggagagggtaatagaatttgcagcaaagtttgttacctcatttcaccaatcagatatggaagatgatgaggaagaggaagatggtggccttttaaattatttgtttacttttctcttaaagtctcatgaagcaaacagcaatgcagtgagatttagagtgtgcctgctcataaacaagcttttgggaagtatgccagaaaatgctcagattgatgatgatgtgtttgataaaattaataaagccatgcttattagattgaaagataagattccaaatgtgagaatacaggcagttctggcgctttcacgacttcaggatcccaaggatgatgaatgcccagtggttaatgcatatgctactttgattgaaaatgattcaaatccagaagttagacgggcagtgttatcatgtattgcaccatcagcaaagactttgccaaaaattgtagggcgcaccaaggatgtgaaagaggctgtcagaaagctggcttatcaggttttagctgaaaaggttcatatgagagctatgtccattgctcagagagtaatgctccttcaacaaggtcttaatgacagatcagacgctgtgaaacaagctatgcagaagcatcttcttcaaggctggttacggttctctgaaggaaatatcttagagttgctccatcggttggatgtagaaaattcttctgaagtggcagtctctgttctcaatgccttgttttcaataactcctctcagtgaactggtgggactctgtaaaaacaatgatggcaggaaattgattccagtggaaacattaactcctgaaattgctttgtattggtgtgccctttgtgaatatttgaaatcaaaaggagatgaaggtgaagaatttttagagcagattttgccagagcctgtagtatatgcagactatttattgagttacatccagagcattccagttgttaatgaagaacacagaggtgatttttcctatattggaaatttgatgacaaaagaattcataggtcaacaattgattctaattattaagtctttggataccagtgaagaaggaggaagaaaaaaactgctggctgttttacaggagattcttattttacccacaatcccaatatccctggtttcttttcttgttgaaagactactccacatcattatagatgataataagagaacacaaattgttacagaaattatctcagagattcgggcgcccattgttactgttggtgttaataacgatccagctgatgtaagaaagaaagaactcaagatggctgaaataaaagttaagcttatcgaagccaaagaagctttggaaaattgcattaccttacaggattttaatcgggcatcagaattaaaagaagaaataaaagcattagaagatgccagaataaaccttttgaaagagacagagcaacttgaaattaaagaagtccacatagagaagaatgatgctgaaacattgcagaaatgtcttattttatgctatgaactgttgaagcagatgtccatttcaacaggcttaagtgcaaccatgaatggaatcatcgaatctttgattcttcctggaataataagtattcatcctgttgtaagaaacctggctgttttatgcttgggatgctgtggactacagaatcaggattttgcaaggaaacacttcgtattactattgcaggttttgcaaattgatgatgtcacaataaaaataagtgctttaaaggcaatctttgaccaactgatgacgttcgggattgaaccatttaaaactaaaaaaaaaaaaaaaaaaaaaaaaaaaatttgnggggggcttgggcccgaaaaagttttttaancccatcgnttgggggcggcgggg

SEQ ID NO: 425133 - DNA, 3548 bp, Homo sapiens
cgcgggttgatcgccgcgctcgccccggccacggcgccgcccctgttctcccggccccgctccaccggggctgacggactgacggccagcacagccggctccgggatgagcgcacggacggtattctgaagtctcaggaaactggaccatttaaatgtgcatggcccatgagaaaggcttataagaagccatggcactcccctttcaaaaagagctggagaaatacaagaacattgatgaagatgagcttcttggcaaactctcagaagaggaactgaaacagttggaaaatgttctagatgacctagatcctgagagtgccatgctgccagctggatttcgacagaaagaccagacacagaaggcagccaccggcccctttgaccgcgagcacctcctcatgtacctggagaaggaggctttggaacagaaagacagagaggactttgtgcccttcactggagaaaagaaagggagagtctttatccctaaagaaaagcctatagaaactcgtaaagaagaaaaagtgacccttgacccagaactggaagaagctttggccagtgcctctgacaccgaactctatgatcttgcagctgtccttggagtacacaatttgctcaacaatccaaagttcgatgaagaaacagccaacaataaaggtggcaaaggacctgtcagaaatgttgtcaaaggtgaaaaagtaaagccagtatttgaggaaccaccaaatcccacaaatgtggaaataagcctgcagcagatgaaagccaatgatcctagcttgcaagaagtcaacctcaacaacattaagaacattccaattccaaccctgagggaatttgcaaaggctctggagaccaacactcacgtgaagaagttcagcctggccgcaactcgcagcaatgaccctgtggccattgcttttgcagacatgctgaaagtaaacaagaccttgacaagtctaaacatagaatccaattttatcactggaactgggatcctggccctggtagaggcactgaaagaaaatgacaccttgacagaaatcaagattgacaaccagaggcagcagttgggaacagctgtagagatggaaattgcccagatgctggaggagaattcaaggatcctcaagtttggataccagtttaccaagcaagggccacgaacaagggtggcagctgccatcacaaagaataatgacctggttcgtaagaagagagttgaagcagaccgaaggtaaacttccttgaggagaagtgaagtttcactgtggtatggccattgaaaaacaaaaactcttcttcttccccatcaggaccattttatcaaagttcgttcatttccgttaaccacataactaataatttaattgttattcttttttagcactacttatttatcttggattttgtaatatatgcaattgttttatttgctcatgggcacttctggcaacttgacaaatggaccgatgcagattttagagagtgacgacatggaaaatgaatttaaccactttcttattgggttgtcttgctttcttacatgaacttgtttttttaatcactgaaaggaatttagtgtataatatgtgtttgtaactgtgattatgatagaggcctatctctgtttacatgcatagctttgagttaggctaaatacatcagaagtgttctactgaccacataagaagttagtattgccaatctttcactgcatgtgaaaatgtgaccaatttagcacaaattctctcttagttccagaaaaatcagtaaatgcacatgccctgttgattggagatcagtagtgtcatcttcataaagcaagacaacattatgacactttaaaacagtagcaaagaagtctatttattaacccacaaatgtagcatcaagccagactcacaggtagcaaaatgaattacacacctacttttactgactattcaacataaattgaatctttaacatgactttaaaggctatttacaaagctgttttaaagtttttcaaacatgatagaaattttctaaattttagtaagagagaagcttttaaaacagtacattcctgaataaaacaacaatattgtatcttaatcaaggctgtctgatgcagatgattgcattttttggcaaattttagaagcatttattgctttgtctttagtgtaacaagatcactggattaaatataaacattcaggttaattatctagatttttgtccacagtatatgatccatccagacatttgcaaacgtcaggagaaaaatgtgaattatttatccagatgcatgtcatctcaaggacaaagcctgtgaaagtacaagtgagatggttgcattgtagtatgcattaatctttcaatgtagtggtgtaaaaatgcagtgctaaactaatgaagcaggtgactgcagcctttggctcaagctcacaactctgataactgtcagtgcctgaggttgtgattggtgacattctgacactgcccaaggcaactcaccctctattcctcctttctcccctccctttcttccaattcattgtcttttttttcctcttttctctgtaatttgttactaaacaaattccagaatttgtttagtagctgagtgttcctgagttgcctagtagcaataaaacaagtgaataggaaaataattaatatattattctatttagcttgtaaaacacatggaatctgtttaagatagcccttgtaaaattgaacatttacctgtattgtaagtacccacatctgtgtctctgaagtcctttgaaacatctcattatcttgaaatttttttaatgtttgagaacaccataagcagaatattctaacacctttggcccctgaaaatcctttaattagtttatggcttcatctccttatctatttaaaaaacatagtaaataatgttttatggttttcagtctgatttttccttccctttcacccatttaggtgtgatgtgttggagccaacttgtacaggcttgccaactgttatattttcaagaattttgcaaactggttgttcaatacagccattatttaaaattaaatgatgtgcacttacaactgaatgaattatattaaggacagaagtaacaaatactgtactcaaaaatcttacattttactattttctaacctcttagattatttacatctagtaggtatgtatgtagaaatattaccaaacagtatgctactgaacgtatcctctcaactccatgttcactaccttcttgttactacagtggcttgaaattggccatggtagaaatatttacaccacagaaattagcaatatgtaagaaattggggttttctccctctccagattgctggttgataaacattcatcagcacaccactgggtgaaattatacatttttttatacatatgtttcgcttatcatgttgccgaagggaagaacatttctcttagatgtcttttctcctctttggatttgttacaaacctgtttaagtgctgagtccctgacctgcctctccaagtaagcctttttccttttt

SEQ ID NO: 425134 - DNA, 3630 bp, Homo sapiens
cgcgggttgatcgccgcgctcgccccggccacggcgccgcccctgttctcccggccccgctccaccggggctgacggactgacggccagcacagccggctccgggatgagcgcacggacggtattctgaagtctcaggaaactggaccatttaaatgtgcatggcccatgagaaaggcttataagaagccatggcactcccctttcaaaaagagctggagaaatacaagaacattgatgaagatgagcttcttggcaaactctcagaagaggaactgaaacagttggaaaatgttctagatgacctagatcctgaggctggagtgccgtggcaagatctcggctcactgcaacctctgcctcccagattcaagcgattctcctacctcagcctcccagagtgccatgctgccagctggatttcgacagaaagaccagacacagaaggcagccaccggcccctttgaccgcgagcacctcctcatgtacctggagaaggaggctttggaacagaaagacagagaggactttgtgcccttcactggagaaaagaaagggagagtctttatccctaaagaaaagcctatagaaactcgtaaagaagaaaaagtgacccttgacccagaactggaagaagctttggccagtgcctctgacaccgaactctatgatcttgcagctgtccttggagtacacaatttgctcaacaatccaaagttcgatgaagaaacagccaacaataaaggtggcaaaggacctgtcagaaatgttgtcaaaggtgaaaaagtaaagccagtatttgaggaaccaccaaatcccacaaatgtggaaataagcctgcagcagatgaaagccaatgatcctagcttgcaagaagtcaacctcaacaacattaagaacattccaattccaaccctgagggaatttgcaaaggctctggagaccaacactcacgtgaagaagttcagcctggccgcaactcgcagcaatgaccctgtggccattgcttttgcagacatgctgaaagtaaacaagaccttgacaagtctaaacatagaatccaattttatcactggaactgggatcctggccctggtagaggcactgaaagaaaatgacaccttgacagaaatcaagattgacaaccagaggcagcagttgggaacagctgtagagatggaaattgcccagatgctggaggagaattcaaggatcctcaagtttggataccagtttaccaagcaagggccacgaacaagggtggcagctgccatcacaaagaataatgacctggttcgtaagaagagagttgaagcagaccgaaggtaaacttccttgaggagaagtgaagtttcactgtggtatggccattgaaaaacaaaaactcttcttcttccccatcaggaccattttatcaaagttcgttcatttccgttaaccacataactaataatttaattgttattcttttttagcactacttatttatcttggattttgtaatatatgcaattgttttatttgctcatgggcacttctggcaacttgacaaatggaccgatgcagattttagagagtgacgacatggaaaatgaatttaaccactttcttattgggttgtcttgctttcttacatgaacttgtttttttaatcactgaaaggaatttagtgtataatatgtgtttgtaactgtgattatgatagaggcctatctctgtttacatgcatagctttgagttaggctaaatacatcagaagtgttctactgaccacataagaagttagtattgccaatctttcactgcatgtgaaaatgtgaccaatttagcacaaattctctcttagttccagaaaaatcagtaaatgcacatgccctgttgattggagatcagtagtgtcatcttcataaagcaagacaacattatgacactttaaaacagtagcaaagaagtctatttattaacccacaaatgtagcatcaagccagactcacaggtagcaaaatgaattacacacctacttttactgactattcaacataaattgaatctttaacatgactttaaaggctatttacaaagctgttttaaagtttttcaaacatgatagaaattttctaaattttagtaagagagaagcttttaaaacagtacattcctgaataaaacaacaatattgtatcttaatcaaggctgtctgatgcagatgattgcattttttggcaaattttagaagcatttattgctttgtctttagtgtaacaagatcactggattaaatataaacattcaggttaattatctagatttttgtccacagtatatgatccatccagacatttgcaaacgtcaggagaaaaatgtgaattatttatccagatgcatgtcatctcaaggacaaagcctgtgaaagtacaagtgagatggttgcattgtagtatgcattaatctttcaatgtagtggtgtaaaaatgcagtgctaaactaatgaagcaggtgactgcagcctttggctcaagctcacaactctgataactgtcagtgcctgaggttgtgattggtgacattctgacactgcccaaggcaactcaccctctattcctcctttctcccctccctttcttccaattcattgtcttttttttcctcttttctctgtaatttgttactaaacaaattccagaatttgtttagtagctgagtgttcctgagttgcctagtagcaataaaacaagtgaataggaaaataattaatatattattctatttagcttgtaaaacacatggaatctgtttaagatagcccttgtaaaattgaacatttacctgtattgtaagtacccacatctgtgtctctgaagtcctttgaaacatctcattatcttgaaatttttttaatgtttgagaacaccataagcagaatattctaacacctttggcccctgaaaatcctttaattagtttatggcttcatctccttatctatttaaaaaacatagtaaataatgttttatggttttcagtctgatttttccttccctttcacccatttaggtgtgatgtgttggagccaacttgtacaggcttgccaactgttatattttcaagaattttgcaaactggttgttcaatacagccattatttaaaattaaatgatgtgcacttacaactgaatgaattatattaaggacagaagtaacaaatactgtactcaaaaatcttacattttactattttctaacctcttagattatttacatctagtaggtatgtatgtagaaatattaccaaacagtatgctactgaacgtatcctctcaactccatgttcactaccttcttgttactacagtggcttgaaattggccatggtagaaatatttacaccacagaaattagcaatatgtaagaaattggggttttctccctctccagattgctggttgataaacattcatcagcacaccactgggtgaaattatacatttttttatacatatgtttcgcttatcatgttgccgaagggaagaacatttctcttagatgtcttttctcctctttggatttgttacaaacctgtttaagtgctgagtccctgacctgcctctccaagtaagcctttttccttttt

SEQ ID NO: 425135 - DNA, 3796 bp, Homo sapiens
cagagtggttaatgatagtatggataaatggcatggcttggtccttaaacaatggtagaaatcccttagctcggaatgcacattttcttttcttcctctgattggttctgggtcacctgtgtttacaaattcatagagaacctcatagccactacagtgtgatacagcaaatgtatttctcaaaaaccagcccaatgtaaatggggggaaatattttccgttggttgagaaaggactagtcttgtttaggggaaaaagaaggaaagaggaaaagagagcaaatcttactgagttttttctgagtcatatatttctctgggcacagaagcccttgaggtaaactttattaacccctagacatggagaggtaatttatataagattccacactggtaagtgtcagagatggtatttaaaccaggtttttaggcccaaatgcagaattttttttttttttgagacagtcttactctgtcacccaggctggagtgccgtggcaagatctcggctcactgcaacctctgcctcccagattcaagcgattctcctacctcagcctcccagagtgccatgctgccagctggatttcgacagaaagaccagacacagaaggcagccaccggcccctttgaccgcgagcacctcctcatgtacctggagaaggaggctttggaacagaaagacagagaggactttgtgcccttcactggagaaaagaaagggagagtctttatccctaaagaaaagcctatagaaactcgtaaagaagaaaaagtgacccttgacccagaactggaagaagctttggccagtgcctctgacaccgaactctatgatcttgcagctgtccttggagtacacaatttgctcaacaatccaaagttcgatgaagaaacagccaacaataaaggtggcaaaggacctgtcagaaatgttgtcaaaggtgaaaaagtaaagccagtatttgaggaaccaccaaatcccacaaatgtggaaataagcctgcagcagatgaaagccaatgatcctagcttgcaagaagtcaacctcaacaacattaagaacattccaattccaaccctgagggaatttgcaaaggctctggagaccaacactcacgtgaagaagttcagcctggccgcaactcgcagcaatgaccctgtggccattgcttttgcagacatgctgaaagtaaacaagaccttgacaagtctaaacatagaatccaattttatcactggaactgggatcctggccctggtagaggcactgaaagaaaatgacaccttgacagaaatcaagattgacaaccagaggcagcagttgggaacagctgtagagatggaaattgcccagatgctggaggagaattcaaggatcctcaagtttggataccagtttaccaagcaagggccacgaacaagggtggcagctgccatcacaaagaataatgacctggttcgtaagaagagagttgaagcagaccgaaggtaaacttccttgaggagaagtgaagtttcactgtggtatggccattgaaaaacaaaaactcttcttcttccccatcaggaccattttatcaaagttcgttcatttccgttaaccacataactaataatttaattgttattcttttttagcactacttatttatcttggattttgtaatatatgcaattgttttatttgctcatgggcacttctggcaacttgacaaatggaccgatgcagattttagagagtgacgacatggaaaatgaatttaaccactttcttattgggttgtcttgctttcttacatgaacttgtttttttaatcactgaaaggaatttagtgtataatatgtgtttgtaactgtgattatgatagaggcctatctctgtttacatgcatagctttgagttaggctaaatacatcagaagtgttctactgaccacataagaagttagtattgccaatctttcactgcatgtgaaaatgtgaccaatttagcacaaattctctcttagttccagaaaaatcagtaaatgcacatgccctgttgattggagatcagtagtgtcatcttcataaagcaagacaacattatgacactttaaaacagtagcaaagaagtctatttattaacccacaaatgtagcatcaagccagactcacaggtagcaaaatgaattacacacctacttttactgactattcaacataaattgaatctttaacatgactttaaaggctatttacaaagctgttttaaagtttttcaaacatgatagaaattttctaaattttagtaagagagaagcttttaaaacagtacattcctgaataaaacaacaatattgtatcttaatcaaggctgtctgatgcagatgattgcattttttggcaaattttagaagcatttattgctttgtctttagtgtaacaagatcactggattaaatataaacattcaggttaattatctagatttttgtccacagtatatgatccatccagacatttgcaaacgtcaggagaaaaatgtgaattatttatccagatgcatgtcatctcaaggacaaagcctgtgaaagtacaagtgagatggttgcattgtagtatgcattaatctttcaatgtagtggtgtaaaaatgcagtgctaaactaatgaagcaggtgactgcagcctttggctcaagctcacaactctgataactgtcagtgcctgaggttgtgattggtgacattctgacactgcccaaggcaactcaccctctattcctcctttctcccctccctttcttccaattcattgtcttttttttcctcttttctctgtaatttgttactaaacaaattccagaatttgtttagtagctgagtgttcctgagttgcctagtagcaataaaacaagtgaataggaaaataattaatatattattctatttagcttgtaaaacacatggaatctgtttaagatagcccttgtaaaattgaacatttacctgtattgtaagtacccacatctgtgtctctgaagtcctttgaaacatctcattatcttgaaatttttttaatgtttgagaacaccataagcagaatattctaacacctttggcccctgaaaatcctttaattagtttatggcttcatctccttatctatttaaaaaacatagtaaataatgttttatggttttcagtctgatttttccttccctttcacccatttaggtgtgatgtgttggagccaacttgtacaggcttgccaactgttatattttcaagaattttgcaaactggttgttcaatacagccattatttaaaattaaatgatgtgcacttacaactgaatgaattatattaaggacagaagtaacaaatactgtactcaaaaatcttacattttactattttctaacctcttagattatttacatctagtaggtatgtatgtagaaatattaccaaacagtatgctactgaacgtatcctctcaactccatgttcactaccttcttgttactacagtggcttgaaattggccatggtagaaatatttacaccacagaaattagcaatatgtaagaaattggggttttctccctctccagattgctggttgataaacattcatcagcacaccactgggtgaaattatacatttttttatacatatgtttcgcttatcatgttgccgaagggaagaacatttctcttagatgtcttttctcctctttggatttgttacaaacctgtttaagtgctgagtccctgacctgcctctccaagtaagcctttttccttttt

SEQ ID NO: 425136 - DNA, 3576 bp, Homo sapiens
cgcgggttgatcgccgcgctcgccccggccacggcgccgcccctgttctcccggccccgctccaccggggctgacggactgacggccagcacagccggctccgggatgagcgcacggacggtattctgaagtctcaggaaactggaccatttaaatgtgcatggcccatgagaaaggcttataagaagccatggcactcccctttcaaaaagagctggagaaatacaagaacattgatgaagatgagcttcttggcaaactctcagaagaggaactgaaacagttggaaaatgttctagatgacctagatcctgaggctggagtgccgtggcaagatctcggctcactgcaacctctgcctcccagattcaagcgattctcctacctcagcctcccagagtgccatgctgccagctggatttcgacagaaagaccagacacagaaggcagccaccggcccctttgaccgcgagcacctcctcatgtacctggagaaggaggctttggaacagaaagacagagaggactttgtgcccttcactggagaaaagaaagggagagtctttatccctaaagaaaagcctatagaaactcgtaaagaagaaaaagtgacccttgacccagaactggaagaagctttggccagtgcctctgacaccgaactctatgatcttgcagctgtccttggagtacacaatttgctcaacaatccaaagttcgatgaagaaacagccaacaataaaggtggcaaaggacctgtcagaaatgttgtcaaaggtgaaaaagtaaagccagtatttgaggaaccaccaaatcccacaaatgtggaaataagcctgcagcagatgaaagccaatgatcctagcttgcaagaagtcaacctcaacaacattaagaacattccaattccaaccctgagggaatttgcaaaggctctggagaccaacactcacgtgaagaagttcagcctggccgcaactcgcagcaatgaccctgtggccattgcttttgcagacatgctgaaagtaaacaagaccttgacaagtctaaacatagaatccaattttatcactggaactgggatcctggccctggtagaggcactgaaagaaaatgacaccttgacagaaatcaagattgacaaccagaggcagcagttgggaacagctgtagagatggaaattgcccagatgctggaggagaattcaaggatcctcaagtttggataccagtttaccaagcaagggccacgaacaagggtggcagctgccatcacaaagaataatgacctggttcgtaagaagagagttgaagcagaccgaaggtaaacttccttgaggagaagtgaagtttcactgtggtatggccattgaaaaacaaaaactcttcttcttccccatcaggaccattttatcaaagttcgttcatttccgttaaccacataactaataatttaattgttattcttttttagcactacttatttatcttggattttgtaatatatgcaattgttttatttgctcatgggcacttctggcaacttgacaaatggaccgatgcagattttagagagtgacgacatggaaaatgaatttaaccactttcttattgggttgtcttgctttcttacatgaacttgtttttttaatcactgaaaggaatttagtgtataatatgtgtttgtaactgtgattatgatagaggcctatctctgtttacatgcatagctttgagttaggctaaatacatcagaagtgttctactgaccacataagaagttagtattgccaatctttcactgcatgtgaaaatgtgaccaatttagcacaaattctctcttagttccagaaaaatcagtaaatgcacatgccctgttgattggagatcagtagtgtcatcttcataaagcaagacaacattatgacactttaaaacagtagcaaagaagtctatttattaacccacaaatgtagcatcaagccagactcacaggtagcaaaatgaattacacacctacttttactgactattcaacataaattgaatctttaacatgactttaaaggctatttacaaagctgttttaaagtttttcaaacatgatagaaattttctaaattttagtaagagagaagcttttaaaacagtacattcctgaattttggcaaattttagaagcatttattgctttgtctttagtgtaacaagatcactggattaaatataaacattcaggttaattatctagatttttgtccacagtatatgatccatccagacatttgcaaacgtcaggagaaaaatgtgaattatttatccagatgcatgtcatctcaaggacaaagcctgtgaaagtacaagtgagatggttgcattgtagtatgcattaatctttcaatgtagtggtgtaaaaatgcagtgctaaactaatgaagcaggtgactgcagcctttggctcaagctcacaactctgataactgtcagtgcctgaggttgtgattggtgacattctgacactgcccaaggcaactcaccctctattcctcctttctcccctccctttcttccaattcattgtcttttttttcctcttttctctgtaatttgttactaaacaaattccagaatttgtttagtagctgagtgttcctgagttgcctagtagcaataaaacaagtgaataggaaaataattaatatattattctatttagcttgtaaaacacatggaatctgtttaagatagcccttgtaaaattgaacatttacctgtattgtaagtacccacatctgtgtctctgaagtcctttgaaacatctcattatcttgaaatttttttaatgtttgagaacaccataagcagaatattctaacacctttggcccctgaaaatcctttaattagtttatggcttcatctccttatctatttaaaaaacatagtaaataatgttttatggttttcagtctgatttttccttccctttcacccatttaggtgtgatgtgttggagccaacttgtacaggcttgccaactgttatattttcaagaattttgcaaactggttgttcaatacagccattatttaaaattaaatgatgtgcacttacaactgaatgaattatattaaggacagaagtaacaaatactgtactcaaaaatcttacattttactattttctaacctcttagattatttacatctagtaggtatgtatgtagaaatattaccaaacagtatgctactgaacgtatcctctcaactccatgttcactaccttcttgttactacagtggcttgaaattggccatggtagaaatatttacaccacagaaattagcaatatgtaagaaattggggttttctccctctccagattgctggttgataaacattcatcagcacaccactgggtgaaattatacatttttttatacatatgtttcgcttatcatgttgccgaagggaagaacatttctcttagatgtcttttctcctctttggatttgttacaaacctgtttaagtgctgagtccctgacctgcctctccaagtaagcctttttccttttt

SEQ ID NO: 425137 - DNA, 1328 bp, Homo sapiens
cgcgggttgatcgccgcgctcgccccggccacggcgccgcccctgttctcccggccccgctccaccggggctgacggactgacggccagcacagccggctccgggatgagcgcacggacggtattctgaagtctcaggaaactggaccatttaaatgtgcatggcccatgagaaaggcttataagaagccatggcactcccctttcaaaaagagctggagaaatacaagaacattgatgaagatgagcttcttggcaaactctcagaagaggaactgaaacagttggaaaatgttctagatgacctagatcctgaggctggagtgccgtggcaagatctcggctcactgcaacctctgcctcccagattcaagcgattctcctacctcagcctcccagagtgccatgctgccagctggatttcgacagaaagaccagacacagaaggcagccaccggcccctttgaccgcgagcacctcctcatgtacctggagaaggaggctttggaacagaaagacagagaggactttgtgcccttcactggagaaaagaaagggagagtctttatccctaaagaaaagcctatagaaactcgtaaagaagaaaaagtgacccttgacccagaactggaagaagctttggccagtgcctctgacaccgaactctatgatcttgcagctgtccttggagtacacaatttgctcaacaatccaaagttcgatgaagaaacagccaacaataaaggtggcaaaggacctgtcagaaatgttgtcaaaggtgaaaaagtaaagccagtatttgaggaaccaccaaatcccacaaatgtggaaataagcctgcagcagatgaaagccaatgatcctagcttgcaagaagtcaacctcaacaacattaagaacattccaattccaaccctgagggaatttgcaaaggctctggagaccaacactcacgtgaagaagttcagcctggccgcaactcgcagcaatgaccctgtggccattgtgagtaaaattcttagaaatataacatgaagttatttaattcactggaaactctaattactttgtttcattagctaacaattttttagatctggaaaacttaccttctacacagttagtgagcaaaattatagttacaatgcaatagttaaacttcagaactgaactgtcagatgctttaagttatctggaattttgtcagcattacagttttcagagaaagaaacaagataagtttggcatttaactaactgaatatttagagtttgctctgtgcttaggatacattttctaaaactttcacatctacagtcattggatatc

SEQ ID NO: 425138 - DNA, 957 bp, Homo sapiens
cgcgggttgatcgccgcgctcgccccggccacggcgccgcccctgttctcccggccccgctccaccggggctgacggactgacggccagcacagccggctccgggatgagcgcacggacggtattctgaagtctcaggaaactggaccatttaaatgtgcatggcccatgagaaaggcttataagaagccatggcactcccctttcaaaaagagctggagaaatacaagaacattgatgaagatgagcttcttggcaaactctcagaagaggaactgaaacagttggaaaatgttctagatgacctagatcctgaggctggagtgccgtggcaagatctcggctcactgcaacctctgcctcccagattcaagcgattctcctacctcagcctcccagagtgccatgctgccagctggatttcgacagaaagaccagacacagaaggcagccaccggcccctttgaccgcgagcacctcctcatgtacctggagaaggaggctttggaacagaaagacagagaggactttgtgcccttcactggagaaaagaaagggagagtctttatccctaaagaaaagcctatagaaactcgtaaagaagaaaaagtgacccttgacccagaactggaagaagctttggccagtgcctctgacaccgaactctatgatcttgcagctgtccttggagtacacaatttgctcaacaatccaaagttcgatgaagaaacagccaacaataaaggtggcaaaggacctgtcagaaatgttgtcaaaggtgaaaaagtaaagccagtatttgaggaaccaccaaatcccacaaatgtggaaataagcctgcagcagatgaaagccaatgatcctagcttgcaagaagtcaacctcaacaacattaagaacattaccaattccaaacttgtaaaaaagtaacctcgccagcgcacgtctgggatcctct

SEQ ID NO: 425139 - DNA, 590 bp, Homo sapiens
cagagtggttaatgatagtatggataaatggcatggcttggtccttaaacaatggtagaaatcccttagctcggaatgcacattttcttttcttcctctgattggttctgggtcacctgtgtttacaaattcatagagaacctcatagccactacagtgtgatacagcaaatgtatttctcaaaaaccagcccaatgtaaatggggggaaatattttccgttggttgagaaaggactagtcttgtttaggggaaaaagaaggaaagaggaaaagagagcaaatcttactgagttttttctgagtcatatatttctctgggcacagaagcccttgaggtaaactttattaacccctagacatggagaggtaatttatataagattccacactggtaagtgtcagagatggtatttaaaccaggtttttaggcccaaatgcagaattttttttttttttgagacagtcttactctgtcacccaggctggagtgccgtggcaagatctcggctcactgcaacctctgcctcccagattcaagcgattctcctacctcagcctcccaggtagctgaaattatagacacatgcca

SEQ ID NO: 425140 - DNA, 660 bp, Homo sapiens
tgactgtcaccctggctcccagaactctgttttcttgggaatacttagctcccttctcccagtgtctactctaagggcactgaaaatgccctggaagcaggagagagggactggtagtctcaggaaaattcctgtgcctgttggtgtggatgtcacctcgtgtctgtattaacaggaaacagtaccaaagaggcagctcttggctcctgcagaaggacgtgtttgcttatttttcattcacaagatcatgaagggtgcttcatgactgcttaggagctcagatgggcctgcgccgtgccccccggccccggcagctcccctccagcctgtgtcagcccagcatggcgaacagaactgctctcaacctccctgggcattgggcaggctggggtgacccctggtgggcttggggaatgtgttgagcaacctcagcacccctgtcttacagtttcttctcgtcaacagaaagatagaccttcctccgagggccgtctctcccagccgaacacagcccacccgcccagctccgccgcggtggcaaacagggggctggagaggcacgtggacatgcctcctggggaggggctcgaggagcccacgcgggggccgcggtccagcaccgctcagtgagcggaggtgtaaataaacattcaggaggaa

SEQ ID NO: 425141 - DNA, 5397 bp, Homo sapiens
ggcggccaggtggaggacctgagcaagcagctcaagcgtgtggacggccaggtgcagggcatcgccacgcacgtgcagcacttctcccaggccagcgggcttgacctggccgcgctagagtggccggaggagcaggaggtgggcgtgcgggcgttcgatagggtgcggactgggagtatcatgaaggacgccgccgaggagctcagctttgccagggtacttttacagcgggttgatgaactagagaagctattcaaagatcgggagcaattcctggaactagtcagccggaagctgagtttggttcctggtgcagaagaagtcaccatggtcacctgggaagagctggagcaggcgattacggacggctggagagcctcacaagcgggctcagaaacacttatgggattttctaagcacggagggttcacttccttaacatcacctgaagggactctaagcggagactctaccaagcaaccaagtattgagcaggctctggattctgccagtggtcttggcccggatcggactgcatcaggatctggtggcacagcacacccctctgatggggtttccagtagggaacaaagcaaggtcccctctggtactgggagacagcagcagccgagggcccgtgatgaagctggcgtgccacgactccatcagtcttctacattccaattcaaatcagactcagatcgtcacaggagtagagagaagcttacctcgacacaaccaagaagaaatgcacgtcctggtccagttcaacaggacttacccttggccagagaccagcccagtagtgtgcccgctagccagagtcaggtccatctaaggccagatcgtcgtgggttagaaccaactggcatgaatcagcctggattagtgcctgctagcacttacccacatggtgtggtacccctcagcatgggtcagcttggtgtgccaccacctgaaatggatgatcgggaattgataccatttgtcgtggatgagcaacgtatgttgccaccatcagtacctggcagagaccagcaaggattggaactacctagcacagaccaacatggtctggtttcagtcagtgcatatcagcatggtatgacatttcctggcacagaccaacgcagtatggaaccacttggcatggatcagcgtggatgtgtaatatcaggcatgggtcagcaaggactagtaccccctggtatagaccagcaaggattgacattgcctgtcgtcgatcaacatggcctggttctaccttttacagaccagcatggtttggtatcacctggtttgatgccaattagtgcagatcagcaaggttttgtgcagcccagtttggaagcaactggcttcatacaacctggcacagagcagcatgatttgatccagtctggcagatttcagcgtgctttggtgcagcgtggtgcatatcagcctggcttggtccaacctggtgcagatcagcgtggtttggtccggcctggaatggatcagtctggtttggcccaacctggtgcagatcagcgtggtttggtctggcctggaatggatcagtctggtttggcccaacctggtagagatcagcatggtttgatccagcctggcacaggtcagcatgatttggtccaatctggcacaggtcagggtgtcttggtacagcctggtgtagatcagcctggcatggtccaacctggcagatttcagcgtgctttggtgcagcctggtgcatatcagcctggcttggtccaacctggtgcagatcagattgatgtggtgcaacctggtgcagatcagcatggtttggtacaatctggtgcagatcagagtgatttggctcaacctggtgcagttcagcatggtttggtccaacctggagtagatcagcgtggtttggcacaacctcgtgcagatcatcagcgtggtttggtcccacctggtgcagatcagcgtggtttggtccaacctggtgcagatcagcatggtttggtccaacctggagtggatcagcatggtttggcacaacctggtgaagttcagcgtagtttggtgcaacctggtatagttcagcgtggtttggtgcaacctggtgcagttcagcgtggtttggtgcaacctggtgcagttcagcgtggtttggtccaacctggagtggatcagcgtggtttggttcaacctggtgcagttcagcgtggtttggtccaacctggtgcagttcagcatggtttggtccaacctggtgcagatcagcgtggtttggtccaacctggagtggatcagcgtggtttggtgcaacctggagtggatcagcgtggtttggtccaacctggaatggaccagcgtggtttgatccaacctggtgcagatcagcctggtttggtccagcctggtgcaggtcagctgggtatggtgcagcctggaataggtcagcaaggtatggtgcaacctcaggcagatccacatggcctggtacaacctggtgcctatcctcttggtttggtacaacctggtgcatatttgcatgatttatctcaatctgggacatatccacgtggtctggtgcagccaggaatggatcagtatggtttgagacaacctggtgcatatcagccaggcttgatagcaccaggcacaaagcttcgtggctcttcaacattccaggcagattctacaggttttatatcagtacgtccatatcaacatggtatggtacctcctggcagagaacaatacggccaggtgtcaccactcctagccagtcaaggtttggcatcacctggtatagatcgaaggagtttggtaccaccagaaacttatcagcaaggtttgatgcatcctggcacagaccagcacagcccaataccactgagtacaggtttgggatctacacacccagatcaacagcatgtggcatcacctggcccaggtgagcatgaccaggtatacccagatgcagctcagcatggccatgctttctctctctttgacagtcatgattcaatgtatcctggttatcgtggcccagggtatctaagtgctgatcagcatggccaggaaggtttggatccaaatagaacacgagcctcggaccgacatggaattcctgcccagaaggccccaggccaagatgtcactcttttcaggagtccagactccgtcgaccgagtcttatcagaagggagcgaagtctcgagtgaagtcctgagtgagcgacgcaattcactgcgtagaatgagttctagtttccccacggcagtggagacatttcatctgatgggagagctcagtagcctctatgtggggctaaaggagagtatgaaggatctggatgaggagcaggccggccaaaccgacttggagaagatccagttcctgctggcacagatggtcaaaaggaccatacctcctgaactgcaggagcagctgaagaccgtaaagacgctagccaaagaagtttggcaggagaaagcaaaagtggaaaggctgcagaggatcctggaaggggaagggaatcaagaagcagggaaggaactgaaagctggagagctgagattgcagctgggtgtcctcagagtcaccgtggctgacatagaaaaggagctggccgagttgagggagagccaagacaggggcaaggctgccatggaaaattctgtctctgaagcctccctttacctgcaggaccagttggacaagctcaggatgatcattgagagcatgctgacctcctcctccacgctcctgtccatgagcatggccccgcacaaggcccacaccttggctcctggccagatcgaccctgaggccacctgtccagcctgcagcctggatgtgagccatcaggtcagcacgctggtgcggcgctatgagcaactccaagacatggtcaacagcctggccgtctcccgaccctccaagaaggccaagctccagagacaggacgaggagctgctgggccgtgtgcagagtgccatcctgcaggtgcagggtgactgcgagaagctcaacatcaccaccagcaacctcatcgaggaccatcggcagaaacagaaggacattgctatgctgtaccagggtctggagaagctcgaaaaggaaaaggccaacagggagcacctggagatggagatcgatgtgaaagccgacaagagtgctctggccaccaaagtgagccgtgtccagtttgatgccaccacggagcagctgaaccacatgatgcaggagctggtggccaagatgagcgggcaggagcaggactggcagaagatgctggacaggctgctcacagagatggacaacaagctggaccgcctggagctggacccagtgaagcagttgctggaggatcggtggaaatcgctgcgacagcagctcagggagcgccccccactctaccaggcagacgaggcggctgccatgcggaggcagctcctggcacatttccactgcctctcatgtgaccggcccttggagacacctgtgactggacatgccatccccgtgacccccgcgggtccaggcctacctgggcaccattccatccgcccctacacggtgtttgaactggagcaggtccggcagcatagccgcaacctcaagctgggcagcgccttccctcggggtgacctggcgcagatggagcagagcgtggggcgcctgcgctccatgcactccaagatgctgatgaacattgagaaggtgcagatccacttcgggggctccaccaaggccagcagccagataatccgcgagctgctgcacgcccagtgcctgggctccccctgctacaaacgggtgacagatatggctgattacacctactcaactgtgccccggcgctgcgggggcagccacaccctcacctacccctaccaccgcagccgcccgcagcaccttccccggggcctgtatcctactgaagagatccagattgccatgaagcatgatgaggtggacatcttgggcctggatggccacatttacaagggacggatggacacaaggctgccaggcatcctccgaaaagacagctcagggacctcaaagcgcaagtcccagcagcccaggccccacgtgcacaggccgccatccctcagcagcaatggccagctgccctctcggccacagagcgcccagatttcggctggcaacacctcagaaagatagaccttcctccgagggccgtctctcccagccgaacacagcccacccgcccagctccgccgcggtggcaaacagggggctggagaggcacgtggacatgcctcctggggaggggctcgaggagcccacgcgggggccgcggtccagcaccgctcagtgagcggaggtgtaaataaacattcaggaggaaacaacaacataaaaacaacaaacaaaaaaacaaaaact

SEQ ID NO: 425142 - DNA, 428 bp, Homo sapiens
tcccaaagcaactcaggaccaggtcttggaaatgcaaaaataagcttcttagactgtgtccccagtcggaggctgaaggagacaacttctgacggcccctctgagctctctctttgcagtgcccagtcctaccgcccagaagcctcccaggacagaggcatagcccgggactccctagacaaaatccattggaggggggtggagggtgagagacctccagctgtgtctgcatccccctgcgtccctgatggcccaggctctgcatgggtctggcctgagtgtggagtctggcagtctctcatcgtgcaccacagagtcaccgtggctgacatagaaaaggagctggccgagttgagggagagccaagacaggggcaaggctgccatggaaaattctgtctctgaagcctccctttacctgcaggacca

SEQ ID NO: 425143 - DNA, 5359 bp, Homo sapiens
ggcggccaggtggaggacctgagcaagcagctcaagcgtgtggacggccaggtgcagggcatcgccacgcacgtgcagcacttctcccaggccagcgggcttgacctggccgcgctagagtggccggaggagcaggaggtgggcgtgcgggcgttcgatagggtgcggactgggagtatcatgaaggacgccgccgaggagctcagctttgccagggtacttttacagcgggttgatgaactagagaagctattcaaagatcgggagcaattcctggaactagtcagccggaagctgagtttggttcctggtgcagaagaagtcaccatggtcacctgggaagagctggagcaggcgattacggacggctggagagcctcacaagcgggctcagaaacacttatgggattttctaagcacggagggttcacttccttaacatcacctgaagggactctaagcggagactctaccaagcaaccaagtattgagcaggctctggattctgccagtggtcttggcccggatcggactgcatcaggatctggtggcacagcacacccctctgatggggtttccagtagggaacaaagcaaggtcccctctggtactgggagacagcagcagccgagggcccgtgatgaagctggcgtgccacgactccatcagtcttctacattccaattcaaatcagactcagatcgtcacaggagtagagagaagcttacctcgacacaaccaagaagaaatgcacgtcctggtccagttcaacaggacttacccttggccagagaccagcccagtagtgtgcccgctagccagagtcaggtccatctaaggccagatcgtcgtgggttagaaccaactggcatgaatcagcctggattagtgcctgctagcacttacccacatggtgtggtacccctcagcatgggtcagcttggtgtgccaccacctgaaatggatgatcgggaattgataccatttgtcgtggatgagcaacgtatgttgccaccatcagtacctggcagagaccagcaaggattggaactacctagcacagaccaacatggtctggtttcagtcagtgcatatcagcatggtatgacatttcctggcacagaccaacgcagtatggaaccacttggcatggatcagcgtggatgtgtaatatcaggcatgggtcagcaaggactagtaccccctggtatagaccagcaaggattgacattgcctgtcgtcgatcaacatggcctggttctaccttttacagaccagcatggtttggtatcacctggtttgatgccaattagtgcagatcagcaaggttttgtgcagcccagtttggaagcaactggcttcatacaacctggcacagagcagcatgatttgatccagtctggcagatttcagcgtgctttggtgcagcgtggtgcatatcagcctggcttggtccaacctggtgcagatcagcgtggtttggtccggcctggaatggatcagtctggtttggcccaacctggtgcagatcagcgtggtttggtctggcctggaatggatcagtctggtttggcccaacctggtagagatcagcatggtttgatccagcctggcacaggtcagcatgatttggtccaatctggcacaggtcagggtgtcttggtacagcctggtgtagatcagcctggcatggtccaacctggcagatttcagcgtgctttggtgcagcctggtgcatatcagcctggcttggtccaacctggtgcagatcagattgatgtggtgcaacctggtgcagatcagcatggtttggtacaatctggtgcagatcagagtgatttggctcaacctggtgcagttcagcatggtttggtccaacctggagtagatcagcgtggtttggcacaacctcgtgcagatcatcagcgtggtttggtcccacctggtgcagatcagcgtggtttggtccaacctggtgcagatcagcatggtttggtccaacctggagtggatcagcatggtttggcacaacctggtgaagttcagcgtagtttggtgcaacctggtatagttcagcgtggtttggtgcaacctggtgcagttcagcgtggtttggtgcaacctggtgcagttcagcgtggtttggtccaacctggagtggatcagcgtggtttggttcaacctggtgcagttcagcgtggtttggtccaacctggtgcagttcagcatggtttggtccaacctggtgcagatcagcgtggtttggtccaacctggagtggatcagcgtggtttggtgcaacctggagtggatcagcgtggtttggtccaacctggaatggaccagcgtggtttgatccaacctggtgcagatcagcctggtttggtccagcctggtgcaggtcagctgggtatggtgcagcctggaataggtcagcaaggtatggtgcaacctcaggcagatccacatggcctggtacaacctggtgcctatcctcttggtttggtacaacctggtgcatatttgcatgatttatctcaatctgggacatatccacgtggtctggtgcagccaggaatggatcagtatggtttgagacaacctggtgcatatcagccaggcttgatagcaccaggcacaaagcttcgtggctcttcaacattccaggcagattctacaggttttatatcagtacgtccatatcaacatggtatggtacctcctggcagagaacaatacggccaggtgtcaccactcctagccagtcaaggtttggcatcacctggtatagatcgaaggagtttggtaccaccagaaacttatcagcaaggtttgatgcatcctggcacagaccagcacagcccaataccactgagtacaggtttgggatctacacacccagatcaacagcatgtggcatcacctggcccaggtgagcatgaccaggtatacccagatgcagctcagcatggccatgctttctctctctttgacagtcatgattcaatgtatcctggttatcgtggcccagggtatctaagtgctgatcagcatggccaggaaggtttggatccaaatagaacacgagcctcggaccgacatggaattcctgcccagaaggccccaggccaagatgtcactcttttcaggagtccagactccgtcgaccgagtcttatcagaagggagcgaagtctcgagtgaagtcctgagtgagcgacgcaattcactgcgtagaatgagttctagtttccccacggcagtggagacatttcatctgatgggagagctcagtagcctctatgtggggctaaaggagagtatgaaggatctggatgaggagcaggccggccaaaccgacttggagaagatccagttcctgctggcacagatggtcaaaaggaccatacctcctgaactgcaggagcagctgaagaccgtaaagacgctagccaaagaagtttggcaggagaaagcaaaagtggaaaggctgcagaggatcctggaaggggaagggaatcaagaagcagggaaggaactgaaagctggagagctgagattgcagctgggtgtcctcagagtcaccgtggctgacatagaaaaggagctggccgagttgagggagagccaagacaggggcaaggctgccatggaaaattctgtctctgaagcctccctttacctgcaggaccagttggacaagctcaggatgatcattgagagcatgctgacctcctcctccacgctcctgtccatgagcatggccccgcacaaggcccacaccttggctcctggccagatcgaccctgaggccacctgtccagcctgcagcctggatgtgagccatcaggtcagcacgctggtgcggcgctatgagcaactccaagacatggtcaacagcctggccgtctcccgaccctccaagaaggccaagctccagagacaggacgaggagctgctgggccgtgtgcagagtgccatcctgcaggtgcagggtgactgcgagaagctcaacatcaccaccagcaacctcatcgaggaccatcggcagaaacagaaggacattgctatgctgtaccagggtctggagaagctcgaaaaggaaaaggccaacagggagcacctggagatggagatcgatgtgaaagccgacaagagtgctctggccaccaaagtgagccgtgtccagtttgatgccaccacggagcagctgaaccacatgatgcaggagctggtggccaagatgagcgggcaggagcaggactggcagaagatgctggacaggctgctcacagagatggacaacaagctggaccgcctggagctggacccagtgaagcagttgctggaggatcggtggaaatcgctgcgacagcagctcagggagcgccccccactctaccaggcagacgaggcggctgccatgcggaggcagctcctggcacatttccactgcctctcatgtgaccggcccttggagacacctgtgactggacatgccatccccgtgacccccgcgggtccaggcctacctgggcaccattccatccgcccctacacggtgtttgaactggagcaggtccggcagcatagccgcaacctcaagctgggcagcgccttccctcggggtgacctggcgcagatggagcagagcgtggggcgcctgcgctccatgcactccaagatgctgatgaacattgagaaggtgcagatccacttcgggggctccaccaaggccagcagccagataatccgcgagctgctgcacgcccagtgcctgggctccccctgctacaaacgggtgacagatatggctgattacacctactcaactgtgccccggcgctgcgggggcagccacaccctcacctacccctaccaccgcagccgcccgcagcaccttccccggggcctgtatcctactgaagagatccagattgccatgaagcatgatgaggtggacatcttgggcctggatggccacatttacaagggacggatggacacaaggctgccaggcatcctccgaaaagacagctcagggacctcaaagcgcaagtcccagcagcccaggccccacgtgcacaggccgccatccctcagcagcaatggccagctgccctctcggccacagagcgcccagatttcggctggcaacacctcagaaagatagaccttcctccgagggccgtctctcccagccgaacacagcccacccgcccagctccgccgcggtggcaaacagggggctggagaggcacgtggacatgcctcctggggaggggctcgaggagcccacgcgggggccgcggtccagcaccgctcagtgagcggaggtgtaaataaacattcaggaggaa

SEQ ID NO: 425144 - DNA, 3553 bp, Homo sapiens
ggcggccaggtggaggacctgagcaagcagctcaagcgtgtggacggccaggtgcagggcatcgccacgcacgtgcagcacttctcccaggccagcgggcttgacctggccgcgctagagtggccggaggagcaggaggtgggcgtgcgggcgttcgatagggtgcggactgggagtatcatgaaggacgccgccgaggagctcagctttgccagggtacttttacagcgggttgatgaactagagaagctattcaaagatcgggagcaattcctggaactagtcagccggaagctgagtttggttcctggtgcagaagaagtcaccatggtcacctgggaagagctggagcaggcgattacggacggctggagagcctcacaagcgggctcagaaacacttatgggattttctaagcacggagggttcacttccttaacatcacctgaagggactctaagcggagactctaccaagcaaccaagtattgagcaggctctggattctgccagtggtcttggcccggatcggactgcatcaggatctggtggcacagcacacccctctgatggggtttccagtagggaacaaagcaaggtcccctctggtactgggagacagcagcagccgagggcccgtgatgaagctggcgtgccacgactccatcagtcttctacattccaattcaaatcagactcagatcgtcacaggagtagagagaagcttacctcgacacaaccaagaagaaatgcacgtcctggtccagttcaacaggacttacccttggccagagaccagcccagtagtgtgcccgctagccagagtcaggtccatctaaggccagatcgtcgtgggttagaaccaactggcatgaatcagcctggattagtgcctgctagcacttacccacatggtgtggtacccctcagcatgggtcagcttggtgtgccaccacctgaaatggatgatcgggaattgataccatttgtcgtggatgagcaacgtatgttgccaccatcagtacctggcagagaccagcaaggattggaactacctagcacagaccaacatggtctggtttcagtcagtgcatatcagcatggtatgacatttcctggcacagaccaacgcagtatggaaccacttggcatggatcagcgtggatgtgtaatatcaggcatgggtcagcaaggactagtaccccctggtatagaccagcaaggattgacattgcctgtcgtcgatcaacatggcctggttctaccttttacagaccagcatggtttggtatcacctggtttgatgccaattagtgcagatcagcaaggttttgtgcagcccagtttggaagcaactggcttcatacaacctggcacagagcagcatgatttgatccagtctggcagatttcagcgtgctttggtgcagcgtggtgcatatcagcctggcttggtccaacctggtgcagatcagcgtggtttggtccggcctggaatggatcagtctggtttggcccaacctggtgcagatcagcgtggtttggtctggcctggaatggatcagtctggtttggcccaacctggtagagatcagcatggtttgatccagcctggcacaggtcagcatgatttggtccaatctggcacaggtcagggtgtcttggtacagcctggtgtagatcagcctggcatggtccaacctggcagatttcagcgtgctttggtgcagcctggtgcatatcagcctggcttggtccaacctggtgcagatcagattgatgtggtgcaacctggtgcagatcagcatggtttggtacaatctggtgcagatcagagtgatttggctcaacctggtgcagttcagcatggtttggtccaacctggagtagatcagcgtggtttggcacaacctcgtgcagatcatcagcgtggtttggtcccacctggtgcagatcagcgtggtttggtccaacctggtgcagatcagcatggtttggtccaacctggagtggatcagcatggtttggcacaacctggtgaagttcagcgtagtttggtgcaacctggtatagttcagcgtggtttggtgcaacctggtgcagttcagcgtggtttggtgcaacctggtgcagttcagcgtggtttggtccaacctggagtggatcagcgtggtttggttcaacctggtgcagttcagcgtggtttggtccaacctggtgcagttcagcatggtttggtccaacctggtgcagatcagcgtggtttggtccaacctggagtggatcagcgtggtttggtgcaacctggagtggatcagcgtggtttggtccaacctggaatggaccagcgtggtttgatccaacctggtgcagatcagcctggtttggtccagcctggtgcaggtcagctgggtatggtgcagcctggaataggtcagcaaggtatggtgcaacctcaggcagatccacatggcctggtacaacctggtgcctatcctcttggtttggtacaacctggtgcatatttgcatgatttatctcaatctgggacatatccacgtggtctggtgcagccaggaatggatcagtatggtttgagacaacctggtgcatatcagccaggcttgatagcaccaggcacaaagcttcgtggctcttcaacattccaggcagattctacaggttttatatcagtacgtccatatcaacatggtatggtacctcctggcagagaacaatacggccaggtgtcaccactcctagccagtcaaggtttggcatcacctggtatagatcgaaggagtttggtaccaccagaaacttatcagcaaggtttgatgcatcctggcacagaccagcacagcccaataccactgagtacaggtttgggatctacacacccagatcaacagcatgtggcatcacctggcccaggtgagcatgaccaggtatacccagatgcagctcagcatggccatgctttctctctctttgacagtcatgattcaatgtatcctggttatcgtggcccagggtatctaagtgctgatcagcatggccaggaaggtttggatccaaatagaacacgagcctcggaccgacatggaattcctgcccagaaggccccaggccaagatgtcactcttttcaggagtccagactccgtcgaccgagtcttatcagaagggagcgaagtctcgagtgaagtcctgagtgagcgacgcaattcactgcgtagaatgagttctagtttccccacggcagtggagacatttcatctgatgggagagctcagtagcctctatgtggggctaaaggagagtatgaaggatctggatgaggagcaggccggccaaaccgacttggagaagatccagttcctgctggcacagatgggtgggtgccgcttgccgatagaggagaaaccattgtctctgttttcagttggtttcatccttttcttcccctggcctcaactcctggctgctacacatctccctgagtccctgaaaacagcatgtcattcagagcatgtcccacagccttcagagtcca

SEQ ID NO: 425145 - DNA, 1315 bp, Homo sapiens
ggcgttggagaggcgcggccgccgccctgcgtctgcgcagtcgtcggctgccgcgctgccgagtcactggggtgggaggagcataagcagggggaggggtgcatgccggagtgcgcaggcgcaacgcgactcccgaggcgcgggccgcccccttggctggtttggatccgggtcagtcgggtgccgagatttgggagagacgctctgaactgactgccccgcatcaccggagcgtcccagctgcgaggagtgtaaacaggaacatcgataagtagtgtaaaaacttgcacaatgaaatccgaagccaaggatggagaggaggagagtctacagactgctttcaaaaaattaagagtggatgcatcagggtctgtagcatctctgtctgttggagaaggcacaggtgtcagagcaccagtcagaacagcaacagatgataccaaacctaaaaccacatgtgcatctaaagacagttggcacgggtctacaaggaagtcttcacgaggagcagtgagaactcagcgtcgtcgacgttctaagtctcctgtccttcatcctccaaagtttatacattgcagtacaatagcgtcttcttccagcagtcaactcaagcacaaaagccagactgactcacctgatggcagcagtgggctgggaatttcatcccctaaagagttcagtgcaggagaaagctctacttctctcgatgctaatcacacaggggcagtcgttgagcctttgagaacttctgttccaaggctcccatcagagagtaagaaggaagactcctctgacgctacccaagtcccccaagcaagtctcaaagccagtgatctctctgactttcaatcagtttccaagctaaaccagggcaagccatgcacatgcataggcaaggaatgccagtgtaagagatggcatgatatggaagtgtattccttttcaggcctgcagagtgtccctcccttggctccagaacgaagatccacacttgaggactactctcagtcgctgcacgccagaactctgtctggctctccccgatcctgttctgagcaagctcgagtcttcgtggatgatgtgaccattgaggacctgtcaggctacatggagtattacttgtatattcccaagaaaatgtcccacatggcagaaatgatgtacacctgatagcaagaagctaattcatatgctttaaaccaatgaaggcttgtcaaagagatttagttaatggcagaccttgtggccactttgtgtgagaagacatctctttctgctcactgtgcttgcaataaaaacttttcttggcatctca

SEQ ID NO: 425146 - DNA, 1721 bp, Homo sapiens
ggcgttggagaggcgcggccgccgccctgcgtctgcgcagtcgtcggctgccgcgctgccgagtcactggggtgggaggagcataagcagggggaggggtgcatgccggagtgcgcaggcgcaacgcgactcccgaggcgcgggccgcccccttggctggtttggatccgggtcagtcgggtgccgagatttgggagagacgctctgaactgactgccccgcatcaccggagcgtcccagctgcgaggagtgtaaacaggaacatcgataagtagtgtaaaaacttgcacaatgaaatccgaagccaaggatggagaggaggagagtctacagactgctttcaaaaaattaagagtggatgcatcagggtctgtagcatctctgtctgttggagaaggcacaggtgtcagagcaccagtcagaacagcaacagatgataccaaacctaaaaccacatgtgcatctaaagacagttggcacgggtctacaaggaagtcttcacgaggagcagtgagaactcagcgtcgtcgacgttctaagtctcctgtccttcatcctccaaagtttatacattgcagtacaatagcgtcttcttccagcagtcaactcaagcacaaaagccagactgactcacctgatggcagcagtgggctgggaatttcatcccctaaagagttcagtgcaggagaaagctctacttctctcgatgctaatcacacaggggcagtcgttgagcctttgagaacttctgttccaaggctcccatcagagagtaagaaggaagactcctctgacgctacccaagtcccccaagcaagtctcaaagccagtgatctctctgactttcaatcagtttccaagctaaaccagggcaagccatgcacatgcataggcaaggaatgccagtgtaagagatggcatgatatggaagtgtattccttttcaggcctgcagagtgtccctcccttggctccagaacgaagatccacacttgaggactactctcagtcgctgcacgccagaactctgtctggctctccccgatcctgttctgagcaagctcgagtcttcgtggatgatgtgaccattgaggacctgtcaggctacatggagtattacttgtatattcccaagaaaatgtcccacatggcagaaatgatgtacacctgatagcaagaagctaattcatatgctttaaaccaatgaaggcttgtcaaagagatttagttaatggcagaccttgtggccactttgtgtgagaagacatctctttctgctcactgtgcttgcaataaaaacttttcttggcatctcagttaatcttcattctttcaacttactctcttgagttcttacatacacttcaaggcgagcagatcaaagaaaaatcccccttatttagaaatgttcctgggggatgaagaaaccataattacttgagactggcagcagtgggtatatggtaaaagcctttgtaaaacagtgcatttttcagatttgtttaaggtttgctagccaaggaaagtaaaatgtgattttgtaactgcactaaacatttgtcatgctgtagttgccagcccagaatattagaagttacaagactgatttaaaccgtctctgatttaatgcaagatatattgtgtctataaaggtttctcttgttattgttaagccagagatctaaggtttagattcaatttgaataaactagctggcctgcc

SEQ ID NO: 425147 - DNA, 845 bp, Homo sapiens
  misc_feature (48)..(48): n is a, c, g, or t
ccattcacattcatattcaattaactccatctcaatatatttcattanatttaattgtattccttttcaggcctgcagagtgtccctcccttggctccagaacgaagatccacacttgaggactactctcagtcgctgcacgccagaactctgtctggctctccccgatcctgttctgagcaagctcgagtcttcgtggatgatgtgaccattgaggacctgtcaggctacatggagtattacttgtatattcccaagaaaatgtcccacatggcagaaatgatgtacacctgatagcaagaagctaattcatatgctttaaaccaatgaaggcttgtcaaagagatttagttaatggcagaccttgtggccactttgtgtgagaagacatctctttctgctcactgtgcttgcaataaaaacttttcttggcatctcagttaatcttcattctttcaacttactctcttgagttcttacatacacttcaaggcgagcagatcaaagaaaaatcccccttatttagaaatgttcctgggggatgaagaaaccataattacttgagactggcagcagtgggtatatggtaaaagcctttgtaaaacagtgcatttttcagatttgtttaaggtttgctagccaaggaaagtaaaatgtgattttgtaactgcactaaacatttgtcatgctgtagttgccagcccagaatattagaagttacaagactgatttaaaccgtctctgatttaatgcaagatatattgtgtctataaaggtttctcttgttattgttaagccagagatctaaggtttagattcaatttgaataaactagctggcctgcc

SEQ ID NO: 425148 - DNA, 1134 bp, Homo sapiens
ttggggagattggctcagatgatttatgaactcggtaagagctgaacattgactaacggatcataaggtaattgaggaacattgtaagtcaaacttcaatttagttctaccagcaggaaggatttgtttacaacctgcaatagtactcttttagatgatgtgaagctttgaaaatattgaaataagtgattgctcacctctccccccaggtatataggaattgattgtgtatttgggggatcctaccctaaactgagaattagagactagtgaagcatgggattgtgtggataatgtttcttcatgtttatgtacttaaataaaccagcaaaatatacgtcgagaatgtatctaaattatttttttgtcctaagaagttgaggtgcaggctggctgaatttttttttttttttttagtagctgaattcttttgagactgttttcagtgttccccagagagctctgcctaaaataccttaacttccgcaaataagtaaagtgaaaagtcctgattccttgcctctttattttgcgctggtactacaataatataatggttactttatatcaaacattatgacaccttgacctttggaatattagaggtctcacaataacttcggagccaccttgagaaacgagcagatatgaatcagagaggacccaagggccgttggagaggcactgctccctctgagaatgcccaagaggggtgggggcgggggggggcgggtaaaggcttagaaataaagaggtgaagtgaaccttttgcttcaaatattctctatttctatttttttggtggtacttttcttctgattctctctgatatgttcatagatgctggttggcttaattggtattcaaaatttggtactaataaccctgagtgaaaaaataatttggagactagattcaagggtttattaacagacttctctgtgtgtttcttgttgctttggttggttcttcatctacctttctctgtttaaatataaaaatcaggtggaaaatatggaggactttgattaatcaaactagttaagagatcatttagtggtgcgtctacacaatagtcatttctgttttttttctttactttcaacctttctttaggctaaagagaagttcgtc

SEQ ID NO: 425149 - DNA, 945 bp, Homo sapiens
tactctacgctttctggtggtctgggagtttcgaaatctttaatgttgtgatgacaacgcttacccgcgcatcccttcttgatcgttcttaggtcttctcaggggcctggaagtgtagacctaggcttgggattcaaggaggtcttggttaaaacggcaagatgtaaataagattgtgacgcatccattttgttgaaagaaaaaaccaggaatttggccttttgatggaggaacttagaagaactttgtaattttgtaaggttgtggaaaatccgaggcaaagttaaattgcctggtgtgatttgactttaacttcgaataggctttttaaagtttcatctctttggagattgttcaacttcacgagttcactgcagtgaaaacgccaagactgtctcccacaaatttaatattaatgaagaaaggcaagccaattatatctgttgtccggagttagttgtacagccctttctttgaatggggatctggggatgcagaggagcataatgagccttttataattacaaacatgctcttctctagctcttaaggttatgcctaacgctcatttgctcttggctaaaataactgagaaaaaaagtgagtagtaaaaaaatgctggaagtctgaaaatggtttagacagaacttcattcctgaagttttagtctgtagccagattttaattctggcctgttttggtttttagatgatagatcttttagtgtgtcaacaggaatgtaaagtttgtattaaacatctagggtgatcacctgccatgctattaagtcagcatggtataattaaaagttacatatgtaggttcagagcctcttagcacagtgttacattgtaagctcttggagggcaggaatgagattctagtccttacggaaatggagtttgggcttctatccctagcattcattctagtgccatgcacgtg

SEQ ID NO: 425150 - DNA, 2279 bp, Homo sapiens
ggcgttggagaggcgcggccgccgccctgcgtctgcgcagtcgtcggctgccgcgctgccgagtcactggggtgggaggagcataagcagggggaggggtgcatgccggagtgcgcaggcgcaacgcgactcccgaggcgcgggccgcccccttggctggtttggatccgggtcagtcgggtgccgagatttgggagagacgctctgaactgactgccccgcatcaccggagcgtcccagctgcgaggagtgtaaacaggaacatcgataagtagtgtaaaaacttgcacaatgaaatccgaagccaaggatggagaggaggagagtctacagactgctttcaaaaaattaagagtggatgcatcagggtctgtagcatctctgtctgttggagaaggcacaggtgtcagagcaccagtcagaacagcaacagatgataccaaacctaaaaccacatgtgcatctaaagacagttggcacgggtctacaaggaagtcttcacgaggagcagtgagaactcagcgtcgtcgacgttctaagtctcctgtccttcatcctccaaagtttatacattgcagtacaatagcgtcttcttccagcagtcaactcaagcacaaaagccagactgactcacctgatggcagcagtgggctgggaatttcatcccctaaagagttcagtgcaggagaaagctctacttctctcgatgctaatcacacaggggcagtcgttgagcctttgagaacttctgttccaaggctcccatcagagagtaagaaggaagactcctctgacgctacccaagtcccccaagcaagtctcaaagccagtgatctctctgactttcaatcagtttccaagctaaaccagggcaagccatgcacatgcataggcaaggaatgccagtgtaagagatggcatgatatggaagtgtattccttttcaggcctgcagagtgtccctcccttggctccagaacgaagatccacacttgaggactactctcagtcgctgcacgccagaactctgtctggctctccccgatcctgttctgagcaagctcgagtcttcgtggatgatgtgaccattgaggacctgtcaggctacatggagtattacttgtatattcccaagaaaatgtcccacatggcagaaatgatgtacacctgatagcaagaagctaattcatatgctttaaaccaatgaaggcttgtcaaagagatttagttaatggcagaccttgtggccactttgtgtgagaagacatctctttctgctcactgtgcttgcaataaaaacttttcttggcatctcagttaatcttcattctttcaacttactctcttgagttcttacatacacttcaaggcgagcagatcaaagaaaaatcccccttatttagaaatgttcctgggggatgaagaaaccataattacttgagactggcagcagtgggtatatggtaaaagcctttgtaaaacagtgcatttttcagatttgtttaaggtttgctagccaaggaaagtaaaatgtgattttgtaactgcactaaacatttgtcatgctgtagttgccagcccagaatattagaagttacaagactgatttaaaccgtctctgatttaatgcaagatatattgtgtctataaaggtttctcttgttattgttaagccagagatctaaggtttagattcaatttgaataaactagctggcctgccctctattgtttgagagagttattaaccatcactaaataagcccctgctggtgctattcatcctaagacatgttacatgcagtttcaagtaagcagcttggaatgggctgcttcagttggagggagggggtgtaatatttgaaacgagtgtgtgtcttcaccatctccagcattttaaatatatggcgttttttttttttttggttatcagttgtaatacaggtctcatacctcagtttcagatgttatagatggttacctctttgagctgccctgtcaccccagcaaccctaaaagagaattttgtacattctgtatcccacagatttggtcagccatttcaaaattccctccagtttggtaaaaaaaaaatctgtcttcggtttcagctggatgatgaatccttgtttttcaggtggctccaaaaagaatgttgcatgtgttcagaccatcctgagcagagccaccaaatttagtgacagtgtctagccatgttagcaataatgttaacagaagcttttgtttaaattacaaaatacatttatactatttactaaaa

SEQ ID NO: 425151 - DNA, 2110 bp, Homo sapiens
ggcgttggagaggcgcggccgccgccctgcgtctgcgcagtcgtcggctgccgcgctgccgagtcactggggtgggaggagcataagcagggggaggggtgcatgccggagtgcgcaggcgcaacgcgactcccgaggcgcgggccgcccccttggctggtttggatccgggtcagtcgggtgccgagatttgggagagacgctctgaactgactgccccgcatcaccggagcgtcccagctgcgaggagtgtaaacaggaacatcgataagtagtgtaaaaacttgcacaatgaaatccgaagccaaggatggagaggaggagagtctacagactgctttcaaaaaattaagagtggatgcatcagggtctgtagcatctctgtctgttggagaaggcacaggtgtcagagcaccagtcagaacagcaacagatgataccaaacctaaaaccacatgtgcatctaaagacagttggcacgggtctacaaggaagtcttcacgaggagcagtgagaactcagcgtcgtcgacgttctaagtctcctgtccttcatcctccaaagtttatacattgcagtacaatagcgtcttcttccagcagtcaactcaagcacaaaagccagactgactcacctgatggcagcagtgggctgggaatttcatcccctaaagagttcagtgcaggagaaagctctacttctctcgatgctaatcacacaggggcagtcgttgagcctttgagaacttctgttccaaggctcccatcagagagtaagaaggaagactcctctgacgctacccaagtcccccaagcaagtctcaaagccagtgatctctctgactttcaatcagtttccaagctaaaccagggcaagccatgcacatgcataggcaaggaatgccagtgtaagagatggcatgatatggaagtgtattccttttcaggcctgcagagtgtccctcccttggctccagaacgaagatccacacttgaggactactctcagtcgctgcacgccagaactctgtctggctctccccgatcctgttctgagcaagctcgagtcttcgtggatgatgtgaccattgaggacctgtcaggctacatggagtattacttgtatattcccaagaaaatgtcccacatggcagaaatgatgtacacctgatagcaagaagctaattcatatgctttaaaccaatgaaggcttgtcaaagagatttagttaatggcagaccttgtggccactttgtgtgagaagacatctctttctgctcactgtgcttgcaataaaaacttttcttggcatctcagttaatcttcattctttcaacttactctcttgagttcttacatacacttcaaggcgagcagatcaaagaaaaatcccccttatttagaaatgttcctgggggatgaagaaaccataattacttgagactggcagcagtgggtatatggtaaaagcctttgtaaaacagtgcatttttcagatttgtttaaggtttgctagccaaggaaagtaaaatgtgattttgtaactgcactaaacatttgtcatgctgtagttgccagcccagaatattagaagttacaagactgatttaaaccgtctctgatttaatgcaagatatattgtgtctataaaggtttctcttgttattgttaagccagagatctaaggtttagattcaatttgaataaactagctggcctgccaaaaaaaagaaaaaaaaaaaacaaaaacaaaacactgtgtgttggcgcgcgcgccgtgggccccgtgggaaaaaagcttccttgtgaacaccatattcgttgtgggccgcgcggggggcccccaatttgtggttaatggtgaaccgtgggtctcaaagcgggtcccccagagaggagaactcgcgggcacagattgaaacataggtgttgtggggaattttcttctccgacattataaaaaaaggcgcgggggggaaaacagcggaagagtggtttggtgaaacaaattctcacaaagatgggagttctggaagggctacataggcgggactctctaatacagggggggagttcaaagaggaatcgccgaaatattaaaaattaaggcc

SEQ ID NO: 425152 - DNA, 2088 bp, Homo sapiens
ggcgttggagaggcgcggccgccgccctgcgtctgcgcagtcgtcggctgccgcgctgccgagtcactggggtgggaggagcataagcagggggaggggtgcatgccggagtgcgcaggcgcaacgcgactcccgaggcgcgggccgcccccttggctggtttggatccgggtcagtcgggtgccgagatttgggagagacgctctgaactgactgccccgcatcaccggagcgtcccagctgcgaggagtgtaaacaggaacatcgataagtagtgtaaaaacttgcacaatgaaatccgaagccaaggatggagaggaggagagtctacagactgctttcaaaaaattaagagtggatgcatcagggtctgtagcatctctgtctgttggagaaggcacaggtgtcagagcaccagtcagaacagcaacagatgataccaaacctaaaaccacatgtgcatctaaagacagttggcacgggtctacaaggaagtcttcacgaggagcagtgagaactcagcgtcgtcgacgttctaagtctcctgtccttcatcctccaaagtttatacattgcagtacaatagcgtcttcttccagcagtcaactcaagcacaaaagccagactgactcacctgatggcagcagtgggctgggaatttcatcccctaaagagttcagtgcaggagaaagctctacttctctcgatgctaatcacacaggggcagtcgttgagcctttgagaacttctgttccaaggctcccatcagagagtaagaaggaagactcctctgacgctacccaagtcccccaagcaagtctcaaagccagtgatctctctgactttcaatcagtttccaagctaaaccagggcaagccatgcacatgcataggcaaggaatgccagtgtaagagatggcatgatatggaagtgtattccttttcaggcctgcagagtgtccctcccttggctccagaacgaagatccacacttgaggactactctcagtcgctgcacgccagaactctgtctggctctccccgatcctgttctgagcaagctcgagtcttcgtggatgatgtgaccattgaggacctgtcaggctacatggagtattacttgtatattcccaagaaaatgtcccacatggcagaaatgatgtacacctgatagcaagaagctaattcatatgctttaaaccaatgaaggcttgtcaaagagatttagttaatggcagaccttgtggccactttgtgtgagaagacatctctttctgctcactgtgcttgcaataaaaacttttcttggcatctcagttaatcttcattctttcaacttactctcttgagttcttacatacacttcaaggcgagcagatcaaagaaaaatcccccttatttagaaatgttcctgggggatgaagaaaccataattacttgagactggcagcagtgggtatatggtaaaagcctttgtaaaacagtgcatttttcagatttgtttaaggtttgctagccaaggaaagtaaaatgtgattttgtaactgcactaaacatttgtcatgctgtagttgccagcccagaatattagaagttacaagactgatttaaaccgtctctgatttaatgcaagatatattgtgtctataaaggtttctcttgttattgttaagccagagatctaaggtttagattcaatttgaataaactagctggcctgccctctattgtttgagagagttattaaccatcactaaataagcccctgctggtgctattcatcctaagacatgttacatgcagtttcaagtaagcagcttggaatgggctgcttcagttggagggagggggtgtaatatttgaaacgagtgtgtgtcttcaccatctccagcattttaaatatatggcgttttttttttttttggttatcagttgtaatacaggtctcatacctcagtttcagatgttatagatggttacctctttagccggtgatgtcaccccatatcctcttaaaggaaaattttgatcatttttgaccaaaaaattttgtcggacattttaaaaatccctccaaattagtaaaaga

SEQ ID NO: 425153 - DNA, 2485 bp, Homo sapiens
  misc_feature (822)..(822): n is a, c, g, or t
ttggggagattggctcagatgatttatgaactcggtaagagctgaacattgactaacggatcataaggtaattgaggaacattgtaagtcaaacttcaatttagttctaccagcaggaaggatttgtttacaacctgcaatagtactcttttagatgatgtgaagctttgaaaatattgaaataagtgattgctcacctctccccccaggtatataggaattgattgtgtatttgggggatcctaccctaaactgagaattagagactagtgaagcatgggattgtgtggataatgtttcttcatgtttatgtacttaaataaaccagcaaaatatacgtcgagaatgtatctaaattatttttttgtcctaagaagttgaggtgcaggctggctgaatttttttttttttttttagtagctgaattcttttgagactgttttcagtgttccccagagagctctgcctaaaataccttaacttccgcaaataagtaaagtgaaaagtcctgattccttgcctctttattttgcgctggtactacaataatataatggttactttatatcaaacattatgacaccttgacctttggaatattagaggtctcacaataacttcggagccaccttgagaaacgagcagatatgaatcagagaggacccaagggccgttggagaggcactgctccctctgggttctgactaggaattttcctccgttcatgtttaaccgcgacaggcacagactctgggtgaaaagaaagaactttgtgctttggctgcagcgctgcgagtataaagggatgagtgggtgcacggngaggctatgaagaaaaacacaaatggaagtatcaaccttactggtagagtgcatttctaattctgctttcacagtggtaacgtcttgttctctaaaacgtgtcttcctgtgaacatagctgtctgggtcaggactgctctagagaaatgctatcatgtgtcatgaaagttatacttaactagggttaggccagacaaatactcagtgtcattttaaagaatcagagtgctataattttagctattcccttttatttctgatgtcattttgttcataggtttctagaccaactggggagattcccgttaaaaagtatgtatactgaaacatagattttagatcatctagtttccaaaattgtgtaataggattttggcatcaagtatgtgaacagtttatattctgtcatagtacatatccatttttggtatcatttcatttgtttccctttaagaaataaaacctatagtctccagttatctacactgaaacttcctttttgaaataaaaatttgctttttttttctaacagtaatggtaacaggtatacttttgatcccacctgtttttactttgctcactttattttcttttttagtgtaaacaggaacatcgataagtagtgtaaaaacttgcacaatgaaatccgaagccaaggatggagaggaggagagtctacagactgctttcaaaaaattaagagtggatgcatcagggtctgtagcatctctgtctgttggagaaggcacaggtgtcagagcaccagtcagaacagcaacagatgataccaaacctaaaaccacatgtgcatctaaagacagttggcacgggtctacaaggaagtcttcacgaggagcagtgagaactcagcgtcgtcgacgttctaagtctcctgtccttcatcctccaaagtttatacattgcagtacaatagcgtcttcttccagcagtcaactcaagcacaaaagccagactgactcacctgatggcagcagtgggctgggaatttcatcccctaaagagttcagtgcaggagaaagctctacttctctcgatgctaatcacacaggggcagtcgttgagcctttgagaacttctgttccaaggctcccatcagagagtaagaaggaagactcctctgacgctacccaagtcccccaagcaagtctcaaagccagtgatctctctgactttcaatcagtttccaagctaaaccagggcaagccatgcacatgcataggcaaggaatgccagtgtaagagatggcatgatatggaagtgtattccttttcaggcctgcagagtgtccctcccttggctccagaacgaagatccacacttgaggactactctcagtcgctgcacgccagaactctgtctggctctccccgatcctgttctgagcaagctcgagtcttcgtggatgatgtgaccattgaggacctgtcaggctacatggagtattacttgtatattcccaagaaaatgtcccacatggcagaaatgatgtacacctgatagcaagaagctaattcatatgctttaaaccaatgaaggcttgtcaaagagatttagttaatggcagaccttgtggccactttgtgtgagaagacatctctttctgctcactgtgcttgcaataaaaacttttcttggcatctca

SEQ ID NO: 425154 - DNA, 1965 bp, Homo sapiens
  misc_feature (822)..(822): n is a, c, g, or t
ttggggagattggctcagatgatttatgaactcggtaagagctgaacattgactaacggatcataaggtaattgaggaacattgtaagtcaaacttcaatttagttctaccagcaggaaggatttgtttacaacctgcaatagtactcttttagatgatgtgaagctttgaaaatattgaaataagtgattgctcacctctccccccaggtatataggaattgattgtgtatttgggggatcctaccctaaactgagaattagagactagtgaagcatgggattgtgtggataatgtttcttcatgtttatgtacttaaataaaccagcaaaatatacgtcgagaatgtatctaaattatttttttgtcctaagaagttgaggtgcaggctggctgaatttttttttttttttttagtagctgaattcttttgagactgttttcagtgttccccagagagctctgcctaaaataccttaacttccgcaaataagtaaagtgaaaagtcctgattccttgcctctttattttgcgctggtactacaataatataatggttactttatatcaaacattatgacaccttgacctttggaatattagaggtctcacaataacttcggagccaccttgagaaacgagcagatatgaatcagagaggacccaagggccgttggagaggcactgctccctctgggttctgactaggaattttcctccgttcatgtttaaccgcgacaggcacagactctgggtgaaaagaaagaactttgtgctttggctgcagcgctgcgagtataaagggatgagtgggtgcacggngaggctatgaagaaaaacacaaatggaagtatcaaccttactggtttctagaccaactggggagattcccgttaaaaatgtaaacaggaacatcgataagtagtgtaaaaacttgcacaatgaaatccgaagccaaggatggagaggaggagagtctacagactgctttcaaaaaattaagagtggatgcatcagggtctgtagcatctctgtctgttggagaaggcacaggtgtcagagcaccagtcagaacagcaacagatgataccaaacctaaaaccacatgtgcatctaaagacagttggcacgggtctacaaggaagtcttcacgaggagcagtgagaactcagcgtcgtcgacgttctaagtctcctgtccttcatcctccaaagtttatacattgcagtacaatagcgtcttcttccagcagtcaactcaagcacaaaagccagactgactcacctgatggcagcagtgggctgggaatttcatcccctaaagagttcagtgcaggagaaagctctacttctctcgatgctaatcacacaggggcagtcgttgagcctttgagaacttctgttccaaggctcccatcagagagtaagaaggaagactcctctgacgctacccaagtcccccaagcaagtctcaaagccagtgatctctctgactttcaatcagtttccaagctaaaccagggcaagccatgcacatgcataggcaaggaatgccagtgtaagagatggcatgatatggaagtgtattccttttcaggcctgcagagtgtccctcccttggctccagaacgaagatccacacttgaggactactctcagtcgctgcacgccagaactctgtctggctctccccgatcctgttctgagcaagctcgagtcttcgtggatgatgtgaccattgaggacctgtcaggctacatggagtattacttgtatattcccaagaaaatgtcccacatggcagaaatgatgtacacctgatagcaagaagctaattcatatgctttaaaccaatgaaggcttgtcaaagagatttagttaatggcagaccttgtggccactttgtgtgagaagacatctctttctgctcactgtgcttgcaataaaaacttttcttggcatctca

SEQ ID NO: 425155 - DNA, 1490 bp, Homo sapiens
tactctacgctttctggtggtctgggagtttcgaaatctttaatgttgtgatgacaacgcttacccgcgcatcccttcttgatcgttcttaggtcttctcaggggcctggaagtgtagacctaggcttgggattcaaggaggtcttggttaaaacggcaagatgtaaataagattgtgacgcatccattttgttgaaagaaaaaaccaggaatttggccttttgatggaggaacttagaagaactttgtaattttgtaaggttgtggaaaatccgaggcaaagttaaattgcctggtgtgatttgactttaacttcgaataggctttttaaagtttcatctctttggagattgttcaacttcacgagttcactgcagtgaaaacgccaagactgtctcccacaaatttaatattaatgaagaaagtgtaaacaggaacatcgataagtagtgtaaaaacttgcacaatgaaatccgaagccaaggatggagaggaggagagtctacagactgctttcaaaaaattaagagtggatgcatcagggtctgtagcatctctgtctgttggagaaggcacaggtgtcagagcaccagtcagaacagcaacagatgataccaaacctaaaaccacatgtgcatctaaagacagttggcacgggtctacaaggaagtcttcacgaggagcagtgagaactcagcgtcgtcgacgttctaagtctcctgtccttcatcctccaaagtttatacattgcagtacaatagcgtcttcttccagcagtcaactcaagcacaaaagccagactgactcacctgatggcagcagtgggctgggaatttcatcccctaaagagttcagtgcaggagaaagctctacttctctcgatgctaatcacacaggggcagtcgttgagcctttgagaacttctgttccaaggctcccatcagagagtaagaaggaagactcctctgacgctacccaagtcccccaagcaagtctcaaagccagtgatctctctgactttcaatcagtttccaagctaaaccagggcaagccatgcacatgcataggcaaggaatgccagtgtaagagatggcatgatatggaagtgtattccttttcaggcctgcagagtgtccctcccttggctccagaacgaagatccacacttgaggactactctcagtcgctgcacgccagaactctgtctggctctccccgatcctgttctgagcaagctcgagtcttcgtggatgatgtgaccattgaggacctgtcaggctacatggagtattacttgtatattcccaagaaaatgtcccacatggcagaaatgatgtacacctgatagcaagaagctaattcatatgctttaaaccaatgaaggcttgtcaaagagatttagttaatggcagaccttgtggccactttgtgtgagaagacatctctttctgctcactgtgcttgcaataaaaacttttcttggcatctca

SEQ ID NO: 425156 - DNA, 1046 bp, Homo sapiens
aaaaatgtattgataaaagttgtatttgagctagtgagaacaatatgttctcctcattttacagttttttgtagctgtaaactttgttcttgtcttcaggtctgtagcatctctgtctgttggagaaggcacaggtgtcagagcaccagtcagaacagcaacagatgataccaaacctaaaaccacatgtgcatctaaagacagttggcacgggtctacaaggaagtcttcacgaggagcagtgagaactcagcgtcgtcgacgttctaagtctcctgtccttcatcctccaaagtttatacattgcagtacaatagcgtcttcttccagcagtcaactcaagcacaaaagccagactgactcacctgatggcagcagtgggctgggaatttcatcccctaaagagttcagtgcaggagaaagctctacttctctcgatgctaatcacacaggggcagtcgttgagcctttgagaacttctgttccaaggctcccatcagagagtaagaaggaagactcctctgacgctacccaagtcccccaagcaagtctcaaagccagtgatctctctgactttcaatcagtttccaagctaaaccagggcaagccatgcacatgcataggcaaggaatgccagtgtaagagatggcatgatatggaagtgtattccttttcaggcctgcagagtgtccctcccttggctccagaacgaagatccacacttgaggactactctcagtcgctgcacgccagaactctgtctggctctccccgatcctgttctgagcaagctcgagtcttcgtggatgatgtgaccattgaggacctgtcaggctacatggagtattacttgtatattcccaagaaaatgtcccacatggcagaaatgatgtacacctgatagcaagaagctaattcatatgctttaaaccaatgaaggcttgtcaaagagatttagttaatggcagaccttgtggccactttgtgtgagaagacatctctttctgctcactgtgcttgcaataaaaacttttcttggcatctca

SEQ ID NO: 425157 - DNA, 1201 bp, Homo sapiens
ggcgttggagaggcgcggccgccgccctgcgtctgcgcagtcgtcggctgccgcgctgccgagtcactggggtgggaggagcataagcagggggaggggtgcatgccggagtgcgcaggcgcaacgcgactcccgaggcgcgggccgcccccttggctggtttggatccgggtcagtcgggtgccgagatttgggagagacgctctgaactgactgccccgcatcaccggagcgtcccagctgcgaggagtgtaaacaggaacatcgataagtagtgtaaaaacttgcacaatgaaatccgaagccaaggatggagaggaggagagtctacagactgctttcaaaaaattaagagtggatgcatcagggtctacaaggaagtcttcacgaggagcagtgagaactcagcgtcgtcgacgttctaagtctcctgtccttcatcctccaaagtttatacattgcagtacaatagcgtcttcttccagcagtcaactcaagcacaaaagccagactgactcacctgatggcagcagtgggctgggaatttcatcccctaaagagttcagtgcaggagaaagctctacttctctcgatgctaatcacacaggggcagtcgttgagcctttgagaacttctgttccaaggctcccatcagagagtaagaaggaagactcctctgacgctacccaagtcccccaagcaagtctcaaagccagtgatctctctgactttcaatcagtttccaagctaaaccagggcaagccatgcacatgcataggcaaggaatgccagtgtaagagatggcatgatatggaagtgtattccttttcaggcctgcagagtgtccctcccttggctccagaacgaagatccacacttgaggactactctcagtcgctgcacgccagaactctgtctggctctccccgatcctgttctgagcaagctcgagtcttcgtggatgatgtgaccattgaggacctgtcaggctacatggagtattacttgtatattcccaagaaaatgtcccacatggcagaaatgatgtacacctgatagcaagaagctaattcatatgctttaaaccaatgaaggcttgtcaaagagatttagttaatggcagaccttgtggccactttgtgtgagaagacatctctttctgctcactgtgcttgcaataaaaacttttcttggcatctca

SEQ ID NO: 425158 - DNA, 1435 bp, Homo sapiens
gctatttaaatattttataaatagttatcttacatagtgtgtccagtaattcccagtatctgaaaacctcaggggttgtaaatattgttagttttttggttttgattgattggctgttaccaatgatagaaatgaatcagaaatctatttaatagtaatggcataatggtcatttgtaacgttagcctcacagtggttctgaagctgctatattcaggtttagggcacaatatttaggcttcacaggatcggtttcagttgtatgtttgaggtgcttccctcagacccactggtcaaaggctcccaagcttagagttggaacagggcaggtgttctgtcccaaatgtttggcccaggtgattcagttaaaaaataccattatctcacctcgttctatagcttgctaataagatgatgttgaagttgttgagacacaaagacttaggcagcatgaaaatggaggaaggtgcatctcttgcaggaaatttatgagcttagactcataaagctgagggaaggtaaatttcctactgtcataaagaatctgtttaggacagctccatatcccaacatcttcttgtatattttttttcctctttagggtctacaaggaagtcttcacgaggagcagtgagaactcagcgtcgtcgacgttctaagtctcctgtccttcatcctccaaagtttatacattgcagtacaatagcgtcttcttccagcagtcaactcaagcacaaaagccagactgactcacctgatggcagcagtgggctgggaatttcatcccctaaagagttcagtgcaggagaaagctctacttctctcgatgctaatcacacaggggcagtcgttgagcctttgagaacttctgttccaaggctcccatcagagagtaagaaggaagactcctctgacgctacccaagtcccccaagcaagtctcaaagccagtgatctctctgactttcaatcagtttccaagctaaaccagggcaagccatgcacatgcataggcaaggaatgccagtgtaagagatggcatgatatggaagtgtattccttttcaggcctgcagagtgtccctcccttggctccagaacgaagatccacacttgaggactactctcagtcgctgcacgccagaactctgtctggctctccccgatcctgttctgagcaagctcgagtcttcgtggatgatgtgaccattgaggacctgtcaggctacatggagtattacttgtatattcccaagaaaatgtcccacatggcagaaatgatgtacacctgatagcaagaagctaattcatatgctttaaaccaatgaaggcttgtcaaagagatttagttaatggcagaccttgtggccactttgtgtgagaagacatctctttctgctcactgtgcttgcaataaaaacttttcttggcatctca

SEQ ID NO: 425159 - DNA, 1278 bp, Homo sapiens
ggcgttggagaggcgcggccgccgccctgcgtctgcgcagtcgtcggctgccgcgctgccgagtcactggggtgggaggagcataagcagggggaggggtgcatgccggagtgcgcaggcgcaacgcgactcccgaggcgcgggccgcccccttggctggtttggatccgggtcagtcgggtgccgagatttgggagagacgctctgaactgactgccccgcatcaccggagcgtcccagctgcgaggagtgtaaacaggaacatcgataagtagtgtaaaaacttgcacaatgaaatccgaagccaaggatggagaggaggagagtctacagactgctttcaaaaaattaagagtggatgcatcagggtctgtagcatctctgtctgttggagaaggcacaggtgtcagagcaccagtcagaacagcaacagatgataccaaacgtctacaaggaagtcttcacgaggagcagtgagaactcagcgtcgtcgacgttctaagtctcctgtccttcatcctccaaagtttatacattgcagtacaatagcgtcttcttccagcagtcaactcaagcacaaaagccagactgactcacctgatggcagcagtgggctgggaatttcatcccctaaagagttcagtgcaggagaaagctctacttctctcgatgctaatcacacaggggcagtcgttgagcctttgagaacttctgttccaaggctcccatcagagagtaagaaggaagactcctctgacgctacccaagtcccccaagcaagtctcaaagccagtgatctctctgactttcaatcagtttccaagctaaaccagggcaagccatgcacatgcataggcaaggaatgccagtgtaagagatggcatgatatggaagtgtattccttttcaggcctgcagagtgtccctcccttggctccagaacgaagatccacacttgaggactactctcagtcgctgcacgccagaactctgtctggctctccccgatcctgttctgagcaagctcgagtcttcgtggatgatgtgaccattgaggacctgtcaggctacatggagtattacttgtatattcccaagaaaatgtcccacatggcagaaatgatgtacacctgatagcaagaagctaattcatatgctttaaaccaatgaaggcttgtcaaagagatttagttaatggcagaccttgtggccactttgtgtgagaagacatctctttctgctcactgtgcttgcaataaaaacttttcttggcatctca

SEQ ID NO: 425160 - DNA, 1912 bp, Homo sapiens
ggcgttggagaggcgcggccgccgccctgcgtctgcgcagtcgtcggctgccgcgctgccgagtcactggggtgggaggagcataagcagggggaggggtgcatgccggagtgcgcaggcgcaacgcgactcccgaggcgcgggccgcccccttggctggtttggatccgggtcagtcgggtgccgagatttgggagagacgctctgaactgactgccccgcatcaccggagcgtcccagctgcgaggagtgtaaacaggaacatcgataagtagtgtaaaaacttgcacaatgaaatccgaagccaaggatggagaggaggagagtctacagactgctttcaaaaaattaagagtggatgcatcagggtctgtagcatctctgtctgttggagaaggcacaggtgtcagagcaccagtcagaacagcaacagatgataccaaacctaaaaccacatgtgcatctaaagacagttggcacgggtctacaaggaagtcttcacgaggagcagtgagaactcagcgtcgtcgacgttctaagtctcctgtccttcatcctccaaagtttatacattgcagtacaatagcgtcttcttccagcagtcaactcaagcacaaaagccagactgactcacctgatggcagcagtgggctgggaatttcatcccctaaagagttcagtgcaggagaaagctctacttctctcgatgctaatcacacaggggcagtcgttgagcctttgagaacttctgttccaaggctcccatcagagagtaagaaggaagactcctctgacgctacccaagtcccccaagcaagtctcaaagccagtgatctctctgactttcaatcagtttccaagctaaaccagaccttgtggccactttgtgtgagaagacatctctttctgctcactgtgcttgcaataaaaacttttcttggcatctcagttaatcttcattctttcaacttactctcttgagttcttacatacacttcaaggcgagcagatcaaagaaaaatcccccttatttagaaatgttcctgggggatgaagaaaccataattacttgagactggcagcagtgggtatatggtaaaagcctttgtaaaacagtgcatttttcagatttgtttaaggtttgctagccaaggaaagtaaaatgtgattttgtaactgcactaaacatttgtcatgctgtagttgccagcccagaatattagaagttacaagactgatttaaaccgtctctgatttaatgcaagatatattgtgtctataaaggtttctcttgttattgttaagccagagatctaaggtttagattcaatttgaataaactagctggcctgccctctattgtttgagagagttattaaccatcactaaataagcccctgctggtgctattcatcctaagacatgttacatgcagtttcaagtaagcagcttggaatgggctgcttcagttggagggagggggtgtaatatttgaaacgagtgtgtgtcttcaccatctccagcattttaaatatatggcgttttttttttttttggttatcagttgtaatacaggtctcatacctcagtttcagatgttatagatggttacctctttgagctgccctgtcaccccagcaaccctaaaagagaattttgtacattctgtatcccacagatttggtcagccatttcaaaattccctccagtttggtaaaaaaaaaatctgtcttcggtttcagctggatgatgaatccttgtttttcaggtggctccaaaaagaatgttgcatgtgttcagaccatcctgagcagagccaccaaatttagtgacagtgtctagccatgttagcaataatgttaacagaagcttttgtttaaattacaaaatacatttatactatttactaaaa

SEQ ID NO: 425161 - DNA, 1261 bp, Homo sapiens
ggcgttggagaggcgcggccgccgccctgcgtctgcgcagtcgtcggctgccgcgctgccgagtcactggggtgggaggagcataagcagggggaggggtgcatgccggagtgcgcaggcgcaacgcgactcccgaggcgcgggccgcccccttggctggtttggatccgggtcagtcgggtgccgagatttgggagagacgctctgaactgactgccccgcatcaccggagcgtcccagctgcgaggagtgtaaacaggaacatcgataagtagtgtaaaaacttgcacaatgaaatccgaagccaaggatggagaggaggagagtctacagactgctttcaaaaaattaagagtggatgcatcagggtctgtagcatctctgtctgttggagaaggcacaggtgtcagagcaccagtcagaacagcaacagatgataccaaacctaaaaccacatgtgcatctaaagacagttggcacgggtctacaaggaagtcttcacgaggagcagtgagaactcagcgtcgtcgacgttctaagtctcctgtccttcatcctccaaagtttatacattgcagtacaatagcgtcttcttccagcagtcaactcaagcacaaaaagttcagtgcaggagaaagctctacttctctcgatgctaatcacacaggggcagtcgttgagcctttgagaacttctgttccaaggctcccatcagagagtaagaaggaagactcctctgacgctacccaagtcccccaagcaagtctcaaagccagtgatctctctgactttcaatcagtttccaagctaaaccagggcaagccatgcacatgcataggcaaggaatgccagtgtaagagatggcatgatatggaagtgtattccttttcaggcctgcagagtgtccctcccttggctccagaacgaagatccacacttgaggactactctcagtcgctgcacgccagaactctgtctggctctccccgatcctgttctgagcaagctcgagtcttcgtggatgatgtgaccattgaggacctgtcaggctacatggagtattacttgtatattcccaagaaaatgtcccacatggcagaaatgatgtacacctgatagcaagaagctaattcatatgctttaaaccaatgaaggcttgtcaaagagatttagttaatggcagaccttgtggccactttgtgtgagaagacatctctttctgctcactgtgcttgcaataaaaacttttcttggcatctca

SEQ ID NO: 425162 - DNA, 605 bp, Homo sapiens
gggggcgggggggggcgggtaaaggcttagaaataaagaggtgaagtgaaccttttgcttcaaatattctctatttctatttttttggtggtacttttcttctgattctctctgatatgttcatagatgctggttggcttaattggtattcaaaatttggtactaataaccctgagtgaaaaaataatttggagactagattcaagggtttattaacagacttctctgtgtgtttcttgttgctttggttggttcttcatctacctttctctgtttaaatataaaaatcaggtggaaaatatggaggactttgattaatcaaactagttaagagatcatttagtggtgcgtctacacaatagtcatttctgttttttttctttactttcaacctttctttaggctaaagagaagttcgtctgttttcttttctttttccactcatgtgcacaatgaagtttttagggggttgcaagtgtatagttcatttattttctttcttgtttaacaattaattacactattccaggctatgaagaaaaacacaaatggaagtatcaaccttactggtagagtgcatttctaattctgctttcacagtggta

SEQ ID NO: 425163 - DNA, 506 bp, Homo sapiens
cacagttttgagcaaaatgccttgtacgaattggtcaatgaacaactagtaaataattatgtgaatatttactgaattatatggatcctatgaataattactgaataattcatgtgattgcttttattggcagtgctgaaaactcatccccgtgtgacctcaagtaagccatgtaactctgtgaacctgcagttttatcatttttaaaataaagaaacatgacagattttcattatgacacagaatgtcaggtctcccagatgccagaaaatacatttacttaaagccgttgatacgtcttaaagcggtttccttacagtgtcattggaggacagtgtggagtgcagagagacatgctttgaaatgggattgatccagtcctccttccttcactaccacatgaatgctgggcagcccagggtcaacccaccgcaccctcaactcagacggttacctggcacgctggccacagtctacctcactcttatcagagtctgagctactgg

SEQ ID NO: 425164 - DNA, 1264 bp, Homo sapiens
cgcccgccgcccccacaccatcggctagtcgagccccctgttattgggctgggtggcggttgagacagcggcggtactgggaggcgtaggtgagggtcgcgaggctgcccgagcttctgagcgagcgcggtgcttttgggaacgcgggacgggcgatctgcggcgccaggagctgggccgaggcgcggcggcgcggctgccggctgccctgtgaatgggaagttacgcgaagtccacccagcgtttctgaggcaatctgaaggcaaatcctgtttagacccaggcgaaggttcccggtgacccgggctctcaccagccaattgtcccttgccgtcctcctgagggtgcctggagcttaagcactgtgtgctcttggcctccacactggggatgccgctgactcccactgtccagggcttccagtggattctccgaggccctgatgtagaaacttccccattgggtgcaccaagagcagcctcacatggtgtgggctgacatcaagagctgccagatccaacaggaagatggccaatctttcctaagctgctcaccttacaagaaaacgaatcgtactgctaagaattcaaacttcagcagtcatggggagccttggaaggagcccgaatcactgatggaattggacagtgcatggagatggttcagcaggacaagggtaagtgcaggggcaagtccaggtcatactgagagacaacgagtggcgctgacagagacagacaaagataaaatcaaaagtttgtgcttcatcttcaaaaactcaaactaataacaaacttggccttatgagaaataataagtatttttctatttacatgagaatttaatctcaaaacaggaatcagaaacatattaagtccagggcataaaacctaaaccactgctcatatttattctttctaaatagagcaaagtgtaaaatcttctccataaaatgcacattgtgcttatgaaaaggccagtcttagtgagaatcattggtattccatagaagagtgaattaaacacagccaagggaagacccaagtctcatacttctcttgtatattccagagttccaggggaattccaggtgatagaggtgatctcccatactgttaaagcaaggttgcagacacttgggaattttggtcccagtactctaggaggtcacacctctgtcctggaaaatactacaggaatgtatactcttcctatgactcattctggtcattcttccagcatcacaaaaaccaaaaaaaaaaaa

SEQ ID NO: 425165 - DNA, 1568 bp, Homo sapiens
ggctgcaggcgcaggcgcaggcgaggggctgggtggcggttgagacagcggcggtactgggaggcgtaggtgagggtcgcgaggctgcccgagcttctgagcgagcgcggtgcttttgggaacgcgggacgggcgatctgcggcgccaggagctgggccgaggcgcggcggcgcggctgccggctgccctgtgaatgggaagttacgcgaagtccacccagcgtttctgaggcaatctgaaggcaaatcctgtttagacccaggcgaaggttcccggtgacccgggctctcaccagccaattgtcccttgccgtcctcctgagggtgcctggagcttaagcactgtgtgctcttggcctccacactggggatgccgctgactcccactgtccagggcttccagtggattctccgaggccctgatgtagaaacttccccattgggtgcaccaagagcagcctcacatggtgtgggctgacatcaagagctgccagatccaacagtgtccacagatcagaagttcaggcctggattctctgggtcttcttctcagggcctcacaggctgaaattaggctgggtttctttctggaggttctggggaagaacttcctctcaagtttcctcaggttgtcagctgagttcagttccttgtgactgtaggactgagatctctgttttcttgctggctgtcagccaggggcctctcgctgctcctagaggcctcccatgttcccactgcatgcttcctccagccagcagaggaggatcgccctgcatggaaaccctcctgcacttcacatctctccaggaagtcctcagtccctccaaggaactcacgttcactaggtcaagctcatcagataatctgtctatcttaaattggaccgatttgggatctcgattacatctgttaacttgtttttgccataaattgtaacacaatcacaggagtgacatctcctcagtagctttgtctacactcaggaggaagtgattatataagagcaaagatcactgggggtcatcttaggattctgtctaccataatattataaagacacagtaattaaaagagtataacagatttctgcttctgtctgttagaataaatcatatcagactaaccctgcctccataaacaaacgtaaaattgttttcagcagtgtacaacaggcagtccaagagaaaacttaagggggaagccccatgatttcctagttgtttggggagaatttctcagcagctgcatagtgagctagagtccactcagggcagggcagctcactgagctgagaaggcagagatcagagttcaagacggctgaagcaactgcaatctgcagggcagggcaccagtgaggagacagctgatcaaaggtgcagctctcaaagtctatgtggggttccatgtgcatacttatcaaggagtggactctacctgcacaaggaaaagactaacagatttaacagaggggtggctgctatgaaattgagtttggaccagaggtacttgaggtggaggagggttggggaatgtatgatggagtttctgccatccatggtggga

SEQ ID NO: 425166 - DNA, 1049 bp, Homo sapiens
cgcccgccgcccccacaccatcggctagtcgagccccctgttattgggctgggtggcggttgagacagcggcggtactgggaggcgtaggtgagggtcgcgaggctgcccgagcttctgagcgagcgcggtgcttttgggaacgcgggacgggcgatctgcggcgccaggagctgggccgaggcgcggcggcgcggctgccggctgccctgtgaatgggaagttacgcgaagtccacccagcgtttctgaggcaatctgaaggcaaatcctgtttagacccaggcgaaggttcccggtgacccgggctctcaccagccaattgtcccttgccgtcctcctgagggtgcctggagcttaagcactgtgtgctcttggcctccacactggggatgccgctgactcccactgtccagggcttccagtggattctccgaggccctgatgtagaaacttccccattgggtgcaccaagagcagcctcacatggtgtgggctgacatcaagagctgccagatccaacaggaagatggccaatctttcctaagctgctcaccttacaagaaaacgaatcgtactgctaagaattcaaacttcagcagtcatggggagccttggaaggagcccgaatcactgatggaattggacagtgcatggagatggttcagcaggacaaggtgctgaaaactcatccccgtgtgacctcaagtaagccatgtaactctgtgaacctgcagttttatcatttttaaaataaagaaacatgacagattttcattatgacacagaatgtcaggtctcccagatgccagaaaatacatttacttaaagccgttgatacgtcttaaagcggtttccttacagtgtcattggaggacagtgtggagtgcagagagacatgctttgaaatgggattgatccagtcctccttccttcactaccacatgaatgctgggcagcccagggtcaacccaccgcaccctcaactcagacggttacctggcacgctggccacagtctacctcactcttatcagagtctgagctactgg

SEQ ID NO: 425167 - DNA, 1514 bp, Homo sapiens
ggctgcaggcgcaggcgcaggcgaggggctgggtggcggttgagacagcggcggtactgggaggcgtaggtgagggtcgcgaggctgcccgagcttctgagcgagcgcggtgcttttgggaacgcgggacgggcgatctgcggcgccaggagctgggccgaggcgcggcggcgcggctgccggctgccctgtgaatgggaagttacgcgaagtccacccagcgtttctgaggcaatctgaaggcaaatcctgtttagacccaggcgaaggttcccggtgacccgggctctcaccagccaattgtcccttgccgtcctcctgagggtgcctggagcttaagcactgtgtgctcttggcctccacactggggatgccgctgactcccactgtccagggcttccagtggattctccgaggccctgatgtagaaacttccccattgggtgcaccaagagcagcctcacatggtgtgggctgacatcaagagctgccagatccaacagtgtccacagatcagaagttcaggcctggattctctgggtcttcttctcagggcctcacaggctgaaattaggctgggtttctttctggaggttctggggaagaacttcctctcaagtttcctcaggttgtcagctgagttcagttccttgtgactgtaggactgagatctctgttttcttgctggctgtcagccaggggcctctcgctgctcctagaggcctcccatgttcccactgcatgcttcctccagccagcagaggaggatcgccctgcatggaaaccctcctgcacttcacatctctccaggaagtcctcagtccctccaaggaactcacgttcactaggtcaagctcatcagataatctgtctatcttaaattggaccgatttgggatctcgattacatctgttaacttgtttttgccataaattgtaacacaatcacaggagtgacatctcctcagtagctttgtctacactcaggaggaagtgattatataagagcaaagatcactgggggtcatcttaggattctgtctaccataatattataaagacacagtaattaaaagagtataacagatttctgcttctgtctgttagaataaatcatatcagactaaccctgcctccataaacaaacgtaaaattgttttcagcagtgtacaacaggcagtccaagagacagctgcatagtgagctagagtccactcagggcagggcagctcactgagctgagaaggcagagatcagagttcaagacggctgaagcaactgcaatctgcagggcagggcaccagtgaggagacagctgatcaaaggtgcagctctcaaagtctatgtggggttccatgtgcatacttatcaaggagtggactctacctgcacaaggaaaagactaacagatttaacagaggggtggctgctatgaaattgagtttggaccagaggtacttgaggtggaggagggttggggaatgtatgatggagtttctgccatccatggtggga

SEQ ID NO: 425168 - DNA, 1365 bp, Homo sapiens
agcggagctgggtcgaggcgcggccgtggcaatctgaaggcaaatcctgtttagacccaggcgaaggttcccggtgacccgggctctcaccagccaattgtcccttgccgtcctcctgagggtgcctggagcttaagcactgtgtgctcttggcctccacactggggatgccgctgactcccactgtccagggcttccagtggattctccgaggccctgatgtagaaacttccccattgggtgcaccaagagcagcctcacatggtgtgggctgacatcaagagctgccagatccaacagtgtccacagatcagaagttcaggcctggattctctgggtcttcttctcagggcctcacaggctgaaattaggctgggtttctttctggaggttctggggaagaacttcctctcaagtttcctcaggttgtcagctgagttcagttccttgtgactgtaggactgagatctctgttttcttgctggctgtcagccaggggcctctcgctgctcctagaggcctcccatgttcccactgcatgcttcctccagccagcagaggaggatcgccctgcatggaaaccctcctgcacttcacatctctccaggaagtcctcagtccctccaaggaactcacgttcactaggtcaagctcatcagataatctgtctatcttaaattggaccgatttgggatctcgattacatctgttaacttgtttttgccataaattgtaacacaatcacaggagtgacatctcctcagtagctttgtctacactcaggaggaagtgattatataagagcaaagatcactgggggtcatcttaggattctgtctaccataatattataaagacacagtaattaaaagagtataacagatttctgcttctgtctgttagaataaatcatatcagactaaccctgcctccataaacaaacgtaaaattgttttcagcagtgtacaacaggcagtccaagagaaaacttaagggggaagccccatgatttcctagttgtttggggagaatttctcagcagctgcatagtgagctagagtccactcagggcagggcagctcactgagctgagaaggcagagatcagagttcaagacggctgaagcaactgcaatctgcagggcagggcaccagtgaggagacagctgatcaaaggtgcagctctcaaagtctatgtggggttccatgtgcatacttatcaaggagtggactctacctgcacaaggaaaagactaacagatttaacagaggggtggctgctatgaaattgagtttggaccagaggtacttgaggtggaggagggttggggaatgtatgatggagtttctgccatccatggtggga

SEQ ID NO: 425169 - DNA, 1202 bp, Homo sapiens
catccctctcccaccgtttccttcttgtccccactccaaagccttctccattttatttgtattaattttctattgctgcatactaaattactgcaagcattagcggcgtaaaataagaatgatttattttcttgcagtgtccacagatcagaagttcaggcctggattctctgggtcttcttctcagggcctcacaggctgaaattaggctgggtttctttctggaggttctggggaagaacttcctctcaagtttcctcaggttgtcagctgagttcagttccttgtgactgtaggactgagatctctgttttcttgctggctgtcagccaggggcctctcgctgctcctagaggcctcccatgttcccactgcatgcttcctccagccagcagaggaggatcgccctgcatggaaaccctcctgcacttcacatctctccaggaagtcctcagtccctccaaggaactcacgttcactaggtcaagctcatcagataatctgtctatcttaaattggaccgatttgggatctcgattacatctgttaacttgtttttgccataaattgtaacacaatcacaggagtgacatctcctcagtagctttgtctacactcaggaggaagtgattatataagagcaaagatcactgggggtcatcttaggattctgtctaccataatattataaagacacagtaattaaaagagtataacagatttctgcttctgtctgttagaataaatcatatcagactaaccctgcctccataaacaaacgtaaaattgttttcagcagtgtacaacaggcagtccaagagaaaacttaagggggaagccccatgatttcctagttgtttggggagaatttctcagcagctgcatagtgagctagagtccactcagggcagggcagctcactgagctgagaaggcagagatcagagttcaagacggctgaagcaactgcaatctgcagggcagggcaccagtgaggagacagctgatcaaaggtgcagctctcaaagtctatgtggggttccatgtgcatacttatcaaggagtggactctacctgcacaaggaaaagactaacagatttaacagaggggtggctgctatgaaattgagtttggaccagaggtacttgaggtggaggagggttggggaatgtatgatggagtttctgccatccatggtggga

SEQ ID NO: 425170 - DNA, 389 bp, Homo sapiens
aaacatattaagtccagggcataaaacctaaaccactgctcatatttattctttctaaatagagcaaagtgtaaaatcttctccataaaatgcacattgtgcttatgaaaaggccagtcttagtgagaatcattggtattccatagaagagtgaattaaacacagccaagggaagacccaagtctcatacttctcttgtatattccagagttccaggggaattccaggtgatagaggtgatctcccatactgttaaagcaaggttgcagacacttgggaattttggtcccagtactctaggaggtcacacctctgtcctggaaaatactacaggaatgtatactcttcctatgactcattctggtcattcttccagcatcacaaaaacc

SEQ ID NO: 425171 - DNA, 442 bp, Homo sapiens
ctaaagcggaggagaaactgttgagggaacctagaagtaaaggacatctggcttgctgggctccatttaaactttgagtatagcagagacacgagcccttcgggacacatgcctgtcgcagtgacactccaacttcggaagagtggaagccctgattccaaattcaagcatgctttgagtagaaattaagtttgcctctttttgcacaggaagatggccaatctttcctaagctgctcaccttacaagaaaacgaatcgtactgctaagaattcaaacttcagcagtcatgggtaagtaaggaagtcttataaatctattttagccacctaacaagaaactagaaatttagcaagttctttcacattcaggacagttgtgttgactagatcagaggcactgagacatgaagaacagacccctaaaaagggaaagtgttcctt

SEQ ID NO: 425172 - DNA, 896 bp, Homo sapiens
cgcccgccgcccccacaccatcggctagtcgagccccctgttattgggctgggtggcggttgagacagcggcggtactgggaggcgtaggtgagggtcgcgaggctgcccgagcttctgagcgagcgcggtgcttttgggaacgcgggacgggcgatctgcggcgccaggagctgggccgaggcgcggcggcgcggctgccggctgccctgtgaatgggaagttacgcgaagtccacccagcgtttctgaggcaatctgaaggcaaatcctgtttagacccaggcgaaggttcccggtgacccgggctctcaccagccaattgtcccttgccgtcctcctgagggtgcctggagcttaagcactgtgtgctcttggcctccacactggggatgccgctgactcccactgtccagggcttccagtggattctccgaggccctgatgtagaaacttccccattgggtgcaccaagagcagcctcacatggtgtgggctgacatcaagagctgccagatccaacaggtcctgggggagtaggagccagtgcaaggagagaagtccattgagaaaggcaaatggatgacatcagacccaggggctgaggtccccaactgcagctgggtagcttctggagtggacaaggagcaacagggaagttcgtggcctggtgttctgggatccactgtctcatctcattcttgtgggcaccagaacgtatccaaagacaagactcagtgtctctggcaacagtgagccagagatagaatgtgtttcagaggaggaggaaggggttgttgtaccccatggaaacagtatattgttttacagtagcgtgtctttctctaataactacttagcgtgttcctgttaatggaaaatattggtggtgtaagtt

SEQ ID NO: 425173 - DNA, 1237 bp, Homo sapiens
cgcccgccgcccccacaccatcggctagtcgagccccctgttattgggctgggtggcggttgagacagcggcggtactgggaggcgtaggtgagggtcgcgaggctgcccgagcttctgagcgagcgcggtgcttttgggaacgcgggacgggcgatctgcggcgccaggagctgggccgaggcgcggcggcgcggctgccggctgccctgtgaatgggaagttacgcgaagtccacccagcgtttctgaggcaatctgaaggcaaatcctgtttagacccaggcgaaggttcccggtgacccgggctctcaccagccaattgtcccttgccgtcctcctgagggtgcctggagcttaagcactgtgtgctcttggcctccacactggggatgccgctgactcccactgtccagggcttccagtggattctccgaggccctgatgtagaaacttccccattgggtgcaccaagagcagcctcacatggtgtgggctgacatcaagagctgccagatccaacagctcccatcaaggaagatccagagacattctcctcaccaaggcgttaagaaatgcacaggtgaggggaacagcggcatgcgtttaaaagtcctgtggcgcccatcctctgcaggctggaggtcatggcgggagctgctgcatggatttgccctccctgctgtcagtgagaacaacagggttctggaagagtagaggacaggccgtgggacttggccatctagagacaaggcgggagggatttccctgagaggcagggatatgtggtggttactaatcattcgaatcattgtgaggtgtctgggaatgtaatggatgggacatctactaagaaatcaacttacgttacacttagaaaagctctagttctgaggacagagacctgatggagtcaccatagtgggaatttatgacctggcatccagttcagatacctggagcttcttgactgaggggagattggatcccttgaggaagagtgaagccttcaatgctgccacaagtgtatgctgtaaatcttccttcaggccttccccagaaggccctgaagccatttatgtgggtgactgaagaaagggaaatactcagagcttctgtggcttgttggatgctggctctgaagaatgctaaactgagggccctgcggtggccatgaaaatgcactacttgcatctccagctgcaggaggcctaacgaatcagcagcctcagctgctac

SEQ ID NO: 425174 - DNA, 1107 bp, Homo sapiens
gtttaatcattctccaaagccagtcagcagtattcaatgcccgtacataattttactacagatataccatgccttttatcattttcctgctttatatgagaaatagtgtattggtcatcttgtttttataacttaaacatggaaaaatcaattatattagatctttatcttaattgtttttagtgatcagtttcataagatatacttttagttctcattgatttttataatattcctcaaaatagctatttgaattgaagaatgaaaaactttttctcacagaaagtgtatctgatttggctgactggtttgacagtgaagactggccctgccaatgaggttttatgacagatatttttcataaatgagctaaatctgcaactccaaattagtggcaatacatttaaaacaagaaataagatcaaagcattttatcaaaaagcattgttttggcaaacatgtaataaaactaaaaatttgtttgattttcctgccatttctggtgatacgggttttaaaaggtgggcctaagtacaagtgttacagcacaattaacaataatttgatgaatcttagtaaagctctcttggtatacttcccagaaattgagaaagtaaattattcaaattgctggagaacaaatctctttgctagtcaggtgcttcctagttcactgtttaaaagaaatgaagaaggactttatcaaattgtcatgtgcccgaagattaaaaatatttttgctaatagaccattacacaaatgttgacatataacatagaaggaattcaaagaactgaattacattgctataataaaacactctcaattccttcaacttacatctataaaaacaaaaaaaaaaaaatagaaatagaattgatactgaccccttatttcagcagtaagtaatgttcatttacagataaaggaactaactgaaaaaagtttatcatctcattaaaggatgcatttgcaatataattttactttttgtgtttaataatatgtttatgtttaatcagtagtgtattgataataattcaattgcataaatttttttaatgttcagagctttatggtaacaaaataaaagtaaaaaattgaaat

SEQ ID NO: 425175 - DNA, 666 bp, Homo sapiens
tgagtgagtagaggacttgccctggggacattcagtgacctgctgggtgttgctgagctgtgaggaagttcaggtctggctgcagtggtgaggctgtgactcaatcaatcactgctgatgctcccaggacctgcaccagcttagtcctaggggcaaggattttaactgtccacctcagtttcttcatttgtaagatgcaaataacagtcacccctgcctcatgggatggagctgtgtaatgcccgcaacagtgcctgctgcatagaggggttgctgccagctgcctctccctccttgtctcttacctgcctgctgcctgggtcaggatgaagaggggcccttgtgttgcccccaccctggctgcctgctaagggcccatgtgatctgcctggcagaggagtttcttcaggaagaaccagggcagcttctgcccctagagggccaatgcccttgctgtgagaagtcactgctttggggagacctgatctggctgtgccagatggacactgagaaagaagtagaagactcagaattagaagaggcacactggacagacctgctggagacctgatcctcagtgtccttaccccctcctacctcttttctgtgccacctgctgtgggtccagcaggtttttacttgagtacaataaaaagtctgagtcaa

SEQ ID NO: 425176 - DNA, 1027 bp, Homo sapiens
tggaaaactcacttccgcccttactaaggcgtacgtcaacgcagtacttccgccctcaagcagccgggctttccagcggtccaggcttttcgcgcttgccatgtgtcagccaatcagagcctgaggaaggtgggactcgggcggagccgatgctgaatggtacgcgctcgccgactggacagcagtctggcttccgcggtcggacttctacacccgcctccagacaggagaggggcacgtaccggcgctacggcttcctgcaggctgcctccggatagtccccgagagcttgttccgaagcaagcaccctgcagccctagcgatccagccctcccctggaccctaggtcacggcaatcaaccccctgctgtggttcccgaaccccaaggcccgatgggtcccgcgggggtcgcggcgaggccagggcgctttttcggcgtctacctgctctactgcctgaacccccggtaccggggccgcgtctacgtggggttcactgtcaacactgctcgtcgggtccagcagcacaatgggggccgcaaaaaaggcggggcctggcggaccagcgggcgagggccctggtgagagggggaggccttctgtgccgggaggaaggcgtcccagaggaggcggaccccgcggggcacaggcctgttgagaaggaccggccaggactgtgacagaggcggggcgtctgtggtggggacggggcctgtcgcaggggaggagcgtgacggggaggcggtgcccggggcatctccgcggcggaactcagggaaggagctagctggggcgggggtgatgatccaggctgggttccagcatagggctcttggtgggcacgctggggtcgggtggaatgcaggagagagaggaggtgggacaggtgggtacctgggctggaggcagggcctgaggtgggcaggtgcagagggctgcacttctcggctgaagccgggaatgaggaccccgctctcgggtgggattggaggggacccgcggctgaggcgctgggctgcgacaggga

SEQ ID NO: 425177 - DNA, 404 bp, Homo sapiens
  misc_feature (25)..(25): n is a, c, g, or t
ccatgcgtccgcccaacgtcgcccnagcgtccgctgctgctcctgtgcgcccagaccatccaggatgaagaggggcccttgtgttgcccccaccctggctgcctgctaagggcccatgtgatctgcctggcagaggagtttcttcaggaagaaccagggcagcttctgcccctagagggccaatgcccttgctgtgagaagtcactgctttggggagacctgatctggctgtgccagatggacactgagaaagaagtagaagactcagaattagaagaggcacactggacagacctgctggagacctgatcctcagtgtccttaccccctcctacctcttttctgtgccacctgctgtgggtccagcaggtttttacttgagtacaataaaaagtctgagtcaa

SEQ ID NO: 425178 - DNA, 472 bp, Homo sapiens
gtgatctgggctcactgaaacctccgcctcctgggttcaagtgattctcttgcctcagcctcctgagtagctaggattacaggtgcccgccatcatgcccagctaatttttgtatttttagtagagacagggtttcaccatgttggccagcttggtctcgaactcctgacctcaggtgatcctgctgcaatcccagcgatttgggaggttgagctggtaggatcacaataggccacgaatttgagaccagcctggtaaaatagtgagacctcatctctacaaagatgtaaaaaaattagccacatgtgctggcacttacctgtagtcccagctacttgggaagcagaggctggaggatcatttcagcccaggaggttgtggatacagtgagttatgacatgcccattcactacagcctggatgacaagcaagaccctccctccaaagaaaataaagctcaattaaaataaaa

SEQ ID NO: 425179 - DNA, 1203 bp, Homo sapiens
tgagtgagtagaggacttgccctggggacattcagtgacctgctgggtgttgctgagctgtgaggaagttcaggtctggctgcagtggtgaggctgtgactcaatcaatcactgctgatgctcccaggacctgcaccagcttagtcctaggggcaaggattttaactgtccacctcagtttcttcatttgtaagatgcaaataacagtcacccctgcctcatgggatggagctgtgtaatgcccgcaacagtgcctgctgcatagaggggttgctgccagctgcctctccctccttgtctcttacctgcctgctgcctgggtcaggatgaagaggggcccttgtgttgcccccaccctggctgcctgctaagggcccatgtgatctgcctggcagaggagtttcttcaggaagaaccagggcagcttctgcccctagagggccaatgcccttgctgtgagaagtcactgctttggggagacctgatctggctgtgccagatggacactgagaaagaagtagaagactcagaattagaagaggcacactggacagacctgctggagacctgatcctcagtgtccttaccccctcctacctcttttctgtgccacctgctgtgggtccagcaggtttttacttgagtacaataaaaagtctgagtcaaaaaaaaaaaaaacaaaaaaaaaaaaaaaaaaaaaaaaaaaaaaaaaaaaaaaggggggggggcgcgcgcgataagatatagattcctctctcagagaggggcgcacaccccctaaggcgcacgacaccgcccgctctcttctagtgcaaaagcaagtgggcctcctatagtgcagagcgaggctaatatatatatagccggccctagggccgcgcgggacgacgcttgtctatccccaacaccctctactgactgcaaggtgagcacgaaccacacacctcccgcctaccacgcgctaaacgagtgcataatttgccgatggagtggccaagcgcgcgccaccctccattcaatctcagtgggcggggcggcgtacccgccatactttgtgtccgaggccacaaaccactaccacctatgccaagacacgacatcatctattcgacaccagccgtctggctgggcgcggacacagctcacccaaccgacgaaacaccgtacatcgtcggcgtgataaccatataatcaagcgtcccc

SEQ ID NO: 425180 - DNA, 302 bp, Homo sapiens
aggatccataatgtgtgcccagaccatccaggatgaagaggggcccttgtgttgcccccaccctggctgcctgctaagggcccatgtgatctgcctggcagaggagtttcttcaggaagaaccagggcagcttctgcccctagagggccaatgcccttgctgtgagaagtcactgctttggggagacctgatctggctgtgccagatggacactgagaaagaagtagaagactcagaattagaagaggggcacacattatggagtgggcacacattatggagagtgggcacacattatggag

SEQ ID NO: 425181 - DNA, 2473 bp, Homo sapiens
tggaaaactcacttccgcccttactaaggcgtacgtcaacgcagtacttccgccctcaagcagccgggctttccagcggtccaggcttttcgcgcttgccatgtgtcagccaatcagagcctgaggaaggtgggactcgggcggagccgatgctgaatggtacgcgctcgccgactggacagcagtctggcttccgcggtcggacttctacacccgcctccagacaggagaggggcacgtaccggcgctacggcttcctgcaggctgcctccggatagtccccgagagcttgttccgaagcaagcaccctgcagccctagcgatccagccctcccctggaccctaggtcacggcaatcaaccccctgctgtggttcccgaaccccaaggcccgatgggtcccgcgggggtcgcggcgaggccagggcgctttttcggcgtctacctgctctactgcctgaacccccggtaccggggccgcgtctacgtggggttcactgtcaacactgctcgtcgggtccagcagcacaatgggggccgcaaaaaaggcggggcctggcggaccagcgggcgagggccctgggagatggtgctcgtcgtgcacggcttcccgtcctccgtggccgcccttcggtttgagtgggcttggcagcacccgcacgcctcgcgccgcctggcgcacgtggggcctcgcctgcgaggagagacagccttcgctttccacctgcgcgtgctggcgcacatgctgcgcgcaccgccctgggctcgcctcccgctcacgctgcgctgggtgcgcccagacctccgccaggacctctgcctcccgccgccgccgcacgtgcctctggccttcgggcctccaccgccccaggccccggccccaaggcgccgcgcaggtccctttgatgacgcggagcctgagccagaccagggggatccaggggcctgctgctccctgtgcgcccagaccatccaggatgaagaggggcccttgtgttgcccccaccctggctgcctgctaagggcccatgtgatctgcctggcagaggagtttcttcaggaagaaccagggcagcttctgcccctagagggccaatgcccttgctgtgagaagtcactgctttggggagacctgatctggctgtgccagatggacactgagaaagaagtagaagactcagaattagaagaggaacatggagctgatccaggacacctcccgcccgccactggagtacgtgaagggggtcccgctcatcaagtactttgcagaggcactggggcccctgcagagcttccaagcccgacctgatgacctgctcatcaacacctaccccaagtctggcaccacctgggtgagccagatactggacatgatctaccagggcggcgacctagagaagtgtaaccgggctcccatctacgtacgggtgcccttccttgaggtcaatgatccaggggaaccctcagggctggagactctgaaagacacaccgcccccacggctcatcaagtcacacctgcccctggctctgctccctcagactctgttggatcagaaggtcaaggtggtctatgttgcccgaaacccaaaggacgtggcggtctcctactaccatttccaccgtatggaaaaggcgcaccctgagcctgggacctgggacagcttcctggaaaagttcatggctggagaagtgtcctacgggtcctggtaccagcacgtgcaggagtggtgggagctgagccgcacccaccctgttctctacctcttctatgaagacatgaaggagaaccccaaaagggagattcaaaagatcctggagtttgtggggcgctccctgccagaggagaccatggacttcatggttcagcacacgtcgttcaaggagatgaagaagaaccctatgaccaactacaccaccgtcccccaggagctcatggaccacagcatctcccccttcatgaggaaaggcatggctggggactggaagaccaccttcaccgtggcgcagaatgagcgcttcgatgcggactatgcggagaagatggcaggctgcagcctcagcttccgctctgagctgtgagaggggctcctggagtcactgcagagggagtgtgcgaatctaccctgaccaatgggctcaagaataaagtatgatttttgagtcaggcacagtggctcatgtctgcaatcccagcgatttgggaggttgagctggtaggatcacaataggccacgaatttgagaccagcctggtaaaatagtgagacctcatctctacaaagatgtaaaaaaattagccacatgtgctggcacttacctgtagtcccagctacttgggaagcagaggctggaggatcatttcagcccaggaggttgtggatacagtgagttatgacatgcccattcactacagcctggatgacaagcaagaccctccctccaaagaaaataaagctcaattaaaataaaa

SEQ ID NO: 425182 - DNA, 2329 bp, Homo sapiens
  misc_feature (12)..(12): n is a, c, g, or t
  misc_feature (43)..(43): n is a, c, g, or t
aagaaaaaaaanaaactatgctagggtacgagtgctgcgtgtnaatcggccgaggtcggacttctacacccgcctccagacaggagaggggcacgtaccggcgctacggcttcctgcaggctgcctccggatagtccccgagagcttgttccgaagcaagcaccctgcagccctagcgatccagccctcccctggaccctaggtcacggcaatcaaccccctgctgtggttcccgaaccccaaggcccgatgggtcccgcgggggtcgcggcgaggccagggcgctttttcggcgtctacctgctctactgcctgaacccccggtaccggggccgcgtctacgtggggttcactgtcaacactgctcgtcgggtccagcagcacaatgggggccgcaaaaaaggcggggcctggcggaccagcgggcgagggccctgggagatggtgctcgtcgtgcacggcttcccgtcctccgtggccgcccttcggtttgagtgggcttggcagcacccgcacgcctcgcgccgcctggcgcacgtggggcctcgcctgcgaggagagacagccttcgctttccacctgcgcgtgctggcgcacatgctgcgcgcaccgccctgggctcgcctcccgctcacgctgcgctgggtgcgcccagacctccgccaggacctctgcctcccgccgccgccgcacgtgcctctggccttcgggcctccaccgccccaggccccggccccaaggcgccgcgcaggtccctttgatgacgcggagcctgagccagaccagggggatccaggggcctgctgctccctgtgcgcccagaccatccaggatgaagaggggcccttgtgttgcccccaccctggctgcctgctaagggcccatgtgatctgcctggcagaggagtttcttcaggaagaaccagggcagcttctgcccctagagggccaatgcccttgctgtgagaagtcactgctttggggagacctgatctggctgtgccagatggacactgagaaagaagtagaagactcagaattagaagaggaacatggagctgatccaggacacctcccgcccgccactggagtacgtgaagggggtcccgctcatcaagtactttgcagaggcactggggcccctgcagagcttccaagcccgacctgatgacctgctcatcaacacctaccccaagtctggcaccacctgggtgagccagatactggacatgatctaccagggcggcgacctagagaagtgtaaccgggctcccatctacgtacgggtgcccttccttgaggtcaatgatccaggggaaccctcagggctggagactctgaaagacacaccgcccccacggctcatcaagtcacacctgcccctggctctgctccctcagactctgttggatcagaaggtcaaggtggtctatgttgcccgaaacccaaaggacgtggcggtctcctactaccatttccaccgtatggaaaaggcgcaccctgagcctgggacctgggacagcttcctggaaaagttcatggctggagaagtgtcctacgggtcctggtaccagcacgtgcaggagtggtgggagctgagccgcacccaccctgttctctacctcttctatgaagacatgaaggagaaccccaaaagggagattcaaaagatcctggagtttgtggggcgctccctgccagaggagaccatggacttcatggttcagcacacgtcgttcaaggagatgaagaagaaccctatgaccaactacaccaccgtcccccaggagctcatggaccacagcatctcccccttcatgaggaaaggcatggctggggactggaagaccaccttcaccgtggcgcagaatgagcgcttcgatgcggactatgcggagaagatggcaggctgcagcctcagcttccgctctgagctgtgagaggggctcctggagtcactgcagagggagtgtgcgaatctaccctgaccaatgggctcaagaataaagtatgatttttgagtcaggcacagtggctcatgtctgcaatcccagcgatttgggaggttgagctggtaggatcacaataggccacgaatttgagaccagcctggtaaaatagtgagacctcatctctacaaagatgtaaaaaaattagccacatgtgctggcacttacctgtagtcccagctacttgggaagcagaggctggaggatcatttcagcccaggaggttgtggatacagtgagttatgacatgcccattcactacagcctggatgacaagcaagaccctccctccaaagaaaataaagctcaattaaaataaaa

SEQ ID NO: 425183 - DNA, 2185 bp, Homo sapiens
tggaaaactcacttccgcccttactaaggcgtacgtcaacgcagtacttccgccctcaagcagccgggctttccagcggtccaggcttttcgcgcttgccatgtgtcagccaatcagagcctgaggaaggtgggactcgggcggagccgatgctgaatggtacgcgctcgccgactggacagcagtctggcttccgcggtcggacttctacacccgcctccagacaggagaggggcacgtaccggcgctacggcttcctgcaggctgcctccggatagtccccgagagcttgttccgaagcaagcaccctgcagccctagcgatccagccctcccctggaccctaggtcacggcaatcaaccccctgctgtggttcccgaaccccaaggcccgatgggtcccgcgggggtcgcggcgaggccagggcgctttttcggcgtctacctgctctactgcctgaacccccggtaccggggccgcgtctacgtggggttcactgtcaacactgctcgtcgggtccagcagcacaatgggggccgcaaaaaaggcggggcctggcggaccagcgggcgagggccctgggagatggtgctcgtcgtgcacggcttcccgtcctccgtggccgcccttcggtttgagtgggcttggcagcacccgcacgcctcgcgccgcctggcgcacgtggggcctcgcctgcgaggagagacagccttcgctttccacctgcgcgtgctggcgcacatgctgcgcgcaccgccctgggctcgcctcccgctcacgctgcgctgggtgcgcccagacctccgccaggacctctgcctcccgccgccgccgcacgtgcctctggccttcgggcctccaccgccccaggccccggccccaaggcgccgcgcaggtccctttgatgacgcggagcctgagccagaccagggggatccaggggcctgctgctccctgtgcgcccagaccatccaggatgaagaggggcccttgtgttgcccccaccctggctgcctgctaagggcccatgtgatctgcctggcagaggagtttcttcaggaagaaccagggcagcttctgcccctagagggccaatgcccttgctgtgagaagtcactgctttggggagacctgatctggctgtgccagatggacactgagaaagaagtagaagactcagaattagaagaggaacatggagctgatccaggacacctcccgcccgccactggagtacgtgaagggggtcccgctcatcaagtactttgcagaggcactggggcccctgcagagcttccaagcccgacctgatgacctgctcatcaacacctaccccaagtctggcaccacctgggtgagccagatactggacatgatctaccagggcggcgacctagagaagtgtaaccgggctcccatctacgtacgggtgcccttccttgaggtcaatgatccaggggaaccctcagggctggagactctgaaagacacaccgcccccacggctcatcaagtcacacctgcccctggctctgctccctcagactctgttggatcagaaggtcaaggtggtctatgttgcccgaaacccaaaggacgtggcggtctcctactaccatttccaccgtatggaaaaggcgcaccctgagcctgggacctgggacagcttcctggaaaagttcatggctggagaagtgtcctacgggtcctggtaccagcacgtgcaggagtggtgggagctgagccgcacccaccctgttctctacctcttctatgaagacatgaaggagaaccccaaaagggagattcaaaagatcctggagtttgtggggcgctccctgccagaggagaccatggacttcatggttcagcacacgtcgttcaaggagatgaagaagaaccctatgaccaactacaccaccgtcccccaggagctcatggaccacagcatctcccccttcatgaggaaaggcatggctggggactggaagaccaccttcaccgtggcgcagaatgagcgcttcgatgcggactatgcggagaagatggcaggctgcagcctcagcttccgctctgagctgtgagaggggctcctggagtcactgcagagggagtgtgcgaatctaccctgaccaatgggctcaagaataaagtatgatttttgagtcaggcacagtggctcatgt

SEQ ID NO: 425184 - DNA, 1316 bp, Homo sapiens
tggaaaactcacttccgcccttactaaggcgtacgtcaacgcagtacttccgccctcaagcagccgggctttccagcggtccaggcttttcgcgcttgccatgtgtcagccaatcagagcctgaggaaggtgggactcgggcggagccgatgctgaatggtacgcgctcgccgactggacagcagtctggcttccgcggtcggacttctacacccgcctccagacaggagaggggcacgtaccggcgctacggcttcctgcaggctgcctccggatagtccccgagagcttgttccgaagcaagcaccctgcagccctagcgatccagccctcccctggaccctaggtcacggcaatcaaccccctgctgtggttcccgaaccccaaggcccgatgggtcccgcgggggtcgcggcgaggccagggcgctttttcggcgtctacctgctctactgcctgaacccccggtaccggggccgcgtctacgtggggttcactgtcaacactgctcgtcgggtccagcagcacaatgggggccgcaaaaaaggcggggcctggcggaccagcgggcgagggccctgggagatggtgctcgtcgtgcacggcttcccgtcctccgtggccgcccttcggtttgagtgggcttggcagcacccgcacgcctcgcgccgcctggcgcacgtggggcctcgcctgcgaggagagacagccttcgctttccacctgcgcgtgctggcgcacatgctgcgcgcaccgccctgggctcgcctcccgctcacgctgcgctgggtgcgcccagacctccgccaggacctctgcctcccgccgccgccgcacgtgcctctggccttcgggcctccaccgccccaggccccggccccaaggcgccgcgcaggtccctttgatgacgcggagcctgagccagaccagggggatccaggggcctgctgctccctgtgcgcccagaccatccaggatgaagaggggcccttgtgttgcccccaccctggctgcctgctaagggcccatgtgatctgcctggcagaggagtttcttcaggaagaaccagggcagcttctgcccctagagggccaatgcccttgctgtgagaagtcactgctttggggagacctgatctggctgtgccagatggacactgagaaagaagtagaagactcagaattagaagaggcacactggacagacctgctggagacctgatcctcagtgtccttaccccctcctacctcttttctgtgccacctgctgtgggtccagcaggtttttacttgagtacaataaaaagtctgagtcaa

SEQ ID NO: 425185 - DNA, 2971 bp, Homo sapiens
tggaaaactcacttccgcccttactaaggcgtacgtcaacgcagtacttccgccctcaagcagccgggctttccagcggtccaggcttttcgcgcttgccatgtgtcagccaatcagagcctgaggaaggtgggactcgggcggagccgatgctgaatggtacgcgctcgccgactggacagcagtctggcttccgcggtcggacttctacacccgcctccagacaggagaggggcacgtaccggcgctacggcttcctgcaggctgcctccggatagtccccgagagcttgttccgaagcaagcaccctgcagccctagcgatccagccctcccctggaccctaggtcacggcaatcaaccccctgctgtggttcccgaaccccaaggcccgatgggtcccgcgggggtcgcggcgaggccagggcgctttttcggcgtctacctgctctactgcctgaacccccggtaccggggccgcgtctacgtggggttcactgtcaacactgctcgtcgggtccagcagcacaatgggggccgcaaaaaaggcggggcctggcggaccagcgggcgagggccctgggagatggtgctcgtcgtgcacggcttcccgtcctccgtggccgcccttcggtttgagtgggcttggcagcacccgcacgcctcgcgccgcctggcgcacgtggggcctcgcctgcgaggagagacagccttcgctttccacctgcgcgtgctggcgcacatgctgcgcgcaccgccctgggctcgcctcccgctcacgctgcgctgggtgcgcccagacctccgccaggacctctgcctcccgccgccgccgcacgtgcctctggccttcgggcctccaccgccccaggccccggccccaaggcgccgcgcaggtccctttgatgacgcggagcctgagccagaccagggggatccaggggcctgctgctccctgtgcgcccagaccatccaggatgaagaggggcccttgtgttgcccccaccctggctgcctgctaagggcccatgtgatctgcctggcagaggagtttcttcaggaagaaccagggcagcttctgcccctagagggccaatgcccttgctgtgagaagtcactgctttggggagacctgatctggctgtgccagatggacactgagaaagaagtagaagactcagaattagaagaggaacatggagctgatccaggacacctcccgcccgccactggagtacgtgaagggggtcccgctcatcaagtactttgcagaggcactggggcccctgcagagcttccaagcccgacctgatgacctgctcatcaacacctaccccaagtctggcaccacctgggtgagccagatactggacatgatctaccagggcggcgacctagagaagtgtaaccgggctcccatctacgtacgggtgcccttccttgaggtcaatgatccaggggaaccctcagggctggagactctgaaagacacaccgcccccacggctcatcaagtcacacctgcccctggctctgctccctcagactctgttggatcagaaggtcaaggtggtctatgttgcccgaaacccaaaggacgtggcggtctcctactaccatttccaccgtatggaaaaggcgcaccctgagcctgggacctgggacagcttcctggaaaagttcatggctggagaagtgtcctacgggtcctggtaccagcacgtgcaggagtggtgggagctgagccgcacccaccctgttctctacctcttctatgaagacatgaaggaggtgagaccgactgtgatgcttccccccatgtgacacctgggggcaggcacctcacagggacccaccaaggccacccagccccgtccctgggcggctcccacagcaagcccggattccccatcctacctccctggcccaggcccccccactgcagccccacctggcagcaggctcggcacagctttcatcttctgcacctgagtcagctgcatgggtggccacggatcagatacttagtcctattgcttatcctcaccaaagggtgtgccacccagggccacagtcatggaagaagaccatcccggtcctcacccataggcgccaagccctgttcatgatgggatcacagggcagagatcaattcattttactccagagactagggccccaggggttgaggctctttggggtttctaggggaagtggccagatcccctctgaggttagagagggggacccgttttgttttgctccactgaggagccctctgctgctcagaaccccaaaagggagattcaaaagatcctggagtttgtggggcgctccctgccagaggagaccatggacttcatggttcagcacacgtcgttcaaggagatgaagaagaaccctatgaccaactacaccaccgtcccccaggagctcatggaccacagcatctcccccttcatgaggaaaggcatggctggggactggaagaccaccttcaccgtggcgcagaatgagcgcttcgatgcggactatgcggagaagatggcaggctgcagcctcagcttccgctctgagctgtgagaggggctcctggagtcactgcagagggagtgtgcgaatctaccctgaccaatgggctcaagaataaagtatgatttttgagtcaggcacagtggctcatgtctgcaatcccagcgatttgggaggttgagctggtaggatcacaataggccacgaatttgagaccagcctggtaaaatagtgagacctcatctctacaaagatgtaaaaaaattagccacatgtgctggcacttacctgtagtcccagctacttgggaagcagaggctggaggatcatttcagcccaggaggttgtggatacagtgagttatgacatgcccattcactacagcctggatgacaagcaagaccctccctccaaagaaaataaagctcaattaaaataaaa

SEQ ID NO: 425186 - DNA, 2288 bp, Homo sapiens
aattagcttaggtaggctgtgtgtgatcggcgaggcagacaggagaggggcacgtaccggcgctacggcttcctgcaggctgcctccggatagtccccgagagcttgttccgaagcaagcaccctgcagccctagcgatccagccctcccctggaccctaggtcacggcaatcaaccccctgctgtggttcccgaaccccaaggcccgatgggtcccgcgggggtcgcggcgaggccagggcgctttttcggcgtctacctgctctactgcctgaacccccggtaccggggccgcgtctacgtggggttcactgtcaacactgctcgtcgggtccagcagcacaatgggggccgcaaaaaaggcggggcctggcggaccagcgggcgagggccctgggagatggtgctcgtcgtgcacggcttcccgtcctccgtggccgcccttcggtttgagtgggcttggcagcacccgcacgcctcgcgccgcctggcgcacgtggggcctcgcctgcgaggagagacagccttcgctttccacctgcgcgtgctggcgcacatgctgcgcgcaccgccctgggctcgcctcccgctcacgctgcgctgggtgcgcccagacctccgccaggacctctgcctcccgccgccgccgcacgtgcctctggccttcgggcctccaccgccccaggccccggccccaaggcgccgcgcaggtccctttgatgacgcggagcctgagccagaccagggggatccaggggcctgctgctccctgtgcgcccagaccatccaggatgaagaggggcccttgtgttgcccccaccctggctgcctgctaagggcccatgtgatctgcctggcagaggagtttcttcaggaagaaccagggcagcttctgcccctagagggccaatgcccttgctgtgagaagtcactgctttggggagacctgatctggctgtgccagatggacactgagaaagaagtagaagactcagaattagaagaggaacatggagctgatccaggacacctcccgcccgccactggagtacgtgaagggggtcccgctcatcaagtactttgcagaggcactggggcccctgcagagcttccaagcccgacctgatgacctgctcatcaacacctaccccaagtctggcaccacctgggtgagccagatactggacatgatctaccagggcggcgacctagagaagtgtaaccgggctcccatctacgtacgggtgcccttccttgaggtcaatgatccaggggaaccctcagggctggagactctgaaagacacaccgcccccacggctcatcaagtcacacctgcccctggctctgctccctcagactctgttggatcagaaggtcaaggtggtctatgttgcccgaaacccaaaggacgtggcggtctcctactaccatttccaccgtatggaaaaggcgcaccctgagcctgggacctgggacagcttcctggaaaagttcatggctggagaagtgtcctacgggtcctggtaccagcacgtgcaggagtggtgggagctgagccgcacccaccctgttctctacctcttctatgaagacatgaaggagaaccccaaaagggagattcaaaagatcctggagtttgtggggcgctccctgccagaggagaccatggacttcatggttcagcacacgtcgttcaaggagatgaagaagaaccctatgaccaactacaccaccgtcccccaggagctcatggaccacagcatctcccccttcatgaggaaaggcatggctggggactggaagaccaccttcaccgtggcgcagaatgagcgcttcgatgcggactatgcggagaagatggcaggctgcagcctcagcttccgctctgagctgtgagaggggctcctggagtcactgcagagggagtgtgcgaatctaccctgaccaatgggctcaagaataaagtatgatttttgagtcaggcacagtggctcatgtctgcaatcccagcgatttgggaggttgagctggtaggatcacaataggccacgaatttgagaccagcctggtaaaatagtgagacctcatctctacaaagatgtaaaaaaattagccacatgtgctggcacttacctgtagtcccagctacttgggaagcagaggctggaggatcatttcagcccaggaggttgtggatacagtgagttatgacatgcccattcactacagcctggatgacaagcaagaccctccctccaaagaaaataaagctcaattaaaataaaa

SEQ ID NO: 425187 - DNA, 2568 bp, Homo sapiens
tggaaaactcacttccgcccttactaaggcgtacgtcaacgcagtacttccgccctcaagcagccgggctttccagcggtccaggcttttcgcgcttgccatgtgtcagccaatcagagcctgaggaaggtgggactcgggcggagccgatgctgaatggtacgcgctcgccgactggacagcagtctggcttccgcggtcggacttctacacccgcctccagacaggagaggggcacgtaccggcgctacggcttcctgcaggctgcctccggatagtccccgagagcttgttccgaagcaagcaccctgcagccctagcgatccagccctcccctggaccctaggtcacggcaatcaaccccctgctgtggttcccgaaccccaaggcccgatgggtcccgcgggggtcgcggcgaggccagggcgctttttcggcgtctacctgctctactgcctgaacccccggtaccggggccgcgtctacgtggggttcactgtcaacactgctcgtcgggtccagcagcacaatgggggccgcaaaaaaggcggggcctggcggaccagcgggcgagggccctgggagatggtgctcgtcgtgcacggcttcccgtcctccgtggccgcccttcggtttgagtgggcttggcagcacccgcacgcctcgcgccgcctggcgcacgtggggcctcgcctgcgaggagagacagccttcgctttccacctgcgcgtgctggcgcacatgctgcgcgcaccgccctgggctcgcctcccgctcacgctgcgctgggtgcgcccagacctccgccaggacctctgcctcccgccgccgccgcacgtgcctctggccttcgggcctccaccgccccaggccccggccccaaggcgccgcgcaggtccctttgatgacgcggagcctgagccagaccagggggatccaggggcctgctgctccctgtgcgcccagaccatccaggatgaagaggggcccttgtgttgcccccaccctggctgcctgctaagggcccatgtgatctgcctggcagaggagtttcttcaggaagaaccagggcagcttctgcccctagagggccaatgcccttgctgtgagaagtcactgctttggggagacctgatctggctgtgccagatggacactgagaaagaagtagaagactcagaattagaagaggaacatggagctgatccaggacacctcccgcccgccactggagtacgtgaagggggtcccgctcatcaagtactttgcagaggcactggggcccctgcagagcttccaagcccgacctgatgacctgctcatcaacacctaccccaagtctggcaccacctgggtgagccagatactggacatgatctaccagggcggcgacctagagaagtgtaaccgggctcccatctacgtacgggtgcccttccttgaggtcaatgatccaggggaaccctcagggctggagactctgaaagacacaccgcccccacggctcatcaagtcacacctgcccctggctctgctccctcagactctgttggatcagaaggtcaaggtggtctatgttgcccgaaacccaaaggacgtggcggtctcctactaccatttccaccgtatggaaaaggcgcaccctgagcctgggacctgggacagcttcctggaaaagttcatggctggagaaggtgggcttgactggaggaaggagggtgtgaagccgaggggtggtggctataacgtacagcaaccctgtgtcggtgccccctgcccgcttctctagtgtcctacgggtcctggtaccagcacgtgcaggagtggtgggagctgagccgcacccaccctgttctctacctcttctatgaagacatgaaggagaaccccaaaagggagattcaaaagatcctggagtttgtggggcgctccctgccagaggagaccatggacttcatggttcagcacacgtcgttcaaggagatgaagaagaaccctatgaccaactacaccaccgtcccccaggagctcatggaccacagcatctcccccttcatgaggaaaggcatggctggggactggaagaccaccttcaccgtggcgcagaatgagcgcttcgatgcggactatgcggagaagatggcaggctgcagcctcagcttccgctctgagctgtgagaggggctcctggagtcactgcagagggagtgtgcgaatctaccctgaccaatgggctcaagaataaagtatgatttttgagtcaggcacagtggctcatgtctgcaatcccagcgatttgggaggttgagctggtaggatcacaataggccacgaatttgagaccagcctggtaaaatagtgagacctcatctctacaaagatgtaaaaaaattagccacatgtgctggcacttacctgtagtcccagctacttgggaagcagaggctggaggatcatttcagcccaggaggttgtggatacagtgagttatgacatgcccattcactacagcctggatgacaagcaagaccctccctccaaagaaaataaagctcaattaaaataaaa

SEQ ID NO: 425188 - DNA, 3066 bp, Homo sapiens
tggaaaactcacttccgcccttactaaggcgtacgtcaacgcagtacttccgccctcaagcagccgggctttccagcggtccaggcttttcgcgcttgccatgtgtcagccaatcagagcctgaggaaggtgggactcgggcggagccgatgctgaatggtacgcgctcgccgactggacagcagtctggcttccgcggtcggacttctacacccgcctccagacaggagaggggcacgtaccggcgctacggcttcctgcaggctgcctccggatagtccccgagagcttgttccgaagcaagcaccctgcagccctagcgatccagccctcccctggaccctaggtcacggcaatcaaccccctgctgtggttcccgaaccccaaggcccgatgggtcccgcgggggtcgcggcgaggccagggcgctttttcggcgtctacctgctctactgcctgaacccccggtaccggggccgcgtctacgtggggttcactgtcaacactgctcgtcgggtccagcagcacaatgggggccgcaaaaaaggcggggcctggcggaccagcgggcgagggccctgggagatggtgctcgtcgtgcacggcttcccgtcctccgtggccgcccttcggtttgagtgggcttggcagcacccgcacgcctcgcgccgcctggcgcacgtggggcctcgcctgcgaggagagacagccttcgctttccacctgcgcgtgctggcgcacatgctgcgcgcaccgccctgggctcgcctcccgctcacgctgcgctgggtgcgcccagacctccgccaggacctctgcctcccgccgccgccgcacgtgcctctggccttcgggcctccaccgccccaggccccggccccaaggcgccgcgcaggtccctttgatgacgcggagcctgagccagaccagggggatccaggggcctgctgctccctgtgcgcccagaccatccaggatgaagaggggcccttgtgttgcccccaccctggctgcctgctaagggcccatgtgatctgcctggcagaggagtttcttcaggaagaaccagggcagcttctgcccctagagggccaatgcccttgctgtgagaagtcactgctttggggagacctgatctggctgtgccagatggacactgagaaagaagtagaagactcagaattagaagaggaacatggagctgatccaggacacctcccgcccgccactggagtacgtgaagggggtcccgctcatcaagtactttgcagaggcactggggcccctgcagagcttccaagcccgacctgatgacctgctcatcaacacctaccccaagtctggcaccacctgggtgagccagatactggacatgatctaccagggcggcgacctagagaagtgtaaccgggctcccatctacgtacgggtgcccttccttgaggtcaatgatccaggggaaccctcagggctggagactctgaaagacacaccgcccccacggctcatcaagtcacacctgcccctggctctgctccctcagactctgttggatcagaaggtcaaggtggtctatgttgcccgaaacccaaaggacgtggcggtctcctactaccatttccaccgtatggaaaaggcgcaccctgagcctgggacctgggacagcttcctggaaaagttcatggctggagaaggtgggcttgactggaggaaggagggtgtgaagccgaggggtggtggctataacgtacagcaaccctgtgtcggtgccccctgcccgcttctctagtgtcctacgggtcctggtaccagcacgtgcaggagtggtgggagctgagccgcacccaccctgttctctacctcttctatgaagacatgaaggaggtgagaccgactgtgatgcttccccccatgtgacacctgggggcaggcacctcacagggacccaccaaggccacccagccccgtccctgggcggctcccacagcaagcccggattccccatcctacctccctggcccaggcccccccactgcagccccacctggcagcaggctcggcacagctttcatcttctgcacctgagtcagctgcatgggtggccacggatcagatacttagtcctattgcttatcctcaccaaagggtgtgccacccagggccacagtcatggaagaagaccatcccggtcctcacccataggcgccaagccctgttcatgatgggatcacagggcagagatcaattcattttactccagagactagggccccaggggttgaggctctttggggtttctaggggaagtggccagatcccctctgaggttagagagggggacccgttttgttttgctccactgaggagccctctgctgctcagaaccccaaaagggagattcaaaagatcctggagtttgtggggcgctccctgccagaggagaccatggacttcatggttcagcacacgtcgttcaaggagatgaagaagaaccctatgaccaactacaccaccgtcccccaggagctcatggaccacagcatctcccccttcatgaggaaaggcatggctggggactggaagaccaccttcaccgtggcgcagaatgagcgcttcgatgcggactatgcggagaagatggcaggctgcagcctcagcttccgctctgagctgtgagaggggctcctggagtcactgcagagggagtgtgcgaatctaccctgaccaatgggctcaagaataaagtatgatttttgagtcaggcacagtggctcatgtctgcaatcccagcgatttgggaggttgagctggtaggatcacaataggccacgaatttgagaccagcctggtaaaatagtgagacctcatctctacaaagatgtaaaaaaattagccacatgtgctggcacttacctgtagtcccagctacttgggaagcagaggctggaggatcatttcagcccaggaggttgtggatacagtgagttatgacatgcccattcactacagcctggatgacaagcaagaccctccctccaaagaaaataaagctcaattaaaataaaa

SEQ ID NO: 425189 - DNA, 2631 bp, Homo sapiens
tggaaaactcacttccgcccttactaaggcgtacgtcaacgcagtacttccgccctcaagcagccgggctttccagcggtccaggcttttcgcgcttgccatgtgtcagccaatcagagcctgaggaaggtgggactcgggcggagccgatgctgaatggtacgcgctcgccgactggacagcagtctggcttccgcggtcggacttctacacccgcctccagacaggagaggggcacgtaccggcgctacggcttcctgcaggctgcctccggatagtccccgagagcttgttccgaagcaagcaccctgcagccctagcgatccagccctcccctggaccctaggtcacggcaatcaaccccctgctgtggttcccgaaccccaaggcccgatgggtcccgcgggggtcgcggcgaggccagggcgctttttcggcgtctacctgctctactgcctgaacccccggtaccggggccgcgtctacgtggggttcactgtcaacactgctcgtcgggtccagcagcacaatgggggccgcaaaaaaggcggggcctggcggaccagcgggcgagggccctgggagatggtgctcgtcgtgcacggcttcccgtcctccgtggccgcccttcggtttgagtgggcttggcagcacccgcacgcctcgcgccgcctggcgcacgtggggcctcgcctgcgaggagagacagccttcgctttccacctgcgcgtgctggcgcacatgctgcgcgcaccgccctgggctcgcctcccgctcacgctgcgctgggtgcgcccagacctccgccaggacctctgcctcccgccgccgccgcacgtgcctctggccttcgggcctccaccgccccaggccccggccccaaggcgccgcgcaggtccctttgatgacgcggagcctgagccagaccagggggatccaggggcctgctgctccctgtgcgcccagaccatccaggatgaagaggggcccttgtgttgcccccaccctggctgcctgctaagggcccatgtgatctgcctggcagaggagtttcttcaggaagaaccagggcagcttctgcccctagagggccaatgcccttgctgtgagaagtcactgctttggggagacctgatctggctgtgccagatggacactgagaaagaagtagaagactcagaattagaagaggaacatggagctgatccaggacacctcccgcccgccactggagtacgtgaagggggtcccgctcatcaagtactttgcagaggcactggggcccctgcagagcttccaagcccgacctgatgacctgctcatcaacacctaccccaagtctggcaccacctgggtgagccagatactggacatgatctaccagggcggcgacctagagaagtgtaaccgggctcccatctacgtacgggtgcccttccttgaggtcaatgatccaggggaaccctcagggctggagactctgaaagacacaccgcccccacggctcatcaagtcacacctgcccctggctctgctccctcagactctgttggatcagaaggtcaaggtggtctatgttgcccgaaacccaaaggacgtggcggtctcctactaccatttccaccgtatggaaaaggcgcaccctgagcctgggacctgggacagcttcctggaaaagttcatggctggagaagtgtcctacgggtcctggtaccagcacgtgcaggagtggtgggagctgagccgcacccaccctgttctctacctcttctatgaagacatgaaggagaaccccaaaagggagattcaaaagatcctggagtttgtggggcgctccctgccagaggagaccatggacttcatggttcagcacacgtcgttcaaggagatgaagaagaaccctatgaccaactacaccaccgtcccccaggagctcatggaccacagcatctcccccttcatgaggaaaggcatggctggggactggaagaccaccttcaccgtggcgcagaatgagcgcttcgatgcggactatgcggagaagatggcaggctgcagcctcagcttccgctctgagctgtgagaggggctcctggagtcactgcagagggagtgtgcgaatctaccctgaccaatgggctcaagaataaagtatgatttttgagtcaggcacagtggctcatgtctgcaatcccagcgatttgggaggttgagctggtaggatcacaataggccacgaatttgagaccagcctggtaaaatagtgagacctcatctctacaaagatgtaaaaaaattagccacatgtgctggcacttacctgtagtcccagctacttgggaagcagaggctggaggatcatttcagcccaggaggttgtggatacagtgagttatgacatgcccattcactacagcctggatgacaagcaagaccctccctccaaagaaaataaagctcaattaaaataaaaaaaaaaaaaaaacaaaaaaaaaaaaaaaaaaaaaaaccccaattttttttttagggggcgcaggggggggagacgaggtttgcgacacaacgggggccccaggggcggcggggaaatggcaggggggggggggcccgggcccacaaatctgcccccca

SEQ ID NO: 425190 - DNA, 2497 bp, Homo sapiens
tggaaaactcacttccgcccttactaaggcgtacgtcaacgcagtacttccgccctcaagcagccgggctttccagcggtccaggcttttcgcgcttgccatgtgtcagccaatcagagcctgaggaaggtgggactcgggcggagccgatgctgaatggtacgcgctcgccgactggacagcagtctggcttccgcggtcggacttctacacccgcctccagacaggagaggggcacgtaccggcgctacggcttcctgcaggctgcctccggatagtccccgagagcttgttccgaagcaagcaccctgcagccctagcgatccagccctcccctggaccctaggtcacggcaatcaaccccctgctgtggttcccgaaccccaaggcccgatgggtcccgcgggggtcgcggcgaggccagggcgctttttcggcgtctacctgctctactgcctgaacccccggtaccggggccgcgtctacgtggggttcactgtcaacactgctcgtcgggtccagcagcacaatgggggccgcaaaaaaggcggggcctggcggaccagcgggcgagggccctgggagatggtgctcgtcgtgcacggcttcccgtcctccgtggccgcccttcggtttgagtgggcttggcagcacccgcacgcctcgcgccgcctggcgcacgtggggcctcgcctgcgaggagagacagccttcgctttccacctgcgcgtgctggcgcacatgctgcgcgcaccgccctgggctcgcctcccgctcacgctgcgctgggtgcgcccagacctccgccaggacctctgcctcccgccgccgccgcacgtgcctctggccttcgggcctccaccgccccaggccccggccccaaggcgccgcgcaggtccctttgatgacgcggagcctgagccagaccagggggatccaggggcctgctgctccctgtgcgcccagaccatccaggatgaagaggggcccttgtgttgcccccaccctggctgcctgctaagggcccatgtgatctgcctggcagaggagtttcttcaggaagaaccagggcagcttctgcccctagagggccaatgcccttgctgtgagaagtcactgctttggggagacctgatctggctgtgccagatggacactgagaaagaagtagaagactcagaattagaagaggaacatggagctgatccaggacacctcccgcccgccactggagtacgtgaagggggtcccgctcatcaagtactttgcagaggcactggggcccctgcagagcttccaagcccgacctgatgacctgctcatcaacacctaccccaagtctggcaccacctgggtgagccagatactggacatgatctaccagggcggcgacctagagaagtgtaaccgggctcccatctacgtacgggtgcccttccttgaggtcaatgatccaggggaaccctcagggctggagactctgaaagacacaccgcccccacggctcatcaagtcacacctgcccctggctctgctccctcagactctgttggatcagaaggtcaaggtggtctatgttgcccgaaacccaaaggacgtggcggtctcctactaccatttccaccgtatggaaaaggcgcaccctgagcctgggacctgggacagcttcctggaaaagttcatggctggagaagtgtcctacgggtcctggtaccagcacgtgcaggagtggtgggagctgagccgcacccaccctgttctctacctcttctatgaagacatgaaggagaaccccaaaagggagattcaaaagatcctggagtttgtggggcgctccctgccagaggagaccatggacttcatggttcagcacacgtcgttcaaggagatgaagaagaaccctatgaccaactacaccaccgtcccccaggagctcatggaccacagcatctcccccttcatgaggaaaggcatggctggggactggaagaccaccttcaccgtggcgcagaatgagcgcttcgatgcggactatgcggagaagatggcaggctgcagcctcagcttccgctctgagctgtgagaggggctcctggagtcactgcagagggagtgtgcgaatctaccctgaccaatgggctcaagaataaagtatgatttttgagtcaggcacagtggctcatgtctgcaatcccagcgatttgggaggttgagctggtaggatcacaataggccacgaatttgagaccagcctggtaaaatagtgagacctcatctctacaaagatgtaaaaaaattagccacatgtgctggcacttacctgtagtcccagctacttgggaagcagaggctggaggatcatttcagcccaggaggttgtggatacagtgagttatgacatgcccattcactacagcctggatgacaagcaagaccctccctccaaagaaaataaagctcaattaaaataaaatatgatttgtgttcatgtaaagcc

SEQ ID NO: 425191 - DNA, 2305 bp, Homo sapiens
tggaaaactcacttccgcccttactaaggcgtacgtcaacgcagtacttccgccctcaagcagccgggctttccagcggtccaggcttttcgcgcttgccatgtgtcagccaatcagagcctgaggaaggtgggactcgggcggagccgatgctgaatggtacgcgctcgccgactggacagcagtctggcttccgcggtcggacttctacacccgcctccagacaggagaggggcacgtaccggcgctacggcttcctgcaggctgcctccggatagtccccgagagcttgttccgaagcaagcaccctgcagccctagcgatccagccctcccctggaccctaggtcacggcaatcaaccccctgctgtggttcccgaaccccaaggcccgatgggtcccgcgggggtcgcggcgaggccagggcgctttttcggcgtctacctgctctactgcctgaacccccggtaccggggccgcgtctacgtggggttcactgtcaacactgctcgtcgggtccagcagcacaatgggggccgcaaaaaaggcggggcctggcggaccagcgggcgagggccctgggagatggtgctcgtcgtgcacggcttcccgtcctccgtggccgcccttcggtttgagtgggcttggcagcacccgcacgcctcgcgccgcctggcgcacgtggggcctcgcctgcgaggagagacagccttcgctttccacctgcgcgtgctggcgcacatgctgcgcgcaccgccctgggctcgcctcccgctcacgctgcgctgggtgcgcccagacctccgccaggacctctgcctcccgccgccgccgcacgtgcctctggccttcgggcctccaccgccccaggccccggccccaaggcgccgcgcaggtccctttgatgacgcggagcctgagccagaccagggggatccaggggcctgctgctccctgtgcgcccagaccatccaggatgaagaggggcccttgtgttgcccccaccctggctgcctgctaagggcccatgtgatctgcctggcagaggagtttcttcaggaagaaccagggcagcttctgcccctagagggccaatgcccttgctgtgagaagtcactgctttggggagacctgatctggctgtgccagatggacactgagaaagaagtagaagactcagaattagaagaggaacatggagctgatccaggacacctcccgcccgccactggagtacgtgaagggggtcccgctcatcaagtactttgcagaggcactggggcccctgcagagcttccaagcccgacctgatgacctgctcatcaacacctaccccaagtctggcaccacctgggtgagccagatactggacatgatctaccagggcggcgacctagagaagtgtaaccgggctcccatctacgtacgggtgcccttccttgaggtcaatgatccaggggaaccctcagggctggagactctgaaagacacaccgcccccacggctcatcaagtcacacctgcccctggctctgctccctcagactctgttggatcagaaggtcaaggtggtctatgttgcccgaaacccaaaggacgtggcggtctcctactaccatttccaccgtatggaaaaggcgcaccctgagcctgggacctgggacagcttcctggaaaagttcatggctggagaagtgtcctacgggtcctggtaccagcacgtgcaggagtggtgggagctgagccgcacccaccctgttctctacctcttctatgaagacatgaaggagaaccccaaaagggagattcaaaagatcctggagtttgtggggcgctccctgccagaggagaccatggacttcatggttcagcacacgtcgttcaaggagatgaagaagaaccctatgaccaactacaccaccgtcccccaggagctcatggaccacagcatctcccccttcatgaggaaaggcatggctggggactggaagaccaccttcaccgtggcgcagaatgagcgcttcgatgcggactatgcggagaagatggcaggctgcagcctcagcttccgctctgagctgtgagaggggctcctggagtcactgcagagggagtgtgcgaatctacccattcctgtccatcctgctctcgaatgatagatcaacttagggcgtgcaggatgaggtcatgtaagtaatcccgcaaatttggagatttaggtggaaggatcaattcagcatatgagttgttgtccatcctgggcagcatggtattattatgttacttaaataaaataaacttaaacc

SEQ ID NO: 425192 - DNA, 2138 bp, Homo sapiens
tggaaaactcacttccgcccttactaaggcgtacgtcaacgcagtacttccgccctcaagcagccgggctttccagcggtccaggcttttcgcgcttgccatgtgtcagccaatcagagcctgaggaaggtgggactcgggcggagccgatgctgaatggtacgcgctcgccgactggacagcagtctggcttccgcggtcggacttctacacccgcctccagacaggagaggggcacgtaccggcgctacggcttcctgcaggctgcctccggatagtccccgagagcttgttccgaagcaagcaccctgcagccctagcgatccagccctcccctggaccctaggtcacggcaatcaaccccctgctgtggttcccgaaccccaaggcccgatgggtcccgcgggggtcgcggcgaggccagggcgctttttcggcgtctacctgctctactgcctgaacccccggtaccggggccgcgtctacgtggggttcactgtcaacactgctcgtcgggtccagcagcacaatgggggccgcaaaaaaggcggggcctggcggaccagcgggcgagggccctgggagatggtgctcgtcgtgcacggcttcccgtcctccgtggccgcccttcggtttgagtgggcttggcagcacccgcacgcctcgcgccgcctggcgcacgtggggcctcgcctgcgaggagagacagccttcgctttccacctgcgcgtgctggcgcacatgctgcgcgcaccgccctgggctcgcctcccgctcacgctgcgctgggtgcgcccagacctccgccaggacctctgcctcccgccgccgccgcacgtgcctctggccttcgggcctccaccgccccaggccccggccccaaggcgccgcgcaggtccctttgatgacgcggagcctgagccagaccagggggatccaggggcctgctgctccctgtgcgcccagaccatccaggatgaagaggggcccttgtgttgcccccaccctggctgcctgctaagggcccatgtgatctgcctggcagaggagtttcttcaggaagaaccagggcagcttctgcccctagagggccaatgcccttgctgtgagaagtcactgctttggggagacctgatctggctgtgccagatggacactgagaaagaagtagaagactcagaattagaagaggaacatggagctgatccaggacacctcccgcccgccactggagtacgtgaagggggtcccgctcatcaagtactttgcagaggcactggggcccctgcagagcttccaagcccgacctgatgacctgctcatcaacacctaccccaagtctggcaccacctgggtgagccagatactggacatgatctaccagggcggcgacctagagaagtgtaaccgggctcccatctacgtacgggtgcccttccttgaggtcaatgatccaggggaaccctcagggctggagactctgaaagacacaccgcccccacggctcatcaagtcacacctgcccctggctctgctccctcagactctgttggatcagaaggtcaaggtggtctatgttgcccgaaacccaaaggacgtggcggtctcctactaccatttccaccgtatggaaaaggcgcaccctgagcctgggacctgggacagcttcctggaaaagttcatggctggagaagtgtcctacgggtcctggtaccagcacgtgcaggagtggtgggagctgagccgcacccaccctgttctctacctcttctatgaagacatgaaggagaaccccaaaagggagattcaaaagatcctggagtttgtggggcgctccctgccagaggagaccatggacttcatggttcagcacacgtcgttcaaggagatgaagaagaaccctatgaccaactacaccaccgtcccccaggagctcatggaccacagcatctcccccttcatgaggaaaggcatggctggggactggaagaccaccttcaccgtggcgcagaatgagcgcttcgatgcggactatgcggagaagatggcaggctgcagcctcagcttccgctctgagctgtgagaggggctcctggagtcataaccacgaaacgggggatgttgttagctagagtttc

SEQ ID NO: 425193 - DNA, 1474 bp, Homo sapiens
tggaaaactcacttccgcccttactaaggcgtacgtcaacgcagtacttccgccctcaagcagccgggctttccagcggtccaggcttttcgcgcttgccatgtgtcagccaatcagagcctgaggaaggtgggactcgggcggagccgatgctgaatggtacgcgctcgccgactggacagcagtctggcttccgcggtcggacttctacacccgcctccagacaggagaggggcacgtaccggcgctacggcttcctgcaggctgcctccggatagtccccgagagcttgttccgaagcaagcaccctgcagccctagcgatccagccctcccctggaccctaggtcacggcaatcaaccccctgctgtggttcccgaaccccaaggcccgatgggtcccgcgggggtcgcggcgaggccagggcgctttttcggcgtctacctgctctactgcctgaacccccggtaccggggccgcgtctacgtggggttcactgtcaacactgctcgtcgggtccagcagcacaatgggggccgcaaaaaaggcggggcctggcggaccagcgggcgagggccctgggagatggtgctcgtcgtgcacggcttcccgtcctccgtggccgcccttcggtttgagtgggcttggcagcacccgcacgcctcgcgccgcctggcgcacgtggggcctcgcctgcgaggagagacagccttcgctttccacctgcgcgtgctggcgcacatgctgcgcgcaccgccctgggctcgcctcccgctcacgctgcgctgggtgcgcccagacctccgccaggacctctgcctcccgccgccgccgcacgtgcctctggccttcgggcctccaccgccccaggccccggccccaaggcgccgcgcaggtccctttgatgacgcggagcctgagccagaccagggggatccaggggcctgctgctccctgtgcgcccagaccatccaggatgaagaggggcccttgtgttgcccccaccctggctgcctgctaagggcccatgtgatctgcctggcagaggagtttcttcaggaagaaccagggcagcttctgcccctagagggccaatgcccttgctgtgagaagtcactgctttggggagacctgatctggctgtgccagatggacactgagaaagaagtagaagactcagaattagaagaggcacactggacagacctgctggagacctgatcctcagtgtccttaccccctcctacctcttttctgtgccacctgctgtgggtccagcaggtttttacttgagtacaataaaaagtctgagtcaaaaaaaaaaaaaacaaaaaaaaaaaaaaaaaaaaaaaccccaattttttttttagggggcgcaggggggggagacgaggtttgcgacacaacgggggccccaggggcggcggggaaatggcaggggggggggggcccgggcccacaaatctgcccccca

SEQ ID NO: 425194 - DNA, 2683 bp, Homo sapiens
tggaaaactcacttccgcccttactaaggcgtacgtcaacgcagtacttccgccctcaagcagccgggctttccagcggtccaggcttttcgcgcttgccatgtgtcagccaatcagagcctgaggaaggtgggactcgggcggagccgatgctgaatggtacgcgctcgccgactggacagcagtctggcttccgcggtcggacttctacacccgcctccagacaggagaggggcacgtaccggcgctacggcttcctgcaggctgcctccggatagtccccgagagcttgttccgaagcaagcaccctgcagccctagcgatccagccctcccctggaccctaggtcacggcaatcaaccccctgctgtggttcccgaaccccaaggcccgatgggtcccgcgggggtcgcggcgaggccagggcgctttttcggcgtctacctgctctactgcctgaacccccggtaccggggccgcgtctacgtggggttcactgtcaacactgctcgtcgggtccagcagcacaatgggggccgcaaaaaaggcggggcctggcggaccagcgggcgagggccctgggagatggtgctcgtcgtgcacggcttcccgtcctccgtggccgcccttcggtttgagtgggcttggcagcacccgcacgcctcgcgccgcctggcgcacgtggggcctcgcctgcgaggagagacagccttcgctttccacctgcgcgtgctggcgcacatgctgcgcgcaccgccctgggctcgcctcccgctcacgctgcgctgggtgcgcccagacctccgccaggacctctgcctcccgccgccgccgcacgtgcctctggccttcgggcctccaccgccccaggccccggccccaaggcgccgcgcaggtccctttgatgacgcggagcctgagccagaccagggggatccaggggcctgctgctccctgtgcgcccagaccatccaggatgaagaggggcccttgtgttgcccccaccctggctgcctgctaagggcccatgtgatctgcctggcagaggagtttcttcaggaagaaccagggcagcttctgcccctagagggccaatgcccttgctgtgagaagtcactgctttggggagacctgatctggctgtgccagatggacactgagaaagaagtagaagactcagaattagaagaggaacatggagctgatccaggacacctcccgcccgccactggagtacgtgaagggggtcccgctcatcaagtactttgcagaggcactggggcccctgcagagcttccaagcccgacctgatgacctgctcatcaacacctaccccaagtctggcaccacctgggtgagccagatactggacatgatctaccagggcggcgacctagagaagtgtaaccgggctcccatctacgtacgggtgcccttccttgaggtcaatgatccaggggaaccctcagggctggagactctgaaagacacaccgcccccacggctcatcaagtcacacctgcccctggctctgctccctcagactctgttggatcagaaggtcaaggtggtctatgttgcccgaaacccaaaggacgtggcggtctcctactaccatttccaccgtatggaaaaggcgcaccctgagcctgggacctgggacagcttcctggaaaagttcatggctggagaagtgtcctacgggtcctggtaccagcacgtgcaggagtggtgggagctgagccgcacccaccctgttctctacctcttctatgaagacatgaaggaggtgagaccgactgtgatgcttccccccatgtgacacctgggggcaggcacctcacagggacccaccaaggccacccagccccgtccctgggcggctcccacagcaagcccggattccccatcctacctccctggcccaggcccccccactgcagccccacctggcagcaggctcggcacagctttcatcttctgcacctgagtcagctgcatgggtggccacggatcagatacttagtcctattgcttatcctcaccaaagggtgtgccacccagggccacagtcatggaagaagaccatcccggtcctcacccataggcgccaagccctgttcatgatgggatcacagggcagagatcaattcattttactccagagactagggccccaggggttgaggctctttggggtttctaggggaagtggccagatcccctctgaggttagagagggggacccgttttgttttgctccactgaggagccctctgctgctcagaaccccaaaagggagattcaaaagatcctggagtttgtggggcgctccctgccagaggagaccatggacttcatggttcagcacacgtcgttcaaggagatgaagaagaaccctatgaccaactacaccaccgtcccccaggagctcatggaccacagcatctcccccttcatgaggaaaggcatggctggggactggaagaccaccttcaccgtggcgcagaatgagcgcttcgatgcggactatgcggagaagatggcaggctgcagcctcagcttccgctctgagctgtgagaggggctcctggagtcactgcagagggagtgtgcgaatctaccctgaccaatgggctcaagaataaagtatgatttttgagtcaggcacagtggctcatgt

SEQ ID NO: 425195 - DNA, 2146 bp, Homo sapiens
tggaaaactcacttccgcccttactaaggcgtacgtcaacgcagtacttccgccctcaagcagccgggctttccagcggtccaggcttttcgcgcttgccatgtgtcagccaatcagagcctgaggaaggtgggactcgggcggagccgatgctgaatggtacgcgctcgccgactggacagcagtctggcttccgcggtcggacttctacacccgcctccagacaggagaggggcacgtaccggcgctacggcttcctgcaggctgcctccggatagtccccgagagcttgttccgaagcaagcaccctgcagccctagcgatccagccctcccctggaccctaggtcacggcaatcaaccccctgctgtggttcccgaaccccaaggcccgatgggtcccgcgggggtcgcggcgaggccagggcgctttttcggcgtctacctgctctactgcctgaacccccggtaccggggccgcgtctacgtggggttcactgtcaacactgctcgtcgggtccagcagcacaatgggggccgcaaaaaaggcggggcctggcggaccagcgggcgagggccctggtgagagggggaggccttctgtgccgggaggaaggcgtcccagaggaggcggaccccgcggggcacaggcctgttgagaaggaccggccaggactgtgacagaggcggggcgtctgtggtggggacggggcctgtcgcaggggaggagcgtgacggggaggcggtgcccggggcatctccgcggcggaactcaggctgtgagaagtcactgctttggggagacctgatctggctgtgccagatggacactgagaaagaagtagaagactcagaattagaagaggaacatggagctgatccaggacacctcccgcccgccactggagtacgtgaagggggtcccgctcatcaagtactttgcagaggcactggggcccctgcagagcttccaagcccgacctgatgacctgctcatcaacacctaccccaagtctggcaccacctgggtgagccagatactggacatgatctaccagggcggcgacctagagaagtgtaaccgggctcccatctacgtacgggtgcccttccttgaggtcaatgatccaggggaaccctcagggctggagactctgaaagacacaccgcccccacggctcatcaagtcacacctgcccctggctctgctccctcagactctgttggatcagaaggtcaaggtggtctatgttgcccgaaacccaaaggacgtggcggtctcctactaccatttccaccgtatggaaaaggcgcaccctgagcctgggacctgggacagcttcctggaaaagttcatggctggagaagtgtcctacgggtcctggtaccagcacgtgcaggagtggtgggagctgagccgcacccaccctgttctctacctcttctatgaagacatgaaggagaaccccaaaagggagattcaaaagatcctggagtttgtggggcgctccctgccagaggagaccatggacttcatggttcagcacacgtcgttcaaggagatgaagaagaaccctatgaccaactacaccaccgtcccccaggagctcatggaccacagcatctcccccttcatgaggaaaggcatggctggggactggaagaccaccttcaccgtggcgcagaatgagcgcttcgatgcggactatgcggagaagatggcaggctgcagcctcagcttccgctctgagctgtgagaggggctcctggagtcactgcagagggagtgtgcgaatctaccctgaccaatgggctcaagaataaagtatgatttttgagtcaggcacagtggctcatgtctgcaatcccagcgatttgggaggttgagctggtaggatcacaataggccacgaatttgagaccagcctggtaaaatagtgagacctcatctctacaaagatgtaaaaaaattagccacatgtgctggcacttacctgtagtcccagctacttgggaagcagaggctggaggatcatttcagcccaggaggttgtggatacagtgagttatgacatgcccattcactacagcctggatgacaagcaagaccctccctccaaagaaaataaagctcaattaaaataaaa

SEQ ID NO: 425196 - DNA, 2423 bp, Homo sapiens
  misc_feature (12)..(12): n is a, c, g, or t
  misc_feature (43)..(43): n is a, c, g, or t
aagaaaaaaaanaaactatgctagggtacgagtgctgcgtgtnaatcggccgaggtcggacttctacacccgcctccagacaggagaggggcacgtaccggcgctacggcttcctgcaggctgcctccggatagtccccgagagcttgttccgaagcaagcaccctgcagccctagcgatccagccctcccctggaccctaggtcacggcaatcaaccccctgctgtggttcccgaaccccaaggcccgatgggtcccgcgggggtcgcggcgaggccagggcgctttttcggcgtctacctgctctactgcctgaacccccggtaccggggccgcgtctacgtggggttcactgtcaacactgctcgtcgggtccagcagcacaatgggggccgcaaaaaaggcggggcctggcggaccagcgggcgagggccctgggagatggtgctcgtcgtgcacggcttcccgtcctccgtggccgcccttcgggtaaggaaggagaccgggcagcggcggccgggtgagggcttgggttccgcccctcgctccgagccgccctgatgcccctgtacgccgcccgcagtttgagtgggcttggcagcacccgcacgcctcgcgccgcctggcgcacgtggggcctcgcctgcgaggagagacagccttcgctttccacctgcgcgtgctggcgcacatgctgcgcgcaccgccctgggctcgcctcccgctcacgctgcgctgggtgcgcccagacctccgccaggacctctgcctcccgccgccgccgcacgtgcctctggccttcgggcctccaccgccccaggccccggccccaaggcgccgcgcaggtccctttgatgacgcggagcctgagccagaccagggggatccaggggcctgctgctccctgtgcgcccagaccatccaggatgaagaggggcccttgtgttgcccccaccctggctgcctgctaagggcccatgtgatctgcctggcagaggagtttcttcaggaagaaccagggcagcttctgcccctagagggccaatgcccttgctgtgagaagtcactgctttggggagacctgatctggctgtgccagatggacactgagaaagaagtagaagactcagaattagaagaggaacatggagctgatccaggacacctcccgcccgccactggagtacgtgaagggggtcccgctcatcaagtactttgcagaggcactggggcccctgcagagcttccaagcccgacctgatgacctgctcatcaacacctaccccaagtctggcaccacctgggtgagccagatactggacatgatctaccagggcggcgacctagagaagtgtaaccgggctcccatctacgtacgggtgcccttccttgaggtcaatgatccaggggaaccctcagggctggagactctgaaagacacaccgcccccacggctcatcaagtcacacctgcccctggctctgctccctcagactctgttggatcagaaggtcaaggtggtctatgttgcccgaaacccaaaggacgtggcggtctcctactaccatttccaccgtatggaaaaggcgcaccctgagcctgggacctgggacagcttcctggaaaagttcatggctggagaagtgtcctacgggtcctggtaccagcacgtgcaggagtggtgggagctgagccgcacccaccctgttctctacctcttctatgaagacatgaaggagaaccccaaaagggagattcaaaagatcctggagtttgtggggcgctccctgccagaggagaccatggacttcatggttcagcacacgtcgttcaaggagatgaagaagaaccctatgaccaactacaccaccgtcccccaggagctcatggaccacagcatctcccccttcatgaggaaaggcatggctggggactggaagaccaccttcaccgtggcgcagaatgagcgcttcgatgcggactatgcggagaagatggcaggctgcagcctcagcttccgctctgagctgtgagaggggctcctggagtcactgcagagggagtgtgcgaatctaccctgaccaatgggctcaagaataaagtatgatttttgagtcaggcacagtggctcatgtctgcaatcccagcgatttgggaggttgagctggtaggatcacaataggccacgaatttgagaccagcctggtaaaatagtgagacctcatctctacaaagatgtaaaaaaattagccacatgtgctggcacttacctgtagtcccagctacttgggaagcagaggctggaggatcatttcagcccaggaggttgtggatacagtgagttatgacatgcccattcactacagcctggatgacaagcaagaccctccctccaaagaaaataaagctcaattaaaataaaa

SEQ ID NO: 425197 - DNA, 1233 bp, Homo sapiens
tggaaaactcacttccgcccttactaaggcgtacgtcaacgcagtacttccgccctcaagcagccgggctttccagcggtccaggcttttcgcgcttgccatgtgtcagccaatcagagcctgaggaaggtgggactcgggcggagccgatgctgaatggtacgcgctcgccgactggacagcagtctggcttccgcggtcggacttctacacccgcctccagacaggagaggggcacgtaccggcgctacggcttcctgcaggctgcctccggatagtccccgagagcttgttccgaagcaagcaccctgcagccctagcgatccagccctcccctggaccctaggtcacggcaatcaaccccctgctgtggttcccgaaccccaaggcccgatgggtcccgcgggggtcgcggcgaggccagggcgctttttcggcgtctacctgctctactgcctgaacccccggtaccggggccgcgtctacgtggggttcactgtcaacactgctcgtcgggtccagcagcacaatgggggccgcaaaaaaggcggggcctggcggaccagcgggcgagggccctgggagatggtgctcgtcgtgcacggcttcccgtcctccgtggccgcccttcggtttgagtgggcttggcagcacccgcacgcctcgcgccgcctggcgcacgtggggcctcgcctgcgaggagagacagccttcgctttccacctgcgcgtgctggcgcacatgctgcgcgcaccgccctgggctcgcctcccgctcacgctgcgctgggtgcgcccagacctccgccaggacctctgcctcccgccgccgccgcacgtgcctctggccttcgggcctccaccgccccaggccccggccccaaggcgccgcgcaggtccctttgatgacgcggagcctgagccagaccagggggatccaggggcctgctgctccctgtgcgcccagaccatccaggatgaagaggggcccttgtgttgcccccaccctggctgcctgctaagggcccatgtgatctgcctggcagaggagtttcttcaggaagaaccagggcagcttctgcccctagagggccaatgcccttgctgtgagaagtcactgctttggggagacctgatctggctgtgccagatggacactgagaaagaagtagaagactcagaattagaagagccagcaggtttttacttgagtacaataaaaagtctgagtcaa

SEQ ID NO: 425198 - DNA, 1606 bp, Homo sapiens
tggaaaactcacttccgcccttactaaggcgtacgtcaacgcagtacttccgccctcaagcagccgggctttccagcggtccaggcttttcgcgcttgccatgtgtcagccaatcagagcctgaggaaggtgggactcgggcggagccgatgctgaatggtacgcgctcgccgactggacagcagtctggcttccgcggtcggacttctacacccgcctccagacaggagaggggcacgtaccggcgctacggcttcctgcaggctgcctccggatagtccccgagagcttgttccgaagcaagcaccctgcagccctagcgatccagccctcccctggaccctaggtcacggcaatcaaccccctgctgtggttcccgaaccccaaggcccgatgggtcccgcgggggtcgcggcgaggccagggcgctttttcggcgtctacctgctctactgcctgaacccccggtaccggggccgcgtctacgtggggttcactgtcaacactgctcgtcgggtccagcagcacaatgggggccgcaaaaaaggcggggcctggcggaccagcgggcgagggccctgggagatggtgctcgtcgtgcacggcttcccgtcctccgtggccgcccttcggtttgagtgggcttggcagcacccgcacgcctcgcgccgcctggcgcacgtggggcctcgcctgcgaggagagacagccttcgctttccacctgcgcgtgctggcgcacatgctgcgcgcaccgccctgggctcgcctcccgctcacgctgcgctgggtgcgcccagacctccgccaggacctctgcctcccgccgccgccgcacgtgcctctggccttcgggcctccaccgccccaggccccggccccaaggcgccgcgcaggtccctttgatgacgcggagcctgagccagaccagggggatccaggggcctgctgctccctgtgcgcccagaccatccaggatgaagaggggcccttgtgttgcccccaccctggctgcctgctaagggcccatgtgatctgcctggcagaggagtttcttcaggaagaaccagggcagcttctgcccctagagggccaatgcccttgctgtgagaagtcactgctttggggagacctgatctggctgtgccagatggacactgagaaagaagtagaagactcagaattagaagaggaacatggagctgatccaggacacctcccgcccgccactggagtacgtgaagggggtcccgctcatcaagtactttgcagaggcactggggcccctgcagagcttccaagcccgacctgatgacctgctcatcaacacctaccccaagtctggcaccacctgggtgagccagatactggacatgatctaccagggcggcgacctagagaagtgtaaccgggctcccatctacgtacgggtgcccttccttgaggtcaatgatccaggggaaccctcagggctggagactctgaaagacacaccgcccccacggctcatcaagtcacacctgcccctggctctgctccctcagactctgttggatcagaaggtcaaggtctatgttgcccgaagtcaacctcagggatcctctaga

SEQ ID NO: 425199 - DNA, 1823 bp, Homo sapiens
tgagtgagtagaggacttgccctggggacattcagtgacctgctgggtgttgctgagctgtgaggaagttcaggtctggctgcagtggtgaggctgtgactcaatcaatcactgctgatgctcccaggacctgcaccagcttagtcctaggggcaaggattttaactgtccacctcagtttcttcatttgtaagatgcaaataacagtcacccctgcctcatgggatggagctgtgtaatgcccgcaacagtgcctgctgcatagaggggttgctgccagctgcctctccctccttgtctcttacctgcctgctgcctgggtcaggatgaagaggggcccttgtgttgcccccaccctggctgcctgctaagggcccatgtgatctgcctggcagaggagtttcttcaggaagaaccagggcagcttctgcccctagagggccaatgcccttgctgtgagaagtcactgctttggggagacctgatctggctgtgccagatggacactgagaaagaagtagaagactcagaattagaagaggaacatggagctgatccaggacacctcccgcccgccactggagtacgtgaagggggtcccgctcatcaagtactttgcagaggcactggggcccctgcagagcttccaagcccgacctgatgacctgctcatcaacacctaccccaagtctggcaccacctgggtgagccagatactggacatgatctaccagggcggcgacctagagaagtgtaaccgggctcccatctacgtacgggtgcccttccttgaggtcaatgatccaggggaaccctcagggctggagactctgaaagacacaccgcccccacggctcatcaagtcacacctgcccctggctctgctccctcagactctgttggatcagaaggtcaaggtggtctatgttgcccgaaacccaaaggacgtggcggtctcctactaccatttccaccgtatggaaaaggcgcaccctgagcctgggacctgggacagcttcctggaaaagttcatggctggagaagtgtcctacgggtcctggtaccagcacgtgcaggagtggtgggagctgagccgcacccaccctgttctctacctcttctatgaagacatgaaggagaaccccaaaagggagattcaaaagatcctggagtttgtggggcgctccctgccagaggagaccatggacttcatggttcagcacacgtcgttcaaggagatgaagaagaaccctatgaccaactacaccaccgtcccccaggagctcatggaccacagcatctcccccttcatgaggaaaggcatggctggggactggaagaccaccttcaccgtggcgcagaatgagcgcttcgatgcggactatgcggagaagatggcaggctgcagcctcagcttccgctctgagctgtgagaggggctcctggagtcactgcagagggagtgtgcgaatctaccctgaccaatgggctcaagaataaagtatgatttttgagtcaggcacagtggctcatgtctgcaatcccagcgatttgggaggttgagctggtaggatcacaataggccacgaatttgagaccagcctggtaaaatagtgagacctcatctctacaaagatgtaaaaaaattagccacatgtgctggcacttacctgtagtcccagctacttgggaagcagaggctggaggatcatttcagcccaggaggttgtggatacagtgagttatgacatgcccattcactacagcctggatgacaagcaagaccctccctccaaagaaaataaagctcaattaaaataaaa

SEQ ID NO: 425200 - DNA, 1343 bp, Homo sapiens
ccacacccatactcagcccctgcaggcaaggagagaacaggtcaggttcccgagagctcaggaacatggagctgatccaggacacctcccgcccgccactggagtacgtgaagggggtcccgctcatcaagtactttgcagaggcactggggcccctgcagagcttccaagcccgacctgatgacctgctcatcaacacctaccccaagtctggcaccacctgggtgagccagatactggacatgatctaccagggcggcgacctagagaagtgtaaccgggctcccatctacgtacgggtgcccttccttgaggtcaatgatccaggggaaccctcagggctggagactctgaaagacacaccgcccccacggctcatcaagtcacacctgcccctggctctgctccctcagactctgttggatcagaaggtcaaggtggtctatgttgcccgaaacccaaaggacgtggcggtctcctactaccatttccaccgtatggaaaaggcgcaccctgagcctgggacctgggacagcttcctggaaaagttcatggctggagaagtgtcctacgggtcctggtaccagcacgtgcaggagtggtgggagctgagccgcacccaccctgttctctacctcttctatgaagacatgaaggagaaccccaaaagggagattcaaaagatcctggagtttgtggggcgctccctgccagaggagaccatggacttcatggttcagcacacgtcgttcaaggagatgaagaagaaccctatgaccaactacaccaccgtcccccaggagctcatggaccacagcatctcccccttcatgaggaaaggcatggctggggactggaagaccaccttcaccgtggcgcagaatgagcgcttcgatgcggactatgcggagaagatggcaggctgcagcctcagcttccgctctgagctgtgagaggggctcctggagtcactgcagagggagtgtgcgaatctaccctgaccaatgggctcaagaataaagtatgatttttgagtcaggcacagtggctcatgtctgcaatcccagcgatttgggaggttgagctggtaggatcacaataggccacgaatttgagaccagcctggtaaaatagtgagacctcatctctacaaagatgtaaaaaaattagccacatgtgctggcacttacctgtagtcccagctacttgggaagcagaggctggaggatcatttcagcccaggaggttgtggatacagtgagttatgacatgcccattcactacagcctggatgacaagcaagaccctccctccaaagaaaataaagctcaattaaaataaaa

SEQ ID NO: 425201 - DNA, 1696 bp, Homo sapiens
gtgatctgggctcactgaaacctccgcctcctgggttcaagtgattctcttgcctcagcctcctgagtagctaggattacaggtgcccgccatcatgcccagctaatttttgtatttttagtagagacagggtttcaccatgttggccagcttggtctcgaactcctgacctcaggtgatcctgctgcatcgacctcccaaagtactgggattacaggcgtgagccaccacgctcagcctctttcttgttctatatgtccatgctctgctccacttctggcccttcactctgccccacacatcactccagactggccttgtggtcagagcctggaatgcctgggctgctgggggcctgtggactgcactgggccagaacccctgccgccttcaagactggcctgtagccagcaggaacatggagctgatccaggacacctcccgcccgccactggagtacgtgaagggggtcccgctcatcaagtactttgcagaggcactggggcccctgcagagcttccaagcccgacctgatgacctgctcatcaacacctaccccaagtctggcaccacctgggtgagccagatactggacatgatctaccagggcggcgacctagagaagtgtaaccgggctcccatctacgtacgggtgcccttccttgaggtcaatgatccaggggaaccctcagggctggagactctgaaagacacaccgcccccacggctcatcaagtcacacctgcccctggctctgctccctcagactctgttggatcagaaggtcaaggtggtctatgttgcccgaaacccaaaggacgtggcggtctcctactaccatttccaccgtatggaaaaggcgcaccctgagcctgggacctgggacagcttcctggaaaagttcatggctggagaagtgtcctacgggtcctggtaccagcacgtgcaggagtggtgggagctgagccgcacccaccctgttctctacctcttctatgaagacatgaaggagaaccccaaaagggagattcaaaagatcctggagtttgtggggcgctccctgccagaggagaccatggacttcatggttcagcacacgtcgttcaaggagatgaagaagaaccctatgaccaactacaccaccgtcccccaggagctcatggaccacagcatctcccccttcatgaggaaaggcatggctggggactggaagaccaccttcaccgtggcgcagaatgagcgcttcgatgcggactatgcggagaagatggcaggctgcagcctcagcttccgctctgagctgtgagaggggctcctggagtcactgcagagggagtgtgcgaatctaccctgaccaatgggctcaagaataaagtatgatttttgagtcaggcacagtggctcatgtctgcaatcccagcgatttgggaggttgagctggtaggatcacaataggccacgaatttgagaccagcctggtaaaatagtgagacctcatctctacaaagatgtaaaaaaattagccacatgtgctggcacttacctgtagtcccagctacttgggaagcagaggctggaggatcatttcagcccaggaggttgtggatacagtgagttatgacatgcccattcactacagcctggatgacaagcaagaccctccctccaaagaaaataaagctcaattaaaataaaa

SEQ ID NO: 425202 - DNA, 1273 bp, Homo sapiens
agaagactcagaattagaagaggaacatggagctgatccaggacacctcccgctcatcaagtactttgcagaggcactggggcccctgcagagcttccaagcccgacctgatgacctgctcatcaacacctaccccaagtctggcaccacctgggtgagccagatactggacatgatctaccagggcggcgacctagagaagtgtaaccgggctcccatctacgtacgggtgcccttccttgaggtcaatgatccaggggaaccctcagggctggagactctgaaagacacaccgcccccacggctcatcaagtcacacctgcccctggctctgctccctcagactctgttggatcagaaggtcaaggtggtctatgttgcccgaaacccaaaggacgtggcggtctcctactaccatttccaccgtatggaaaaggcgcaccctgagcctgggacctgggacagcttcctggaaaagttcatggctggagaagtgtcctacgggtcctggtaccagcacgtgcaggagtggtgggagctgagccgcacccaccctgttctctacctcttctatgaagacatgaaggagaaccccaaaagggagattcaaaagatcctggagtttgtggggcgctccctgccagaggagaccatggacttcatggttcagcacacgtcgttcaaggagatgaagaagaaccctatgaccaactacaccaccgtcccccaggagctcatggaccacagcatctcccccttcatgaggaaaggcatggctggggactggaagaccaccttcaccgtggcgcagaatgagcgcttcgatgcggactatgcggagaagatggcaggctgcagcctcagcttccgctctgagctgtgagaggggctcctggagtcactgcagagggagtgtgcgaatctaccctgaccaatgggctcaagaataaagtatgatttttgagtcaggcacagtggctcatgtctgcaatcccagcgatttgggaggttgagctggtaggatcacaataggccacgaatttgagaccagcctggtaaaatagtgagacctcatctctacaaagatgtaaaaaaattagccacatgtgctggcacttacctgtagtcccagctacttgggaagcagaggctggaggatcatttcagcccaggaggttgtggatacagtgagttatgacatgcccattcactacagcctggatgacaagcaagaccctccctccaaagaaaataaagctcaattaaaataaaa

SEQ ID NO: 425203 - DNA, 739 bp, Homo sapiens
ggatcccagaattacccatcttgggggttaaatatgctatgaatacatggacgacaaccccaaaagggagattcaaaagatcctggagtttgtggggcgctccctgccagaggagaccatggacttcatggttcagcacacgtcgttcaaggagatgaagaagaaccctatgaccaactacaccaccgtcccccaggagctcatggaccacagcatctcccccttcatgaggaaaggcatggctggggactggaagaccaccttcaccgtggcgcagaatgagcgcttcgatgcggactatgcggagaagatggcaggctgcagcctcagcttccgctctgagctgtgagaggggctcctggagtcactgcagagggagtgtgcgaatctaccctgaccaatgggctcaagaataaagtatgatttttgagtcaggcacagtggctcatgtctgcaatcccagcgatttgggaggttgagctggtaggatcacaataggccacgaatttgagaccagcctggtaaaatagtgagacctcatctctacaaagatgtaaaaaaattagccacatgtgctggcacttacctgtagtcccagctacttgggaagcagaggctggaggatcatttcagcccaggaggttgtggatacagtgagttatgacatgcccattcactacagcctggatgacaagcaagaccctccctccaaagaaaataaagctcaattaaaataaaa

SEQ ID NO: 425204 - DNA, 1190 bp, Homo sapiens
tggaaaactcacttccgcccttactaaggcgtacgtcaacgcagtacttccgccctcaagcagccgggctttccagcggtccaggcttttcgcgcttgccatgtgtcagccaatcagagcctgaggaaggtgggactcgggcggagccgatgctgaatggtacgcgctcgccgactggacagcagtctggcttccgcggtcggacttctacacccgcctccagacaggagaggggcacgtaccggcgctacggcttcctgcaggctgcctccggatagtccccgagagcttgttccgaagcaagcaccctgcagccctagcgatccagccctcccctggaccctaggtcacggcaatcaaccccctgctgtggttcccgaaccccaaggcccgatgggtcccgcgggggtcgcggcgaggccagggcgctttttcggcgtctacctgctctactgcctgaacccccggtaccggggccgcgtctacgtggggttcactgtcaacactgctcgtcgggtccagcagcacaatgggggccgcaaaaaaggcggggcctggcggaccagcgggcgagggccctggtgagagggggaggccttctgtgccgggaggaaggcgtcccagaggaggcggaccccgcggggcacaggcctgttgagaaggaccggccaggactgtgacagaggcggggcgtctgtggtggggacggggcctgtcgcaggggaggagcgtgacggggaggcggtgcccggggcatctccgcggcggaactcagggaaggagctagctggggcgggggtgatgatccaggctgggttccagcatagggctcttggtgggcacgctggggtcgggtggaatgcaggagagagaggaggtgggatgaaggagagagggaggaccggggagggagagtggtgaacacctgctgggaactcagcacatgctgggatgctggcactccctgctttctgtagttatttgaagactatagccgctcccgctgcacaggcgctgtgatgcctcaatgcattgacccatgtgagccccaggatgttcctggcggaggaaagatctgtgaaggcagcatttctccttgcgcctcatcctggccacggccccggggtgggggtgcagggggttattattctcctttaacgattgcgttttcccggccttcctaccaaacc

SEQ ID NO: 425205 - DNA, 419 bp, Homo sapiens
ccaggtagacctaacactcctctgccaggcagatcacatgggcccttagcaggcagccagggtgggggcaacacaagggcccctcttcatcctggatggtctgggcgcacagggagcagcaggcccctggatccccctggtctggctcaggagtttcttcaggaagaaccagggcagcttctgcccctagagggccaatgcccttgctgtgagaagtcactgctttggggagacctgatctggctgtgccagatggacactgagaaagaagtagaagactcagaattagaagaggcacactggacagacctgctggagacctgatcctcagtgtccttaccccctcctacctcttttctgtgccacctgctgtgggtccagcaggtttttacttgagtacaataaaaagtctgagtcaa

SEQ ID NO: 425206 - DNA, 582 bp, Homo sapiens
  misc_feature (12)..(12): n is a, c, g, or t
  misc_feature (43)..(43): n is a, c, g, or t
aagaaaaaaaanaaactatgctagggtacgagtgctgcgtgtnaatcggccgaggtcggacttctacacccgcctccagacaggagaggggcacgtaccggcgctacggcttcctgcaggctgcctccggatagtccccgagagcttgttccgaagcaagcaccctgcagccctagcgatccagccctcccctggaccctaggtcacggcaatcaaccccctgctgtggttcccgaaccccaaggcccgatgggtcccgcgggggtcgcggcgaggccagggcgctttttcggcgtctacctgctctactgcctgaacccccggtaccggggccgcgtctacgtggggttcactgtcaacactgctcgtcgggtccacatagggctcttggtgggcacgctggggtcgggtggaatgcaggagagagaggaggtgggacaggtgggtacctgggctggaggcagggcctgaggtgggcaggtgcagagggctgcacttctcggctgaagccgggaatgaggaccccgctctcgggtgggattggaggggacccgcggctgaggcgctgggctgcgacaggga

SEQ ID NO: 425207 - DNA, 746 bp, Homo sapiens
tgagtgagtagaggacttgccctggggacattcagtgacctgctgggtgttgctgagctgtgaggaagttcaggtctggctgcagtggtgaggctgtgactcaatcaatcactgctgatgctcccaggacctgcaccagcttagtcctaggggcaaggattttaactgtccacctcagtttcttcatttgtaagatgcaaataacagtcacccctgcctcatgggatggagctgtgtaatgcccgcaacagtgcctgctgcatagaggggttgctgccagctgcctctccctccttgtctcttacctgcctgctgcctgggtcaggatgaagaggggcccttgtgttgcccccaccctggctgcctgctaagggcccatgtgatctgcctggcagaggagtttcttcaggaagaaccagggcagcttctgcccctagagggccaatgcccttgctgtgagaagtcactgctttggggagacctgatctggctgtgccagatggacactgagaaagaagtagaagactcagaattagaagagggtgagtgggctttggtggcgggctccctaccccactccctgccctgggctgcctgtgaccacactgcttgcctctgcaggcacactggacagacctgctggagacctgatcctcagtgtccttaccccctcctacctcttttctgtgccacctgctgtgggtccagcaggtttttacttgagtacaataaaaagtctgagtcaa

SEQ ID NO: 425208 - DNA, 268 bp, Homo sapiens
ggtgaactctagaggatctcaattctgcacccacagccctagagggcaatgccttctgtgagaagtcactgctttggggagacctgatctggctgtgccagatggacactgagaaagaagtagaagactcagaattagaagaggcacactggacagacctgctggagacctgatcctcagtgtccttaccccctcctacctcttttctgtgccacctgctgtgggtccagcaggtttttacttgagtacaataaaaagtctgagtcaa

SEQ ID NO: 425209 - DNA, 291 bp, Homo sapiens
  misc_feature (12)..(12): n is a, c, g, or t
  misc_feature (43)..(43): n is a, c, g, or t
aagaaaaaaaanaaactatgctagggtacgagtgctgcgtgtnaatcggccgaggtcggacttctacacccgcctccagacaggagaggggcacgtaccggcgctacggcttcctgcaggctgcctccggatagtccccgagagcttgttccgaagcaagcaccctgcagccctagcgatccagccctcccctggaccctaggtcacggcaatcaaccccctgctgtggttcccagcacgtggaccttccggaaacacctgggctgaatggggtcccgtcggctagtcggg

SEQ ID NO: 425210 - DNA, 1208 bp, Homo sapiens
  misc_feature (1174)..(1174): n is a, c, g, or t
  misc_feature (1178)..(1178): n is a, c, g, or t
  misc_feature (1182)..(1182): n is a, c, g, or t
tggaaaactcacttccgcccttactaaggcgtacgtcaacgcagtacttccgccctcaagcagccgggctttccagcggtccaggcttttcgcgcttgccatgtgtcagccaatcagagcctgaggaaggtgggactcgggcggagccgatgctgaatggtacgcgctcgccgactggacagcagtctggcttccgcggtcggacttctacacccgcctccagacaggagaggggcacgtaccggcgctacggcttcctgcaggctgcctccggatagtccccgagagcttgttccgaagcaagcaccctgcagccctagcgatccagccctcccctggaccctaggtcacggcaatcaaccccctgctgtggttcccgaaccccaaggcccgatgggtcccgcgggggtcgcggcgaggccagggcgctttttcggcgtctacctgctctactgcctgaacccccggtaccggggccgcgtctacgtggggttcactgtcaacactgctcgtcgggtccagcagcacaatgggggccgcaaaaaaggcggggcctggcggaccagcgggcgagggccctgggagatggtgctcgtcgtgcacggcttcccgtcctccgtggccgcccttcggtttgagtgggcttggcagcacccgcacgcctcgcgccgcctggcgcacgtggggcctcgcctgcgaggagagacagccttcgctttccacctgcgcgtgctggcgcacatgctgcgcgcaccgccctgggctcgcctcccgctcacgctgcgctgggtgcgcccagacctccgccaggacctctgcctcccgccgccgccgcacgtgcctctggccttcgggcctccaccgccccaggccccggccccaaggcgccgcgcaggtccctttgatgacgcggagcctgagccagaccagggggatccaggggcctgctgctccctgtgcgcccagaccatccaggatgaagaggggcccttgtgttgcccccaccctggctgcctgctaagggcccatgtgatctgcctggcagaggagtttcttcaggaagaaccagggcagcttctgcccctagagggccaatgcccttgctgtgagaagtcactgctttggggagacctgatctggctgtgccagatggcctgggaagagtaaactcgantaanaggncccggagaccgttgaacctgacctcg

SEQ ID NO: 425211 - DNA, 1396 bp, Homo sapiens
tggaaaactcacttccgcccttactaaggcgtacgtcaacgcagtacttccgccctcaagcagccgggctttccagcggtccaggcttttcgcgcttgccatgtgtcagccaatcagagcctgaggaaggtgggactcgggcggagccgatgctgaatggtacgcgctcgccgactggacagcagtctggcttccgcggtcggacttctacacccgcctccagacaggagaggggcacgtaccggcgctacggcttcctgcaggctgcctccggatagtccccgagagcttgttccgaagcaagcaccctgcagccctagcgatccagccctcccctggaccctaggtcacggcaatcaaccccctgctgtggttcccgaaccccaaggcccgatgggtcccgcgggggtcgcggcgaggccagggcgctttttcggcgtctacctgctctactgcctgaacccccggtaccggggccgcgtctacgtggggttcactgtcaacactgctcgtcgggtccagcagcacaatgggggccgcaaaaaaggcggggcctggcggaccagcgggcgagggccctgggagatggtgctcgtcgtgcacggcttcccgtcctccgtggccgcccttcggtttgagtgggcttggcagcacccgcacgcctcgcgccgcctggcgcacgtggggcctcgcctgcgaggagagacagccttcgctttccacctgcgcgtgctggcgcacatgctgcgcgcaccgccctgggctcgcctcccgctcacgctgcgctgggtgcgcccagacctccgccaggacctctgcctcccgccgccgccgcacgtgcctctggccttcgggcctccaccgccccaggccccggccccaaggcgccgcgcaggtccctttgatgacgcggagcctgagccagaccagggggatccaggggcctgctgctccctgtgcgcccagaccatccaggatgaagaggggcccttgtgttgcccccaccctggctgcctgctaagggcccatgtgatctgcctggcagaggagtttcttcaggaagaaccagggcagcttctgcccctagagggccaatgcccttgctgtgagaagtcactgctttggggagacctgatctggctgtgccagatggacactgagaaagaagtagaagactcagaattagaagagggtgagtgggctttggtggcgggctccctaccccactccctgccctgggctgcctgtgaccacactgcttgcctctgcaggcacactggacagacctgctggagacctgatcctcagtgtccttaccccctcctacctcttttctgtgccacctgctgtgggtccagcaggtttttacttgagtacaataaaaagtctgagtcaa

SEQ ID NO: 425212 - DNA, 1841 bp, Homo sapiens
gtctgcactatgccccaggccctgggattttgaacagctctgcaggtgactgaaaggtgcggccaggctggggaacgacctggtttcagccccagccccgccactgactgactttgtgagtgcgggcaagtcactcagcctccctaggcctcagtgacttccctgaaagcaaaaactctgcaaaggggcagctgggtgctggctcacacctgtaatcccagcactttgggaggctgaggtagacaaatcacttgaggccaggagttctagaccagcctggccaacatggtgaaaccccatctctactaaagaaaaaaaaaaattagctgagcatggttgtacatgcttgtaatcccagctacttgggatgccgaggcgggaggattgcttgaacccaagaggtggagtttgcagtgagctgagattgtgccacactgcactccagcttgggtgagagtgagactccatctcaaaaaaaaaaaaaaaaaagagagaatcccactttcttgctgttgtgatggtggtaagggaacgggcctggctctggcccctgatgcaggaacatggagctgatccaggacacctcccgcccgccactggagtacgtgaagggggtcccgctcatcaagtactttgcagaggcactggggcccctgcagagcttccaagcccgacctgatgacctgctcatcaacacctaccccaagtctggcaccacctgggtgagccagatactggacatgatctaccagggcggcgacctagagaagtgtaaccgggctcccatctacgtacgggtgcccttccttgaggtcaatgatccaggggaaccctcagggctggagactctgaaagacacaccgcccccacggctcatcaagtcacacctgcccctggctctgctccctcagactctgttggatcagaaggtcaaggtggtctatgttgcccgaaacccaaaggacgtggcggtctcctactaccatttccaccgtatggaaaaggcgcaccctgagcctgggacctgggacagcttcctggaaaagttcatggctggagaagtgtcctacgggtcctggtaccagcacgtgcaggagtggtgggagctgagccgcacccaccctgttctctacctcttctatgaagacatgaaggagaaccccaaaagggagattcaaaagatcctggagtttgtggggcgctccctgccagaggagaccatggacttcatggttcagcacacgtcgttcaaggagatgaagaagaaccctatgaccaactacaccaccgtcccccaggagctcatggaccacagcatctcccccttcatgaggaaaggcatggctggggactggaagaccaccttcaccgtggcgcagaatgagcgcttcgatgcggactatgcggagaagatggcaggctgcagcctcagcttccgctctgagctgtgagaggggctcctggagtcactgcagagggagtgtgcgaatctaccctgaccaatgggctcaagaataaagtatgatttttgagtcaggcacagtggctcatgtctgcaatcccagcgatttgggaggttgagctggtaggatcacaataggccacgaatttgagaccagcctggtaaaatagtgagacctcatctctacaaagatgtaaaaaaattagccacatgtgctggcacttacctgtagtcccagctacttgggaagcagaggctggaggatcatttcagcccaggaggttgtggatacagtgagttatgacatgcccattcactacagcctggatgacaagcaagaccctccctccaaagaaaataaagctcaattaaaataaaa

SEQ ID NO: 425213 - DNA, 2241 bp, Homo sapiens
gtctgcactatgccccaggccctgggattttgaacagctctgcaggtgactgaaaggtgcggccaggctggggaacgacctggtttcagccccagccccgccactgactgactttgtgagtgcgggcaagtcactcagcctccctaggcctcagtgacttccctgaaagcaaaaactctgcaaaggggcagctgggtgctggctcacacctgtaatcccagcactttgggaggctgaggtagacaaatcacttgaggccaggagttctagaccagcctggccaacatggtgaaaccccatctctactaaagaaaaaaaaaaattagctgagcatggttgtacatgcttgtaatcccagctacttgggatgccgaggcgggaggattgcttgaacccaagaggtggagtttgcagtgagctgagattgtgccacactgcactccagcttgggtgagagtgagactccatctcaaaaaaaaaaaaaaaaaagagagaatcccactttcttgctgttgtgatggtggtaagggaacgggcctggctctggcccctgatgcaggaacatggagctgatccaggacacctcccgcccgccactggagtacgtgaagggggtcccgctcatcaagtactttgcagaggcactggggcccctgcagagcttccaagcccgacctgatgacctgctcatcaacacctaccccaagtctggcaccacctgggtgagccagatactggacatgatctaccagggcggcgacctagagaagtgtaaccgggctcccatctacgtacgggtgcccttccttgaggtcaatgatccaggggaaccctcaggtggtctatgttgcccgaaacccaaaggacgtggcggtctcctactaccatttccaccgtatggaaaaggcgcaccctgagcctgggacctgggacagcttcctggaaaagttcatggctggagaagtgtcctacgggtcctggtaccagcacgtgcaggagtggtgggagctgagccgcacccaccctgttctctacctcttctatgaagacatgaaggaggtgagaccgactgtgatgcttccccccatgtgacacctgggggcaggcacctcacagggacccaccaaggccacccagccccgtccctgggcggctcccacagcaagcccggattccccatcctacctccctggcccaggcccccccactgcagccccacctggcagcaggctcggcacagctttcatcttctgcacctgagtcagctgcatgggtggccacggatcagatacttagtcctattgcttatcctcaccaaagggtgtgccacccagggccacagtcatggaagaagaccatcccggtcctcacccataggcgccaagccctgttcatgatgggatcacagggcagagatcaattcattttactccagagactagggccccaggggttgaggctctttggggtttctaggggaagtggccagatcccctctgaggttagagagggggacccgttttgttttgctccactgaggagccctctgctgctcagaaccccaaaagggagattcaaaagatcctggagtttgtggggcgctccctgccagaggagaccatggacttcatggttcagcacacgtcgttcaaggagatgaagaagaaccctatgaccaactacaccaccgtcccccaggagctcatggaccacagcatctcccccttcatgaggaaaggcatggctggggactggaagaccaccttcaccgtggcgcagaatgagcgcttcgatgcggactatgcggagaagatggcaggctgcagcctcagcttccgctctgagctgtgagaggggctcctggagtcactgcagagggagtgtgcgaatctaccctgaccaatgggctcaagaataaagtatgatttttgagtcaggcacagtggctcatgtctgcaatcccagcgatttgggaggttgagctggtaggatcacaataggccacgaatttgagaccagcctggtaaaatagtgagacctcatctctacaaagatgtaaaaaaattagccacatgtgctggcacttacctgtagtcccagctacttgggaagcagaggctggaggatcatttcagcccaggaggttgtggatacagtgagttatgacatgcccattcactacagcctggatgacaagcaagaccctccctccaaagaaaataaagctcaattaaaataaaa

SEQ ID NO: 425214 - DNA, 830 bp, Homo sapiens
  misc_feature (12)..(12): n is a, c, g, or t
  misc_feature (43)..(43): n is a, c, g, or t
aagaaaaaaaanaaactatgctagggtacgagtgctgcgtgtnaatcggccgaggtcggacttctacacccgcctccagacaggagaggggcacgtaccggcgctacggcttcctgcaggctgcctccggatagtccccgagagcttgttccgaagcaagcaccctgcagccctagcgatccagccctcccctggaccctaggtcacggcaatcaaccccctgctgtggttcccgaaccccaaggcccgatgggtcccgcgggggtcgcggcgaggccagggcgctttttcggcgtctacctgctctactgcctgaacccccggtaccggggccgcgtctacgtggggttcactgtcaacactgctcgtcgggtccagcagcacaatgggggccgcaaaaaaggcggggcctggcggaccagcgggcgagggccctgggagatggtgctcgtcgtgcacggcttcccgtcctccgtggccgcccttcgggatgaagaggggcccttgtgttgcccccaccctggctgcctgctaagggcccatgtgatctgcctggcagaggagtttcttcaggaagaaccagggcagcttctgcccctagagggccaatgcccttgctgtgagaagtcactgctttggggagacctgatctggctgtgccagatggacactgagaaagaagtagaagactcagaattagaagaggcacactggacagacctgctggagacctgatcctcagtgtccttaccccctcctacctcttttctgtgccacctgctgtgggtccagcaggtttttacttgagtacaataaaaagtctgagtcaa

SEQ ID NO: 425215 - DNA, 413 bp, Homo sapiens
gcggccgctccaacatcagaatggtctggttgcacagggagcagcaggcccctggatccccagaccatccaggatgaagaggggcccttgtgttgcccccaccctggctgcctgctaagggcccatgtgatctgcctggcagaggagtttcttcaggaagaaccagggcagcttctgcccctagagggccaatgcccttgctgtgagaagtcactgctttggggagacctgatctggctgtgccagatggacactgagaaagaagtagaagactcagaattagaagaggcacactggacagacctgctggagacctgatcctcagtgtccttaccccctcctacctcttttctgtgccacctgctgtgggtccagcaggtttttacttgagtacaataaaaagtctgagtcaa

SEQ ID NO: 425216 - DNA, 228 bp, Homo sapiens
atggagctgatccaggacacctcccgcccgccactggagtacgtgaagggggtcccgctcatcaagtactttgcagaggcactggggcccctgcagagcttccaagcccgacctgatgacctgctcatcaacacctaccccaagtctggtaagtgaggagggccacccaccctctcccaggcggcagtccccaccttggtcagcaaggtcgtgccctcagcctgctca

SEQ ID NO: 425217 - DNA, 553 bp, Homo sapiens
  misc_feature (537)..(537): n is a, c, g, or t
aaccctttatcaggacctgctgctgactatttgttgaagtttgccatatcttttgactttgtaaaaacttttggcatatgagttgtatatttcatgtagtcaaacagtaatcttttcctttatggattccaatttttaaatggtttatatttttagctaaattttcaggagtgaaaagaaaaagaggaaggaagaaacccctctcaggcaatcatgtacagccacccgaaacaatgaaatgtaatacattcataagacaagtgaaagaagagcatggcagacacacagatgcaactgtgaaagttccttttcttaagaaatgcaaggaagcaggacttcttaattacttacttgaagaaatattagacaaagttcattcaattccagaaaaactcatggatgagactacttcagaatcagactatgaagaaatcgggagtgcactttttgactgtagattgttcgaagacacatttgtaaattttcaagcagcaatagagaaaaaaattcatgcatctcaacaaatagtcagcagcnggggatcccctagagg

SEQ ID NO: 425218 - DNA, 1368 bp, Homo sapiens
agctggggcacttccgggatctcgctatccggccgccacccgcagctgcagcacagtcatggcccaggcgtcggccgccccggcccgagagggtgctcggcgccagcagcccggaggcccggcccgcgcaggaggcgctcctccttcccaccggtgtctttcaggttgcagaaaagatggaaaaaaggacatgtgcactctgccccaaagatgtcgaatataatgtcctgtactttgcacaatcagagaatatagctgctcatgagaattgtttgctgtattcttcaggacttgtggaatgtgaggatcaggatccacttaatcctgatagaagttttgatgtggaatcagtaaagaaagaaatccagagaggaaggaagttgaaatgcaaattttgtcataaaagaggagccaccgtgggatgtgatttaaaaaactgtaacaagaattaccactttttctgtgccaagaaggacgacgcagttccacagtctgatggagttcgaggaatttataaactgctttgccagcaacatgctcaattcccgatcatcgctcaaagtgagctaaattttcaggagtgaaaagaaaaagaggaaggaagaaacccctctcaggcaatcatgtacagccacccgaaacaatgaaatgtaatacattcataagacaagtgaaagaagagcatggcagacacacagatgcaactgtgaaagttccttttcttaagaaatgcaaggaagcaggacttcttaattacttacttgaagaaatattagacaaagttcattcaattccagaaaaactcatggatgagactacttcagaatcagactatgaagaaatcgggagtgcactttttgactgtagattgttcgaagacacatttgtaaattttcaagcagcaatagagaaaaaaattcatgcatctcaacaaaggtggcagcagttgaaggaagagattgagctacttcaggacttaaaacaaaccttgtgctcttttcaagaaaatagagatcttatgtcaagttctacatcaatatcatccctgtcttattagggattaccatttcctaagccaagagtcatgtcaaattgcaatcaggctcaaaaccagagaccaggctgtgaaatccacacatctttagaactagtcgtctcctcttggcctcagcagctcttccctgttcttactggttgacattttgatcactctttgcacactcttgtgttttttgctcactgtcacactcccagcacctagtatgctcagtaaatgtttgtggaataagtgcataaaatgttcttaacctttgattctacttacagcccatgatagcctcttagatataataaatttggattatacta

SEQ ID NO: 425219 - DNA, 667 bp, Homo sapiens
aaccctttatcaggacctgctgctgactatttgttgaagtttgccatatcttttgactttgtaaaaacttttggcatatgagttgtatatttcatgtagtcaaacagtaatcttttcctttatggattccaatttttaaatggtttatatttttagctaaattttcaggagtgaaaagaaaaagaggaaggaagaaacccctctcaggcaatcatgtacagccacccgaaacaatgaaatgtaatacattcataagacaagtgaaagaagagcatggcagacacacagatgcaactgtgaaagttccttttcttaagaaatgcaaggaagcaggacttcttaattacttacttgaagaaatattagacaaagttcattcaattccagaaaaactcatggatgagactacttcagaatcagactatgaagaaatcgggagtgcactttttgactgtagattgttcgaagacacatttgtaaattttcaagcagcaatagagaaatataacatctgagcagcatagttttgagaaatatttatcacgatattgaaacaatatactgtacaggtgataaaaatattttagaagaatgttcattgttttcttaaatgagaaaagccaattacaaaaacagtatgaccccgcccacctgcccacacacacag

SEQ ID NO: 425220 - DNA, 685 bp, Homo sapiens
gcaggacttcttaattacttaattgaatgaactttgtctaatatttcttcaagtaagtaattaagaagtcctgcttacttgaagaaatattagacaaagttcattcaattccagaaaaactcatggatgagactacttcagaatcagactatgaagaaatcgggagtgcactttttgactgtagattgttcgaagacacatttgtaaattttcaagcagcaatagagaaaaaaattcatgcatctcaacaaaggtggcagcagttgaaggaagagattgagctacttcaggacttaaaacaaaccttgtgctcttttcaagaaaatagagatcttatgtcaagttctacatcaatatcatccctgtcttattagggattaccatttcctaagccaagagtcatgtcaaattgcaatcaggctcaaaaccagagaccaggctgtgaaatccacacatctttagaactagtcgtctcctcttggcctcagcagctcttccctgttcttactggttgacattttgatcactctttgcacactcttgtgttttttgctcactgtcacactcccagcacctagtatgctcagtaaatgtttgtggaataagtgcataaaatgttcttaacctttgattctacttacagcccatgatagcctcttagatataataaatttggattatacta

SEQ ID NO: 425221 - DNA, 530 bp, Homo sapiens
aaccctttatcaggacctgctgctgactatttgttgaagtttgccatatcttttgactttgtaaaaacttttggcatatgagttgtatatttcatgtagtcaaacagtaatcttttcctttatggattccaatttttaaatggtttatatttttagctaaattttcaggagtgaaaagaaaaagaggaaggaagaaacccctctcaggcaatcatgtacagccacccgaaacaatgaaatgtaatacattcataagacaagtgaaagaagagcatggcagacacacagatgcaactgtgaaagttccttttcttaagaaatgcaaggaagcaggacttcttaattacttacttgaagaaatattagacaaagttcattcaattccagaaaaactcatggatgagactacttcagaatcagactatgaagcaactcgggagtgcacttttcgactgtgacgattgtctaggacgactagtccgttcgttattacactaacagcaatggagaagcaatggtcaggtcagttt

SEQ ID NO: 425222 - DNA, 593 bp, Homo sapiens
agctggggcacttccgggatctcgctatccggccgccacccgcagctgcagcacagtcatggcccaggcgtcggccgccccggcccgagagggtgctcggcgccagcagcccggaggcccggcccgcgcaggaggcgctcctccttcccaccggtgtctttcaggttgcagaaaagatggaaaaaaggacatgtgcactctgccccaaagatgtcgaatataatgtcctgtactttgcacaatcagagaatatagctgctcatgagaattgtttgctgtattcttcaggacttgtggaatgtgaggatcaggatccacttaatcctgatagaagttttgatgtggaatcagtaaagaaagaaatccagagaggaaggaagttgaaatgcaaattttgtcataaaagaggagccaccgtgggatgtgatttaaaaaactgtaacaagaattaccactttttctgtgccaagaaggacgacgcagttccacagtctgatggagttcgaggaatttataagtatttaataaaacatttttaaaaccacatttgggggattgggataaggaatggttggattaagacaaggagactt

SEQ ID NO: 425223 - DNA, 1273 bp, Homo sapiens
aaccctttatcaggacctgctgctgactatttgttgaagtttgccatatcttttgactttgtaaaaacttttggcatatgagttgtatatttcatgtagtcaaacagtaatcttttcctttatggattccaatttttaaatggtttatatttttagctaaattttcaggagtgaaaagaaaaagaggaaggaagaaacccctctcaggcaatcatgtacagccacccgaaacaatgaaatgtaatacattcataagacaagtgaaagaagagcatggcagacacacagatgcaactgtgaaagttccttttcttaagaaatgcaaggaagcaggacttcttaattacttacttgaagaaatattagacaaagttcattcaattccagaaaaactcatggatgagactacttcagaatcagactatgaagaaatcgggagtgcactttttgactgtagattgttcgaagacacatttgtaaattttcaagcagcaatagagaaaaaaattcatgcatctcaacaaaggtggcagcagttgaaggaagagattgagctacttcaggacttaaaacaaaccttgtgctcttttcaagaaaatagagatcttatgtcaagttctacatcaatatcatccctgtcttattagggattaccatttcctaagccaagagtcatgtcaaattgcaatcaggctcaaaaccagagaccaggctgtgaaatccacacatctttagaactagtcgtctcctcttggcctcagcagctcttccctgttcttactggttgacattttgatcactctttgcacactcttgtgttttttgctcactgtcacactcccagcacctagtatgctcagtaaatgtttgtggaataagtgcataaaatgttcttaacctttgattctacttacagcccatgatagcctcttagatataataaatttggattatactaaaaaaaaacaagaaaaaaaacaaactcgggactaaaaaacggagtgagaaaaaagggcaggaagacacaaattgacaacaacagtaacagagacacgaaacatcgacacaagagacaaaagcgggacccataaggaacggataaactagaaacaccgggtaacggtaagaacgacgacacaaacagaagaggaacacaccaaacaacgagagacaacaaacaaagacgaaaagaacgatacaaaacacaccaaaacccagagaggtcagcgaacatgaacacgaataaaagaagacaaaaacaacaaacaagaga

SEQ ID NO: 425224 - DNA, 1786 bp, Homo sapiens
ggtgggcacgcttcggtttacctcccccgcgggtgacagcccagtgcttccaccacaaccgatgtcaactctcctagcgcccctccgctcaccgggcaagactcagccaaaggtggaaaagttgaaggggtgttcccagcagagaggatgacacaaaggcaccaaaccacaaaacgtcacacgtaaacatcatacgtggcaaccacaagccaatcagttggatatttcattcattggtatacatatggactgtaaggtgtctttcaggttgcagaaaagatggaaaaaaggacatgtgcactctgccccaaagatgtcgaatataatgtcctgtactttgcacaatcagagaatatagctgctcatgagaattgtttgctgtattcttcaggacttgtggaatgtgaggatcaggatccacttaatcctgatagaagttttgatgtggaatcagtaaagaaagaaatccagagaggaaggaagttgaaatgcaaattttgtcataaaagaggagccaccgtgggatgtgatttaaaaaactgtaacaagaattaccactttttctgtgccaagaaggacgacgcagttccacagtctgatggagttcgaggaatttataaactgctttgccagcaacatgctcaattcccgatcatcgctcaaagtgagctaaattttcaggagtgaaaagaaaaagaggaaggaagaaacccctctcaggcaatcatgtacagccacccgaaacaatgaaatgtaatacattcataagacaagtgaaagaagagcatggcagacacacagatgcaactgtgaaagttccttttcttaagaaatgcaaggaagcaggacttcttaattacttacttgaagaaatattagacaaagttcattcaattccagaaaaactcatggatgagactacttcagaatcagactatgaagaaatcgggagtgcactttttgactgtagattgttcgaagacacatttgtaaattttcaagcagcaatagagaaaaaaattcatgcatctcaacaaaggtggcagcagttgaaggaagagattgagctacttcaggacttaaaacaaaccttgtgctcttttcaagaaaatagagatcttatgtcaagttctacatcaatatcatccctgtcttattagggattaccatttcctaagccaagagtcatgtcaaattgcaatcaggctcaaaaccagagaccaggctgtgaaatccacacatctttagaactagtcgtctcctcttggcctcagcagctcttccctgttcttactggttgacattttgatcactctttgcacactcttgtgttttttgctcactgtcacactcccagcacctagtatgctcagtaaatgtttgtggaataagtgcataaaatgttcttaacctttgattctacttacagcccatgatagcctcttagatataataaatttggattatactaaaaaaaaacaagaaaaaaaacaaactcgggactaaaaaacggagtgagaaaaaagggcaggaagacacaaattgacaacaacagtaacagagacacgaaacatcgacacaagagacaaaagcgggacccataaggaacggataaactagaaacaccgggtaacggtaagaacgacgacacaaacagaagaggaacacaccaaacaacgagagacaacaaacaaagacgaaaagaacgatacaaaacacaccaaaacccagagaggtcagcgaacatgaacacgaataaaagaagacaaaaacaacaaacaagaga

SEQ ID NO: 425225 - DNA, 1246 bp, Homo sapiens
agctggggcacttccgggatctcgctatccggccgccacccgcagctgcagcacagtcatggcccaggcgtcggccgccccggcccgagagggtgctcggcgccagcagcccggaggcccggcccgcgcaggaggcgctcctccttcccaccgctgtattcttcaggacttgtggaatgtgaggatcaggatccacttaatcctgatagaagttttgatgtggaatcagtaaagaaagaaatccagagaggaaggaagttgaaatgcaaattttgtcataaaagaggagccaccgtgggatgtgatttaaaaaactgtaacaagaattaccactttttctgtgccaagaaggacgacgcagttccacagtctgatggagttcgaggaatttataaactgctttgccagcaacatgctcaattcccgatcatcgctcaaagtgagctaaattttcaggagtgaaaagaaaaagaggaaggaagaaacccctctcaggcaatcatgtacagccacccgaaacaatgaaatgtaatacattcataagacaagtgaaagaagagcatggcagacacacagatgcaactgtgaaagttccttttcttaagaaatgcaaggaagcaggacttcttaattacttacttgaagaaatattagacaaagttcattcaattccagaaaaactcatggatgagactacttcagaatcagactatgaagaaatcgggagtgcactttttgactgtagattgttcgaagacacatttgtaaattttcaagcagcaatagagaaaaaaattcatgcatctcaacaaaggtggcagcagttgaaggaagagattgagctacttcaggacttaaaacaaaccttgtgctcttttcaagaaaatagagatcttatgtcaagttctacatcaatatcatccctgtcttattagggattaccatttcctaagccaagagtcatgtcaaattgcaatcaggctcaaaaccagagaccaggctgtgaaatccacacatctttagaactagtcgtctcctcttggcctcagcagctcttccctgttcttactggttgacattttgatcactctttgcacactcttgtgttttttgctcactgtcacactcccagcacctagtatgctcagtaaatgtttgtggaataagtgcataaaatgttcttaacctttgattctacttacagcccatgatagcctcttagatataataaatttggattatacta

SEQ ID NO: 425226 - DNA, 1501 bp, Homo sapiens
ggtgggcacgcttcggtttacctcccccgcgggtgacagcccagtgcttccaccacaaccgatgtcaactctcctagcgcccctccgctcaccggtaaaccaggacagtggaggggcgccctgatgcggtgaggcagggggcggccctgagggaagagctgggtctcacgttcacggaggacgtgactggaacccgtctccccttctccagtcgttccagtcctccccggccctctacttgagtggggcaagactcagccaaaggtggaaaagttgaaggggtgttcccagcagagaggatgacacaaaggcaccaaaccacaaaacgtcacacgtaaacatcatacgtggcaaccacaagccaatcagttggatatttcattcattggtatacatatggactgtaagctgtattcttcaggacttgtggaatgtgaggatcaggatccacttaatcctgatagaagttttgatgtggaatcagtaaagaaagaaatccagagaggaaggaagttgaaatgcaaattttgtcataaaagaggagccaccgtgggatgtgatttaaaaaactgtaacaagaattaccactttttctgtgccaagaaggacgacgcagttccacagtctgatggagttcgaggaatttataaactgctttgccagcaacatgctcaattcccgatcatcgctcaaagtgagctaaattttcaggagtgaaaagaaaaagaggaaggaagaaacccctctcaggcaatcatgtacagccacccgaaacaatgaaatgtaatacattcataagacaagtgaaagaagagcatggcagacacacagatgcaactgtgaaagttccttttcttaagaaatgcaaggaagcaggacttcttaattacttacttgaagaaatattagacaaagttcattcaattccagaaaaactcatggatgagactacttcagaatcagactatgaagaaatcgggagtgcactttttgactgtagattgttcgaagacacatttgtaaattttcaagcagcaatagagaaaaaaattcatgcatctcaacaaaggtggcagcagttgaaggaagagattgagctacttcaggacttaaaacaaaccttgtgctcttttcaagaaaatagagatcttatgtcaagttctacatcaatatcatccctgtcttattagggattaccatttcctaagccaagagtcatgtcaaattgcaatcaggctcaaaaccagagaccaggctgtgaaatccacacatctttagaactagtcgtctcctcttggcctcagcagctcttccctgttcttactggttgacattttgatcactctttgcacactcttgtgttttttgctcactgtcacactcccagcacctagtatgctcagtaaatgtttgtggaataagtgcataaaatgttcttaacctttgattctacttacagcccatgatagcctcttagatataataaatttggattatacta

SEQ ID NO: 425227 - DNA, 1801 bp, Homo sapiens
aaccctttatcaggacctgctgctgactatttgttgaagtttgccatatcttttgactttgtaaaaacttttggcatatgagttgtatatttcatgtagtcaaacagtaatcttttcctttatggattccaatttttaaatggtttatatttttagctaaattttcaggagtgaaaagaaaaagaggaaggaagaaacccctctcaggcaatcatgtacagccacccgaaacaatgaaatgtaatacattcataagacaagtgaaagaagagcatggcagacacacaggtttgcgctaagtgttgtctgtaacaaatatggcctacaatacttataaaaatgtcaacccacctgtttcaaacttggtatcccgcctaaatctttattcttctaggcttgtggtaattaatgagtataaatctttatcgcaactgtccactctattgtaatcccagcatatcaagataacttaggttggaatggtccattgcattcagtattaagaaaagatagacttctattaataaagacacagacaggcttgcctgagctcagaatccagcaatgtgtcacccctcacactgtgacccctgtaactgtagttctctgttctttaaagaaatagacattccactaacaacacatacaaactgtgacaagaagtgacaggggctgttatgtcaaagacttaagggtaatttttaaaaatcctcttaattcaactacatatcgggtacagtgtacactgctcaggtgacaggtgcaccaacatctcagaaatcaccactgaagaacttatccatgtaacctgaaaccacctgttccccaaaaggtattgaaatttaaaaagttacagttttatatgtttaaaaaagcctcttaattcatatagttattgtaagcagagaaattttcatttttactttttgtaacattttattcattgtttcagctggccaaaaaaaatgaggtatgatgaaattataattaataaaaagggtgaaggtgctgtattattttactaagtatgtgcatccaccactaggcaaggtctgaagaaataagcataaagtaatttatgattagctgccctaagactatttccttctcaaatgtttgtcttattcttagatgcaactgtgaaagttccttttcttaagaaatgcaaggaagcaggacttcttaattacttacttgaagaaatattagacaaagttcattcaattccagaaaaactcatggatgagactacttcagaatcagactatgaagaaatcgggagtgcactttttgactgtagattgttcgaagacacatttgtaaattttcaagcagcaatagagaaaaaaattcatgcatctcaacaaaggtggcagcagttgaaggaagagattgagctacttcaggacttaaaacaaaccttgtgctcttttcaagaaaatagagatcttatgtcaagttctacatcaatatcatccctgtcttattagggattaccatttcctaagccaagagtcatgtcaaattgcaatcaggctcaaaaccagagaccaggctgtgaaatccacacatctttagaactagtcgtctcctcttggcctcagcagctcttccctgttcttactggttgacattttgatcactctttgcacactcttgtgttttttgctcactgtcacactcccagcacctagtatgctcagtaaatgtttgtggaataagtgcataaaatgttcttaacctttgattctacttacagcccatgatagcctcttagatataataaatttggattatacta

SEQ ID NO: 425228 - DNA, 1123 bp, Homo sapiens
aaccctttatcaggacctgctgctgactatttgttgaagtttgccatatcttttgactttgtaaaaacttttggcatatgagttgtatatttcatgtagtcaaacagtaatcttttcctttatggattccaatttttaaatggtttatatttttagctaaattttcaggagtgaaaagaaaaagaggaaggaagaaacccctctcaggcaatcatgtacagccacccgaaacaatgaaatgtaatacattcataagacaagtgaaagaagagcatggcagacacacagatgcaactgtgaaagttccttttcttaagaaatgcaaggaagcaggacttcttaattacttacttgaagaaatattagacaaagttcattcaattccagaaaaactcatggatgagactacttcagaatcagaccaagcacttcccaaacagtgtgcctgagaaccacctgtagggctggtgaggacacagatagctgggcctatcccacagagattctgattcagtacaaataccaagaattgggggccaggcgcggtggctcacgcctgtaatcccagcactttgggagcccgagactatgaagaaatcgggagtgcactttttgactgtagattgttcgaagacacatttgtaaattttcaagcagcaatagagaaaaaaattcatgcatctcaacaaaggtggcagcagttgaaggaagagattgagctacttcaggacttaaaacaaaccttgtgctcttttcaagaaaatagagatcttatgtcaagttctacatcaatatcatccctgtcttattagggattaccatttcctaagccaagagtcatgtcaaattgcaatcaggctcaaaaccagagaccaggctgtgaaatccacacatctttagaactagtcgtctcctcttggcctcagcagctcttccctgttcttactggttgacattttgatcactctttgcacactcttgtgttttttgctcactgtcacactcccagcacctagtatgctcagtaaatgtttgtggaataagtgcataaaatgttcttaacctttgattctacttacagcccatgatagcctcttagatataataaatttggattatacta

SEQ ID NO: 425229 - DNA, 2855 bp, Homo sapiens
cgcctcggcctcccaaaatgctgggattacaggcatgagccaccgtgcccggcctcacttcatttcttcatcatagcctgctatgctgctgctttctcttggaagatactaatcagttctaggccctttgtaggtcaaatctaagatctggggcaaatacctgttttcatcgaaaatgactttttccttaaattaatgcttgcaattttgtgctatttattgttgaaaaccagcagaatcttgtacagtcagatggaaatctgcatgtcttagattgtggatctttaggtatctttatacagtaaaatctcactgaccactgtatatgaactagtattgttcataatacttcatcagtactcattccttgaaagaacataatcatcttcctaagtccctgagggcataaaagacatctaactgagtctccatctgcactcagtgtgggtcactaattttacacagggcttcaaaaaaaaaaactttagtgtgacgccgtcatgaaaagtaggttggtacgtttttaatcacaaaaatagacataatatttgaaacctgtaaataaaaatattttacaattctttgaaattaaatatttcagactgctttgccagcaacatgctcaattcccgatcatcgctcaaagtggtaagtttctaaaatttagcactgtgggttttaaagaaaggtaaacatttgtgtaacataaggaatagtctaattttctagcctcgttgaattaaaatacaaatgtttgagttaaaattttacacatctagaaaattgacaacttctttgtgtactatgtgatatgactgactaattttttcttctttatgaacaagacctattctctttgaaccattccctggtatctttcattctccctacgctcacagaaccaaactaagacatgggaaaaagccttgacttttgggactgcttctcttccataagaattttcagtagataaaattttaaaagtgctgcaccttccctgagtgaaaattccctaaggatgcatggttagcatttcagttctaattaaggcagactggatcctggctaactggagtcatggggtatactttcattcatgagtggaacagcagtgtcttagcagcactacatctgcaatgttcattgtgaagtggagtcaggacctcgttggaagacttcgttctgcgtcatgccaactgcattttatgagctaaattttcaggagtgaaaagaaaaagaggaaggaagaaacccctctcaggcaatcatgtacagccacccgaaacaatgaaatgtaatacattcataagacaagtgaaagaagagcatggcagacacacaggtttgcgctaagtgttgtctgtaacaaatatggcctacaatacttataaaaatgtcaacccacctgtttcaaacttggtatcccgcctaaatctttattcttctaggcttgtggtaattaatgagtataaatctttatcgcaactgtccactctattgtaatcccagcatatcaagataacttaggttggaatggtccattgcattcagtattaagaaaagatagacttctattaataaagacacagacaggcttgcctgagctcagaatccagcaatgtgtcacccctcacactgtgacccctgtaactgtagttctctgttctttaaagaaatagacattccactaacaacacatacaaactgtgacaagaagtgacaggggctgttatgtcaaagacttaagggtaatttttaaaaatcctcttaattcaactacatatcgggtacagtgtacactgctcaggtgacaggtgcaccaacatctcagaaatcaccactgaagaacttatccatgtaacctgaaaccacctgttccccaaaaggtattgaaatttaaaaagttacagttttatatgtttaaaaaagcctcttaattcatatagttattgtaagcagagaaattttcatttttactttttgtaacattttattcattgtttcagctggccaaaaaaaatgaggtatgatgaaattataattaataaaaagggtgaaggtgctgtattattttactaagtatgtgcatccaccactaggcaaggtctgaagaaataagcataaagtaatttatgattagctgccctaagactatttccttctcaaatgtttgtcttattcttagatgcaactgtgaaagttccttttcttaagaaatgcaaggaagcaggacttcttaattacttacttgaagaaatattagacaaagttcattcaattccagaaaaactcatggatgagactacttcagaatcagactatgaagaaatcgggagtgcactttttgactgtagattgttcgaagacacatttgtaaattttcaagcagcaatagagaaaaaaattcatgcatctcaacaaaggtggcagcagttgaaggaagagattgagctacttcaggacttaaaacaaaccttgtgctcttttcaagaaaatagagatcttatgtcaagttctacatcaatatcatccctgtcttattagggattaccatttcctaagccaagagtcatgtcaaattgcaatcaggctcaaaaccagagaccaggctgtgaaatccacacatctttagaactagtcgtctcctcttggcctcagcagctcttccctgttcttactggttgacattttgatcactctttgcacactcttgtgttttttgctcactgtcacactcccagcacctagtatgctcagtaaatgtttgtggaataagtgcataaaatgttcttaacctttgattctacttacagcccatgatagcctcttagatataataaatttggattatacta

SEQ ID NO: 425230 - DNA, 2452 bp, Homo sapiens
agctggggcacttccgggatctcgctatccggccgccacccgcagctgcagcacagtcatggcccaggcgtcggccgccccggcccgagagggtgctcggcgccagcagcccggaggcccggcccgcgcaggaggcgctcctccttcccaccgctgtattcttcaggacttgtggaatgtgaggatcaggatccacttaatcctgatagaagttttgatgtggaatcagtaaagaaagaaatccagagaggaaggaagttgaaatgcaaattttgtcataaaagaggagccaccgtgggatgtgatttaaaaaactgtaacaagaattaccactttttctgtgccaagaaggacgacgcagttccacagtctgatggagttcgaggaatttataaactgctttgccagcaacatgctcaattcccgatcatcgctcaaagtgacctattctctttgaaccattccctggtatctttcattctccctacgctcacagaaccaaactaagacatgggaaaaagccttgacttttgggactgcttctcttccataagaattttcagtagataaaattttaaaagtgctgcaccttccctgagtgaaaattccctaaggatgcatggttagcatttcagttctaattaaggcagactggatcctggctaactggagtcatggggtatactttcattcatgagtggaacagcagtgtcttagcagcactacatctgcaatgttcattgtgaagtggagtcaggacctcgttggaagacttcgttctgcgtcatgccaactgcattttatgagctaaattttcaggagtgaaaagaaaaagaggaaggaagaaacccctctcaggcaatcatgtacagccacccgaaacaatgaaatgtaatacattcataagacaagtgaaagaagagcatggcagacacacaggtttgcgctaagtgttgtctgtaacaaatatggcctacaatacttataaaaatgtcaacccacctgtttcaaacttggtatcccgcctaaatctttattcttctaggcttgtggtaattaatgagtataaatctttatcgcaactgtccactctattgtaatcccagcatatcaagataacttaggttggaatggtccattgcattcagtattaagaaaagatagacttctattaataaagacacagacaggcttgcctgagctcagaatccagcaatgtgtcacccctcacactgtgacccctgtaactgtagttctctgttctttaaagaaatagacattccactaacaacacatacaaactgtgacaagaagtgacaggggctgttatgtcaaagacttaagggtaatttttaaaaatcctcttaattcaactacatatcgggtacagtgtacactgctcaggtgacaggtgcaccaacatctcagaaatcaccactgaagaacttatccatgtaacctgaaaccacctgttccccaaaaggtattgaaatttaaaaagttacagttttatatgtttaaaaaagcctcttaattcatatagttattgtaagcagagaaattttcatttttactttttgtaacattttattcattgtttcagctggccaaaaaaaatgaggtatgatgaaattataattaataaaaagggtgaaggtgctgtattattttactaagtatgtgcatccaccactaggcaaggtctgaagaaataagcataaagtaatttatgattagctgccctaagactatttccttctcaaatgtttgtcttattcttagatgcaactgtgaaagttccttttcttaagaaatgcaaggaagcaggacttcttaattacttacttgaagaaatattagacaaagttcattcaattccagaaaaactcatggatgagactacttcagaatcagactatgaagaaatcgggagtgcactttttgactgtagattgttcgaagacacatttgtaaattttcaagcagcaatagagaaaaaaattcatgcatctcaacaaaggtggcagcagttgaaggaagagattgagctacttcaggacttaaaacaaaccttgtgctcttttcaagaaaatagagatcttatgtcaagttctacatcaatatcatccctgtcttattagggattaccatttcctaagccaagagtcatgtcaaattgcaatcaggctcaaaaccagagaccaggctgtgaaatccacacatctttagaactagtcgtctcctcttggcctcagcagctcttccctgttcttactggttgacattttgatcactctttgcacactcttgtgttttttgctcactgtcacactcccagcacctagtatgctcagtaaatgtttgtggaataagtgcataaaatgttcttaacctttgattctacttacagcccatgatagcctcttagatataataaatttggattatacta

SEQ ID NO: 425231 - DNA, 936 bp, Homo sapiens
ctatttgttgatttttcatcatatgattttttagtgtctctttttctctccctattgtaacagctaatagagaagccaatgtactatttgaagtattatttgatgaagaatttcctggagggttaacaataaagctaaattttcaggagtgaaaagaaaaagaggaaggaagaaacccctctcaggcaatcatgtacagccacccgaaacaatgaaatgtaatacattcataagacaagtgaaagaagagcatggcagacacacagatgcaactgtgaaagttccttttcttaagaaatgcaaggaagcaggacttcttaattacttacttgaagaaatattagacaaagttcattcaattccagaaaaactcatggatgagactacttcagaatcagactatgaagaaatcgggagtgcactttttgactgtagattgttcgaagacacatttgtaaattttcaagcagcaatagagaaaaaaattcatgcatctcaacaaaggtggcagcagttgaaggaagagattgagctacttcaggacttaaaacaaaccttgtgctcttttcaagaaaatagagatcttatgtcaagttctacatcaatatcatccctgtcttattagggattaccatttcctaagccaagagtcatgtcaaattgcaatcaggctcaaaaccagagaccaggctgtgaaatccacacatctttagaactagtcgtctcctcttggcctcagcagctcttccctgttcttactggttgacattttgatcactctttgcacactcttgtgttttttgctcactgtcacactcccagcacctagtatgctcagtaaatgtttgtggaataagtgcataaaatgttcttaacctttgattctacttacagcccatgatagcctcttagatataataaatttggattatacta

SEQ ID NO: 425232 - DNA, 1682 bp, Homo sapiens
ttttactgtaggcatatcatttagttatgcacagcaaaagactggttttcattttatgcaatattaaaatcaatgtaatgcaatcttgattttctctcctagccacccgaaacaatgaaatgtaatacattcataagacaagtgaaagaagagcatggcagacacacaggtttgcgctaagtgttgtctgtaacaaatatggcctacaatacttataaaaatgtcaacccacctgtttcaaacttggtatcccgcctaaatctttattcttctaggcttgtggtaattaatgagtataaatctttatcgcaactgtccactctattgtaatcccagcatatcaagataacttaggttggaatggtccattgcattcagtattaagaaaagatagacttctattaataaagacacagacaggcttgcctgagctcagaatccagcaatgtgtcacccctcacactgtgacccctgtaactgtagttctctgttctttaaagaaatagacattccactaacaacacatacaaactgtgacaagaagtgacaggggctgttatgtcaaagacttaagggtaatttttaaaaatcctcttaattcaactacatatcgggtacagtgtacactgctcaggtgacaggtgcaccaacatctcagaaatcaccactgaagaacttatccatgtaacctgaaaccacctgttccccaaaaggtattgaaatttaaaaagttacagttttatatgtttaaaaaagcctcttaattcatatagttattgtaagcagagaaattttcatttttactttttgtaacattttattcattgtttcagctggccaaaaaaaatgaggtatgatgaaattataattaataaaaagggtgaaggtgctgtattattttactaagtatgtgcatccaccactaggcaaggtctgaagaaataagcataaagtaatttatgattagctgccctaagactatttccttctcaaatgtttgtcttattcttagatgcaactgtgaaagttccttttcttaagaaatgcaaggaagcaggacttcttaattacttacttgaagaaatattagacaaagttcattcaattccagaaaaactcatggatgagactacttcagaatcagactatgaagaaatcgggagtgcactttttgactgtagattgttcgaagacacatttgtaaattttcaagcagcaatagagaaaaaaattcatgcatctcaacaaaggtggcagcagttgaaggaagagattgagctacttcaggacttaaaacaaaccttgtgctcttttcaagaaaatagagatcttatgtcaagttctacatcaatatcatccctgtcttattagggattaccatttcctaagccaagagtcatgtcaaattgcaatcaggctcaaaaccagagaccaggctgtgaaatccacacatctttagaactagtcgtctcctcttggcctcagcagctcttccctgttcttactggttgacattttgatcactctttgcacactcttgtgttttttgctcactgtcacactcccagcacctagtatgctcagtaaatgtttgtggaataagtgcataaaatgttcttaacctttgattctacttacagcccatgatagcctcttagatataataaatttggattatacta

SEQ ID NO: 425233 - DNA, 839 bp, Homo sapiens
ttttactgtaggcatatcatttagttatgcacagcaaaagactggttttcattttatgcaatattaaaatcaatgtaatgcaatcttgattttctctcctagccacccgaaacaatgaaatgtaatacattcataagacaagtgaaagaagagcatggcagacacacagatgcaactgtgaaagttccttttcttaagaaatgcaaggaagcaggacttcttaattacttacttgaagaaatattagacaaagttcattcaattccagaaaaactcatggatgagactacttcagaatcagactatgaagaaatcgggagtgcactttttgactgtagattgttcgaagacacatttgtaaattttcaagcagcaatagagaaaaaaattcatgcatctcaacaaaggtggcagcagttgaaggaagagattgagctacttcaggacttaaaacaaaccttgtgctcttttcaagaaaatagagatcttatgtcaagttctacatcaatatcatccctgtcttattagggattaccatttcctaagccaagagtcatgtcaaattgcaatcaggctcaaaaccagagaccaggctgtgaaatccacacatctttagaactagtcgtctcctcttggcctcagcagctcttccctgttcttactggttgacattttgatcactctttgcacactcttgtgttttttgctcactgtcacactcccagcacctagtatgctcagtaaatgtttgtggaataagtgcataaaatgttcttaacctttgattctacttacagcccatgatagcctcttagatataataaatttggattatacta

SEQ ID NO: 425234 - DNA, 891 bp, Homo sapiens
aaccctttatcaggacctgctgctgactatttgttgaagtttgccatatcttttgactttgtaaaaacttttggcatatgagttgtatatttcatgtagtcaaacagtaatcttttcctttatggattccaatttttaaatggtttatatttttagctaaattttcaggagtgaaaagaaaaagaggaaggaagaaacccctctcaggcaatcatgtacagatgcaactgtgaaagttccttttcttaagaaatgcaaggaagcaggacttcttaattacttacttgaagaaatattagacaaagttcattcaattccagaaaaactcatggatgagactacttcagaatcagactatgaagaaatcgggagtgcactttttgactgtagattgttcgaagacacatttgtaaattttcaagcagcaatagagaaaaaaattcatgcatctcaacaaaggtggcagcagttgaaggaagagattgagctacttcaggacttaaaacaaaccttgtgctcttttcaagaaaatagagatcttatgtcaagttctacatcaatatcatccctgtcttattagggattaccatttcctaagccaagagtcatgtcaaattgcaatcaggctcaaaaccagagaccaggctgtgaaatccacacatctttagaactagtcgtctcctcttggcctcagcagctcttccctgttcttactggttgacattttgatcactctttgcacactcttgtgttttttgctcactgtcacactcccagcacctagtatgctcagtaaatgtttgtggaataagtgcataaaatgttcttaacctttgattctacttacagcccatgatagcctcttagatataataaatttggattatacta

SEQ ID NO: 425235 - DNA, 718 bp, Homo sapiens
  misc_feature (702)..(702): n is a, c, g, or t
aaccctttatcaggacctgctgctgactatttgttgaagtttgccatatcttttgactttgtaaaaacttttggcatatgagttgtatatttcatgtagtcaaacagtaatcttttcctttatggattccaatttttaaatggtttatatttttagctaaattttcaggagtgaaaagaaaaagaggaaggaagaaacccctctcaggcaatcatgtacagccacccgaaacaatgaaatgtaatacattcataagacaagtgaaagaagagcatggcagacacacagatgcaactgtgaaagttccttttcttaagaaatgcaaggaagcaggacttcttaattacttacttgaagaaatattagacaaagttcattcaattccagaaaaactcatggatgagactacttcagaatcagaccaagcacttcccaaacagtgtgcctgagaaccacctgtagggctggtgaggacacagatagctgggcctatcccacagagattctgattcagtacaaataccaagaattgggggccaggcgcggtggctcacgcctgtaatcccagcactttgggagcccgagactatgaagaaatcgggagtgcactttttgactgtagattgttcgaagacacatttgtaaattttcaagcagcaatagagaaaaaaattcatgcatctcaacaaatagtcagcagcnggggatcccctagagg

SEQ ID NO: 425236 - DNA, 1580 bp, Homo sapiens
cgcctcggcctcccaaaatgctgggattacaggcatgagccaccgtgcccggcctcacttcatttcttcatcatagcctgctatgctgctgctttctcttggaagatactaatcagttctaggccctttgtaggtcaaatctaagatctggggcaaatacctgttttcatcgaaaatgactttttccttaaattaatgcttgcaattttgtgctatttattgttgaaaaccagcagaatcttgtacagtcagatggaaatctgcatgtcttagattgtggatctttaggtatctttatacagtaaaatctcactgaccactgtatatgaactagtattgttcataatacttcatcagtactcattccttgaaagaacataatcatcttcctaagtccctgagggcataaaagacatctaactgagtctccatctgcactcagtgtgggtcactaattttacacagggcttcaaaaaaaaaaactttagtgtgacgccgtcatgaaaagtaggttggtacgtttttaatcacaaaaatagacataatatttgaaacctgtaaataaaaatattttacaattctttgaaattaaatatttcagactgctttgccagcaacatgctcaattcccgatcatcgctcaaagtggtaagtttctaaaatttagcactgtgggttttaaagaaaggtaaacatttgtgtaacataaggaatagtctaattttctagcctcgttgaattaaaatacaaatgtttgagttaaaattttacacatctagaaaattgacaacttctttgtgtactatgtgatatgactgactaattttttcttctttatgaacaagacctattctctttgaaccattccctggtatctttcattctccctacgctcacagaaccaaactaagacatgggaaaaagccttgacttttgggactgcttctcttccataagaattttcagtagataaaattttaaaagtgctgcaccttccctgagtgaaaattccctaaggatgcatggttagcatttcagttctaattaaggcagactggatcctggctaactggagtcatggggtatactttcattcatgagtggaacagcagtgtcttagcagcactacatctgcaatgttcattgtgaagtggagtcaggacctcgttggaagacttcgttctgcgtcatgccaactgcattttatggtgataacattctccaaatagcacctctacaatcatttttcagtcgttacccttttaactcagcaggaaaggctattacagatacttctttaaatcagtgtttattgacagggaaaagcaccagcaatacacacttaaccaaatccttgcaaatgtcatctattaaatatcttcatccttattagtctgttttactttgaatatcttctgagtgaaattgagtgcattcccatatcttttcaccaattatatttgttttcctatgacccaatttgttcatttttctattcaatgaaccctctccccagagagttccccatgtgccaatttttctactcaattatttacctgttttgcattaaacttataata

SEQ ID NO: 425237 - DNA, 1160 bp, Homo sapiens
ttttactgtaggcatatcatttagttatgcacagcaaaagactggttttcattttatgcaatattaaaatcaatgtaatgcaatcttgattttctctcctagccacccgaaacaatgaaatgtaatacattcataagacaagtgaaagaagagcatggcagacacacagatgcaactgtgaaagttccttttcttaagaaatgcaaggaagcaggacttcttaattacttacttgaagaaatattagacaaagttcattcaattccagaaaaactcatggatgagactacttcagaatcagactatgaagaaatcgggagtgcactttttgactgtagattgttcgaagacacatttgtaaattttcaagcagcattaagatgccctcaagacaggctacacctccacttgtttatgagtctggtctgacttctctatcaaggctgccacacacagctgggcaggccgggcacagagtcaaacagcattggtggatggctccccctgaagttgcacaacagagtgagtgccctccacactctgcatttccacagatgcatctgtctctccagcatatggtaggaagacaataagatttccctgtgaagaaatcattagttcatatccctgtctcaacatacacaacctttctcattttggcttctatattatacatttctatttgaattttttactacatttataaccagcaggaaaaatactttgaaaaatctaccaaaaagagtgtctgtcttaatagtcttttgaggatgtctgctaatatatagcagtatccatatttttttaaagcagccttaaaaatttttttctaaaaagagttattttgtaggggacttccatgtgtgtttttctttcatgtaagggaacatgtcacacatcactacttggatggattaggtgggagtacatatattatagtgtagtatggcgggggtgccactacttagaactgcatgagattcaacttaaaaggcttaagttgggtttcactaccctggttgataaaaacttgcttaatttagccttactcatattttaagttaactatacgtatgcagttattctgaataaagtttgtatatgtgtgtaactgttcgattttgaggcttttaaaaattacattgccattgactactatt

SEQ ID NO: 425238 - DNA, 958 bp, Homo sapiens
aaccctttatcaggacctgctgctgactatttgttgaagtttgccatatcttttgactttgtaaaaacttttggcatatgagttgtatatttcatgtagtcaaacagtaatcttttcctttatggattccaatttttaaatggtttatatttttagctaaattttcaggagtgaaaagaaaaagaggaaggaagaaacccctctcaggcaatcatgtacagccacccgaaacaatgaaatgtaatacattcataagacaagtgaaagaagagcatggcagacacacagatgcaactgtgaaagttccttttcttaagaaatgcaaggaagcaggacttcttaattacttacttgaagaaatattagacaaagttcattcaattccagaaaaactcatggatgagactacttcagaatcagactatgaagaaatcgggagtgcactttttgactgtagattgttcgaagacacatttgtaaattttcaagcagcaatagagaaaaaaattcatgcatctcaacaaaggtggcagcagttgaaggaagagattgagctacttcaggacttaaaacaaaccttgtgctcttttcaagaaaatagagatcttatgtcaagttctacatcaatatcatccctgtcttattagggattaccatttcctaagccaagagtcatgtcaaattgcaatcaggctcaaaaccagagaccaggctgtgaaatccacacatctttagaactagtcgtctcctcttggcctcagcagctcttccctgttcttactggttgacattttgatcactctttgcacactcttgtgttttttgctcactgtcacactcccagcacctagtatgctcagtaaatgtttgtggaataagtgcataaaatgttcttaacctttgattctacttacagcccatgatagcctcttagatataataaatttggattatacta

SEQ ID NO: 425239 - DNA, 1845 bp, Homo sapiens
agctggggcacttccgggatctcgctatccggccgccacccgcagctgcagcacagtcatggcccaggcgtcggccgccccggcccgagagggtgctcggcgccagcagcccggaggcccggcccgcgcaggaggcgctcctccttcccaccgggcaagactcagccaaaggtggaaaagttgaaggggtgttcccagcagagaggatgacacaaaggcaccaaaccacaaaacgtcacacgtaaacatcatacgtggcaaccacaagccaatcagttggatatttcattcattggtatacatatggactgtaaggtgtctttcaggttgcagaaaagatggaaaaaaggacatgtgcactctgccccaaagatgtcgaatataatgtcctgtactttgcacaatcagagaatatagctgctcatgagaattgtttgctgtattcttcaggacttgtggaatgtgaggatcaggatccacttaatcctgatagaagttttgatgtggaatcagtaaagaaagaaatccagagaggaaggaagttgaaatgcaaattttgtcataaaagaggagccaccgtgggatgtgatttaaaaaactgtaacaagaattaccactttttctgtgccaagaaggacgacgcagttccacagtctgatggagttcgaggaatttataaactgctttgccagcaacatgctcaattcccgatcatcgctcaaagtgagctaaattttcaggagtgaaaagaaaaagaggaaggaagaaacccctctcaggcaatcatgtacagccacccgaaacaatgaaatgtaatacattcataagacaagtgaaagaagagcatggcagacacacagatgcaactgtgaaagttccttttcttaagaaatgcaaggaagcaggacttcttaattacttacttgaagaaatattagacaaagttcattcaattccagaaaaactcatggatgagactacttcagaatcagactatgaagaaatcgggagtgcactttttgactgtagattgttcgaagacacatttgtaaattttcaagcagcaatagagaaaaaaattcatgcatctcaacaaaggtggcagcagttgaaggaagagattgagctacttcaggacttaaaacaaaccttgtgctcttttcaagaaaatagagatcttatgtcaagttctacatcaatatcatccctgtcttattagggattaccatttcctaagccaagagtcatgtcaaattgcaatcaggctcaaaaccagagaccaggctgtgaaatccacacatctttagaactagtcgtctcctcttggcctcagcagctcttccctgttcttactggttgacattttgatcactctttgcacactcttgtgttttttgctcactgtcacactcccagcacctagtatgctcagtaaatgtttgtggaataagtgcataaaatgttcttaacctttgattctacttacagcccatgatagcctcttagatataataaatttggattatactaaaaaaaaacaagaaaaaaaacaaactcgggactaaaaaacggagtgagaaaaaagggcaggaagacacaaattgacaacaacagtaacagagacacgaaacatcgacacaagagacaaaagcgggacccataaggaacggataaactagaaacaccgggtaacggtaagaacgacgacacaaacagaagaggaacacaccaaacaacgagagacaacaaacaaagacgaaaagaacgatacaaaacacaccaaaacccagagaggtcagcgaacatgaacacgaataaaagaagacaaaaacaacaaacaagaga

SEQ ID NO: 425240 - DNA, 1084 bp, Homo sapiens
aaccctttatcaggacctgctgctgactatttgttgaagtttgccatatcttttgactttgtaaaaacttttggcatatgagttgtatatttcatgtagtcaaacagtaatcttttcctttatggattccaatttttaaatggtttatatttttagctaaattttcaggagtgaaaagaaaaagaggaaggaagaaacccctctcaggcaatcatgtacagccacccgaaacaatgaaatgtaatacattcataagacaagtgaaagaagagcatggcagacacacagatgcaactgtgaaagttccttttcttaagaaatgcaaggaagcaggacttcttaattacttacttgaagaaatattagacaaagttcattcaattccagaaaaactcatggatgagactacttcagaatcagactatgaagaaatcgggagtgcactttttgactgtagattgttcgaagacacatttgtaaattttcaagcagcaatagagaaaaaaattcatgcatctcaacaaaggtggcagcagttgaaggaagagattgagctacttcaggacttaaaacaaaccttgtgctcttttcaagaaaatagagatcttatgtcaagttctacatcaatatcatccctgtcttattagggattaccatttcctaagccaagagtcatgtcaaattgcaatcaggctcaaaaccagagaccaggctgtgaaatccacacatctttagaactagtcgtctcctcttggcctcagcagctcttccctgttcttactggttgacattttgatcactctttgcacactcttgtgttttttgctcactgtcacactcccagcacctagtatgctcagtaaatgtttgtggaataagtgcataaaatgttcttaacctttgattctacttacagcccatgatagcctcttagatataataaatttggattatactaaaaaaaaacaatcggaacacaagtcagtaattagtagacacagcagatcgtaccaacggccggctaaagggcccgacactaaaataccatcgaccacaccacgagccaaacacacacaacgggcag

SEQ ID NO: 425241 - DNA, 1343 bp, Homo sapiens
ggtgggcacgcttcggtttacctcccccgcgggtgacagcccagtgcttccaccacaaccgatgtcaactctcctagcgcccctccgctcaccggtaaaccaggacagtggaggggcgccctgatgcggtgtctttcaggttgcagaaaagatggaaaaaaggacatgtgcactctgccccaaagatgtcgaatataatgtcctgtactttgcacaatcagagaatatagctgctcatgagaattgtttgctgtattcttcaggacttgtggaatgtgaggatcaggatccacttaatcctgatagaagttttgatgtggaatcagtaaagaaagaaatccagagaggaaggaagttgaaatgcaaattttgtcataaaagaggagccaccgtgggatgtgatttaaaaaactgtaacaagaattaccactttttctgtgccaagaaggacgacgcagttccacagtctgatggagttcgaggaatttataaactgctttgccagcaacatgctcaattcccgatcatcgctcaaagtgagctaaattttcaggagtgaaaagaaaaagaggaaggaagaaacccctctcaggcaatcatgtacagccacccgaaacaatgaaatgtaatacattcataagacaagtgaaagaagagcatggcagacacacagatgcaactgtgaaagttccttttcttaagaaatgcaaggaagcaggacttcttaattacttacttgaagaaatattagacaaagttcattcaattccagaaaaactcatggatgagactacttcagaatcagactatgaagaaatcgggagtgcactttttgactgtagattgttcgaagacacatttgtaaattttcaagcagcaatagagaaaaaaattcatgcatctcaacaaaggtggcagcagttgaaggaagagattgagctacttcaggacttaaaacaaaccttgtgctcttttcaagaaaatagagatcttatgtcaagttctacatcaatatcatccctgtcttattagggattaccatttcctaagccaagagtcatgtcaaattgcaatcaggctcaaaaccagagaccaggctgtgaaatccacacatctttagaactagtcgtctcctcttggcctcagcagctcttccctgttcttactggttgacattttgatcactctttgcacactcttgtgttttttgctcactgtcacactcccagcacctagtatgctcagtaaatgtttgtggaataagtgcataaaatgttcttaacctttgattctacttacagcccatgatagcctcttagatataataaatttggattatacta

SEQ ID NO: 425242 - DNA, 1279 bp, Homo sapiens
aaccctttatcaggacctgctgctgactatttgttgaagtttgccatatcttttgactttgtaaaaacttttggcatatgagttgtatatttcatgtagtcaaacagtaatcttttcctttatggattccaatttttaaatggtttatatttttagctaaattttcaggagtgaaaagaaaaagaggaaggaagaaacccctctcaggcaatcatgtacagccacccgaaacaatgaaatgtaatacattcataagacaagtgaaagaagagcatggcagacacacagatgcaactgtgaaagttccttttcttaagaaatgcaaggaagcaggacttcttaattacttacttgaagaaatattagacaaagttcattcaattccagaaaaactcatggatgagactacttcagaatcagactatgaagaaatcgggagtgcactttttgactgtagattgttcgaagacacatttgtaaattttcaagcagcattaagatgccctcaagacaggctacacctccacttgtttatgagtctggtctgacttctctatcaaggctgccacacacagctgggcaggccgggcacagagtcaaacagcattggtggatggctccccctgaagttgcacaacagagtgagtgccctccacactctgcatttccacagatgcatctgtctctccagcatatggtaggaagacaataagatttccctgtgaagaaatcattagttcatatccctgtctcaacatacacaacctttctcattttggcttctatattatacatttctatttgaattttttactacatttataaccagcaggaaaaatactttgaaaaatctaccaaaaagagtgtctgtcttaatagtcttttgaggatgtctgctaatatatagcagtatccatatttttttaaagcagccttaaaaatttttttctaaaaagagttattttgtaggggacttccatgtgtgtttttctttcatgtaagggaacatgtcacacatcactacttggatggattaggtgggagtacatatattatagtgtagtatggcgggggtgccactacttagaactgcatgagattcaacttaaaaggcttaagttgggtttcactaccctggttgataaaaacttgcttaatttagccttactcatattttaagttaactatacgtatgcagttattctgaataaagtttgtatatgtgtgtaactgttcgattttgaggcttttaaaaattacattgccattgactactatt

SEQ ID NO: 425243 - DNA, 3081 bp, Homo sapiens
ttctaaattgttggcatgtctttttctcaggctatcagaagtaacaacatttttcatttcagacatgcaatcacctattaatgatgaaatattttaccactttgggaatatttaattagtttagtcatggagaatacttcccacattttaagatttttcaaatatcactgtcatttctattttagcattttatcaaattattgcttttttattttataataaggcttaagacagattatagacctccttaagagatgagtttcttcttctaaaaatgcatgttgatagaggactatttaggctaatcggaggaatcattaagaaagaaagttttaacactgtttatccctatctgctttccttgcactttttctgtgaaaaatattttctgtttgcaaaatcttccctgagttctgaacccagcaccatcagtaccaaagtcttatgcaatatgtatttattatgctcctgaaataggcctcttcttgatgagacccaaactattacaaaaatatcagtattcatattttactcacaattcatacccgtgcttacttagttggcattttagtgctttgaatttctatcttaaagcacagaaaaaaaaaggtaatttaatccaagtattctatcatcaaaattattgtctgattatatgaagataaatgactggcgactctggttgtgtgtgtatgtgttttgcttttactttaattcttgcaatccaaatatagaattatatatttatctattattgcctttattctttaagcacttgagtttaatgattattcttacctgagaaaggaagaaatttaattctaccagtgatgaatacttgaaattaattgaactcataccaaaagatgtaatccagtttctcagtttgaaggagaacgtttgactcactttcattgttcatgctagctgaatataatcaagacttttgatttgatttgcttttattattcaatgcagatagagcctgataagttttagaacatttaaagaagattgaaatctcagtcagtaactaaatgataaaatgagattgattggcttatactaggtacatttatttttgaaagaattaatgtaaaataatagttatttttaaagcagctaatattacactgataatttgttgctaaatttagtgctgtccacatcataggtgcttaaatatgtactggttaactagaggggggtaggaaagcaagcggttttatcttgttcttacctttttgcaggaaaagtggctttaaaaaaatttatataataaaactattttggaaattcattcttttagaaagagaccttgagataaatattttttgactctggatatttctatagttctgaacacagattttaaacccactatcaaaatgaaaacaatataaagctatattagtgagtctccatgtagcagtttgtttttatagttactgtttcatgcttaaaacttcattcttactttcattaatgttacccttcactggtatagccactcactaaataagtatatttaaaacatcaaaattttgaactaaagtttgtgattctcttattcagcaatccttatcttatgctggctgcatgagttaattcaacatccagattaaatatcctgaagtaggttctatatatttcctcatacaacagacatggaatggaaatgccactagaaactgccctgctacttttaagtctgacctttgcaggaggtacactttgctgttctatgattgtattcacctacctaaaatacaaatgaagacagaacatatcatttactgcacgatgaatttttcatttattaaatgaaaaacgtttgctagacattttaaatattaagtattttgactacacggattaatttaaatgattctatcaggcattctgatatttaacaactctattaaaatatttatagaaaaataaaagcaaattgatataaatttttgagcaattctatttttgtagaaaaaagataacctgtaattataaagatgttttttgaatgtgtagtatcctagaaaataaaagttcttgtgaaacttaaaaaatgaatgaaaaccaactaatagcatgcaagatcatagatcctgcattaaatttttatttgtgaaaatttgaaaattatgagctataacttataaagtttgccttcttatgtctaaaatcttttaaaggattatttgcatttatgtaaaactggaaatgaagttatatatgagtgcaaagaaattgacttctgctcaaatatgtgttgataccctacagtaaattgaattaaatttttatcccaactgtttgattttattatttcatggactagccttacgttaagtgaaatactatttatgttgttaccacccctaagagtgactctgatatattatggatgacccaggacggtcttaaaggtctagttttaaaaactgcctagtttgtaagtatttgaatccagttcttttctaaattttaataatttgactcaaaatttttgctacagggtcaacttttaaattgtatatttcctctgaggcacactgggcatttggagaatggttcttcactggtgtagagagccaggtttactgttggttgcaccatctgttatcaggcatgcagaaacatttttcttctggagaaacagaggggaaggtgttgttacagtgtacatgtttcctctgtgtcgtttttaagggaaataaacatgttccaaaagatgctgttaaaataaatatttgaacacgttttctgtttctaggttgctcttaattccaaacatttaaataaatgtgcatttgaatagctttaggtggtttagtctattagctgaaatggaaaagttcatgtattgacatcatcaataatacttcataaaggtttatgtatttttatgtgtttggattccataagaagttgaacttagataattttatcaagagtagcacagtgtttctcaggtgcgagccagcatacagcgagacccttcatgtgtctctggatgcacatatatcttcccaaccttaaacacagctcattgaaatacattaaagctactgaaagtga

SEQ ID NO: 425244 - DNA, 3027 bp, Homo sapiens
ttctaaattgttggcatgtctttttctcaggctatcagaagtaacaacatttttcatttcagacatgcaatcacctattaatgatgaaatattttaccactttgggaatatttaattagtttagtcatggagaatacttcccacattttaagatttttcaaatatcactgtcatttctattttagcattttatcaaattattgcttttttattttataataaggcttaagacagattatagacctccttaagagatgagtttcttcttctaaaaatgcatgttgatagaggactatttaggctaatcggaggaatcattaagaaagaaagttttaacactgtttatccctatctgctttccttgcactttttctgtgaaaaatattttctgtttgcaaaatcttccctgagttctgaacccagcaccatcagtaccaaagtcttatgcaatatgtatttattatgctcctgaaataggcctcttcttgatgagacccaaactattacaaaaatatcagtattcatattttactcacaattcatacccgtgcttacttagttggcattttagtgctttgaatttctatcttaaagcacagaaaaaaaaaggtaatttaatccaagtattctatcatcaaaattattgtctgattatatgaagataaatgactggcgactctggttgtgtgtgtatgtgttttgcttttactttaattcttgcaatccaaatatagaattatatatttatctattattgcctttattctttaagcacttgagtttaatgattattcttacctgagaaaggaagaaatttaattctaccagtgatgaatacttgaaattaattgaactcataccaaaagatgtaatccagtttctcagtttgaaggagaacgtttgactcactttcattgttcatgctagctgaatataatcaagacttttgatttgatttgcttttattattcaatgcagatagagcctgataagttttagaacatttaaagaagattgaaatctcagtcagtaactaaatgataaaatgagattgattggcttatactaggtacatttatttttgaaagaattaatgtaaaataatagttatttttaaagcagctaatattacactgataatttgttgctaaatttagtgctgtccacatcataggtgcttaaatatgtactggttaactagaggggggtaggaaagcaagcggttttatcttgttcttacctttttgcaggaaaagtggctttaaaaaaatttatataataaaactattttggaaattcattcttttagaaagagaccttgagataaatattttttgactctggatatttctatagttctgaacacagattttaaacccactatcaaaatgaaaacaatataaagctatattagtgagtctccatgtagcagtttgtttttatagttactgtttcatgcttaaaacttcattcttactttcattaatgttacccttcactggtatagccactcactaaataagtatatttaaaacatcaaaattttgaactaaagtttgtgattctcttattcagcaatccttatcttatgctggctgcatgagttaattcaacatccagattaaatatcctgaagtaggttctatatatttcctcatacaacagacatggaatggaaatgccactagaaactgccctgctacttttaagtctgacctttgcaggaggtacactttgctgttctatgattgtattcacctacctaaaatacaaatgaagacagaacatatcatttactgcacgatgaatttttcatttattaaatgaaaaacgtttgctagacattttaaatattaagtattttgactacacggattaatttaaatgattctatcaggcattctgatatttaacaactctattaaaatatttatagaaaaataaaagcaaattgatataaatttttgagcaattctatttttgtagaaaaaagataacctgtaattataaagatgttttttgaatgtgtagtatcctagaaaataaaagttcttgtgaaacttaaaaaatgaatgaaaaccaactaatagcatgcaagatcatagatcctgcattaaatttttatttgtgaaaatttgaaaattatgagctataacttataaagtttgccttcttatgtctaaaatcttttaaaggattatttgcatttatgtaaaactggaaatgaagttatatatgagtgcaaagaaattgacttctgctcaaatatgtgttgataccctacagtaaattgaattaaatttttatcccaactgtttgattttattatttcatggactagccttacgttaagtgaaatactatttatgttgttaccacccctaagagtgactctgatatattatggatgacccaggacggtcttaaaggtctagttttaaaaactgcctagtttgtaagtatttgaatccagttcttttctaaattttaataatttgactctgggcatttggagaatggttcttcactggtgtagagagccaggtttactgttggttgcaccatctgttatcaggcatgcagaaacatttttcttctggagaaacagaggggaaggtgttgttacagtgtacatgtttcctctgtgtcgtttttaagggaaataaacatgttccaaaagatgctgttaaaataaatatttgaacacgttttctgtttctaggttgctcttaattccaaacatttaaataaatgtgcatttgaatagctttaggtggtttagtctattagctgaaatggaaaagttcatgtattgacatcatcaataatacttcataaaggtttatgtatttttatgtgtttggattccataagaagttgaacttagataattttatcaagagtagcacagtgtttctcaggtgcgagccagcatacagcgagacccttcatgtgtctctggatgcacatatatcttcccaaccttaaacacagctcattgaaatacattaaagctactgaaagtga

SEQ ID NO: 425245 - DNA, 3027 bp, Homo sapiens
ttctaaattgttggcatgtctttttctcaggctatcagaagtaacaacatttttcatttcagacatgcaatcacctattaatgatgaaatattttaccactttgggaatatttaattagtttagtcatggagaatacttcccacattttaagatttttcaaatatcactgtcatttctattttagcattttatcaaattattgcttttttattttataataaggcttaagacagattatagacctccttaagagatgagtttcttcttctaaaaatgcatgttgatagaggactatttaggctaatcggaggaatcattaagaaagaaagttttaacactgtttatccctatctgctttccttgcactttttctgtgaaaaatattttctgtttgcaaaatcttccctgagttctgaacccagcaccatcagtaccaaagtcttatgcaatatgtatttattatgctcctgaaataggcctcttcttgatgagacccaaactattacaaaaatatcagtattcatattttactcacaattcatacccgtgcttacttagttggcattttagtgctttgaatttctatcttaaagcacagaaaaaaaaaggtaatttaatccaagtattctatcatcaaaattattgtctgattatatgaagataaatgactggcgactctggttgtgtgtgtatgtgttttgcttttactttaattcttgcaatccaaatatagaattatatatttatctattattgcctttattctttaagcacttgagtttaatgattattcttacctgagaaaggaagaaatttaattctaccagtgatgaatacttgaaattaattgaactcataccaaaagatgtaatccagtttctcagtttgaaggagaacgtttgactcactttcattgttcatgctagctgaatataatcaagacttttgatttgatttgcttttattattcaatgcagatagagcctgataagttttagaacatttaaagaagattgaaatctcagtcagtaactaaatgataaaatgagattgattggcttatactaggtacatttatttttgaaagaattaatgtaaaataatagttatttttaaagcagctaatattacactgataatttgttgctaaatttagtgctgtccacatcataggtgcttaaatatgtactggttaactagaggggggtaggaaagcaagcggttttatcttgttcttacctttttgcaggaaaagtggctttaaaaaaatttatataataaaactattttggaaattcattcttttagaaagagaccttgagataaatattttttgactctggatatttctatagttctgaacacagattttaaacccactatcaaaatgaaaacaatataaagctatattagtgagtctccatgtagcagtttgtttttatagttactgtttcatgcttaaaacttcattcttactttcattaatgttacccttcactggtatagccactcactaaataagtatatttaaaacatctggctgcatgagttaattcaacatccagattaaatatcctgaagtaggttctatatatttcctcatacaacagacatggaatggaaatgccactagaaactgccctgctacttttaagtctgacctttgcaggaggtacactttgctgttctatgattgtattcacctacctaaaatacaaatgaagacagaacatatcatttactgcacgatgaatttttcatttattaaatgaaaaacgtttgctagacattttaaatattaagtattttgactacacggattaatttaaatgattctatcaggcattctgatatttaacaactctattaaaatatttatagaaaaataaaagcaaattgatataaatttttgagcaattctatttttgtagaaaaaagataacctgtaattataaagatgttttttgaatgtgtagtatcctagaaaataaaagttcttgtgaaacttaaaaaatgaatgaaaaccaactaatagcatgcaagatcatagatcctgcattaaatttttatttgtgaaaatttgaaaattatgagctataacttataaagtttgccttcttatgtctaaaatcttttaaaggattatttgcatttatgtaaaactggaaatgaagttatatatgagtgcaaagaaattgacttctgctcaaatatgtgttgataccctacagtaaattgaattaaatttttatcccaactgtttgattttattatttcatggactagccttacgttaagtgaaatactatttatgttgttaccacccctaagagtgactctgatatattatggatgacccaggacggtcttaaaggtctagttttaaaaactgcctagtttgtaagtatttgaatccagttcttttctaaattttaataatttgactcaaaatttttgctacagggtcaacttttaaattgtatatttcctctgaggcacactgggcatttggagaatggttcttcactggtgtagagagccaggtttactgttggttgcaccatctgttatcaggcatgcagaaacatttttcttctggagaaacagaggggaaggtgttgttacagtgtacatgtttcctctgtgtcgtttttaagggaaataaacatgttccaaaagatgctgttaaaataaatatttgaacacgttttctgtttctaggttgctcttaattccaaacatttaaataaatgtgcatttgaatagctttaggtggtttagtctattagctgaaatggaaaagttcatgtattgacatcatcaataatacttcataaaggtttatgtatttttatgtgtttggattccataagaagttgaacttagataattttatcaagagtagcacagtgtttctcaggtgcgagccagcatacagcgagacccttcatgtgtctctggatgcacatatatcttcccaaccttaaacacagctcattgaaatacattaaagctactgaaagtga

SEQ ID NO: 425246 - DNA, 3363 bp, Homo sapiens
  misc_feature (13)..(14): n is a, c, g, or t
cgagcggccggcnncctcccttccccgcctccgccggcgctgcctcctccctccgcccagctcggcctcccttgctccctcccctcctagctggcttcggcggggacggcggcggcggcggcggcggcggcggcgggcggggagggcgtgcgccggccgagaggtgtcggcggcgaggcaaaggaagtttcaagtggaaggtcgtccgtcggccggcgcgtcctcctgctctcctccgcagcatcatggcggagccgagcggctcgcccgtgcacgtccagcttccccagcaggcggccccggtgacagcggcggcggcggcggccccggcggccgcgacagcagcgccggccccggcagctcccgcggccccggccccggccccggccccggccccggcggcacaggctgtcggctggcccatctgcagggacgcgtacgagctgcaggaggttatcggcagtggagctactgctgtggttcaggcagccctatgcaaacccaggcaagaacgtgtagcaataaaacggatcaacttggaaaaatgccagaccagtatggatgaactattaaaagaaattcaagccatgagtcagtgcagccatcccaacgtagtgacctattacacctcttttgtggtcaaagatgaactttggctggtcatgaaattactaagtggaggttcaatgttggatatcataaaatacattgtcaaccgaggagaacacaagaatggagttctggaagaggcaataatagcaacaattcttaaagaggttttggaaggcttagactatctacacagaaacggtcagattcacagggatttgaaagctggtaatattcttctgggtgaggatggttcagtacaaatagcagattttggggtaagtgcgttcctagcaacagggggtgatgttacccgaaataaagtaagaaaaacattcgttggcaccccatgttggatggctcctgaagtcatggaacaggtgagaggctatgacttcaaggctgacatgtggagttttggaataactgccattgaattagcaacaggagcagcgccttatcacaaatatcctcccatgaaagtgttaatgttgactttgcaaaatgatccacccactttggaaacaggggtagaggataaagaaatgatgaaaaagtacggcaagtcctttagaaaattactttcactgtgtcttcagaaagatccttccaaaaggcccacagcagcagaacttttaaaatgcaaattcttccagaaagccaagaacagagagtacctgattgagaagctgcttacaagaacaccagacatagcccaaagagccaaaaaggtaagaagagttcctgggtcaagtggtcaccttcataaaaccgaagacggggactgggagtggagtgacgacgagatggatgagaagagcgaagaagggaaagcagctttttctcaggaaaagtcacgaagagtaaaagaagaaaatccagagattgcagtgagtgccagcaccatccccgaacaaatacagtccctctctgtgcacgactctcagggcccacccaatgctaatgaagactacagagaagcttcttcttgtgccgtgaacctcgttttgagattaagaaactccagaaaggaacttaatgacatacgatttgagtttactccaggaagagatacagcagatggtgtatctcaggagctcttctctgctggcttggtggatggtcacgatgtagttatagtggctgctaatttacagaagattgtagatgatcccaaagctttaaaaacattgacatttaagttggcttctggctgtgatgggtcggagattcctgatgaagtgaagctgattgggtttgctcagttgagtgtcagctgatgtatgtcccttgatgtcaccctgatctgtcatgccccaccgccacccctactcccttcaaccctccctctttctgcccatttcctcccaccccctcactcccatttcctagcaaaatcagaagattgtgaagaggccggcttcaacaaaatgggataaaaaaataattttttaaaacttacaacactccgagttctgctttattctctagcaatccacagtacaagaacaagcaaatgccacagctgcacgactgttgctcatttttccaaaagctatttaatattcttagcaatcaatttggatatcccttaagtgaaaagaatctgaaatacactcaggtggtcttatttattggcaacaaaaggaattttctatccagaagcctatttctcctttcattgttgttatttctgttataatactttaattgtacatctgacaatactgcctcttttatgttgtatttagaaattaatatacttataaaattaagatttattagccaaacttgaattctagttttaaaactgactgtgaattttatttttcatatatttatgcattacacaccttagctataagaaaaaaagggttttgattatatgcttcttgcagttaatctcgttatttaaacaaaaagttttgggtctgtctttggagtatttgtaacttctaaattttgaaatgactgaattaggaatttggatgcttattcttttagtctgtttgcctaaaaaccaatttacaatctgactgtctcttgggagagggaggtgccttgcaaactttcacattaagaatgtgcctgaggctgctttactctggaatagtctcagatctaaaatttcctctatataaggtggcatatgttaagttttgcttcattggaccgtttagaatgctatgtaaaatgttgccattctgttagattgctaactatatacccatctctgatttggctctccttaagtgataggatttgttattctaaaggtgataaacttgaaaatatcagaatctgagttttacttgaaattttgcagaatacccaggtggagtgaaaattggaagggttttgtgcaatgactaaaaggtaaaacgctgttaaggttcaagaatcaatactttcaacccaagtagccctctgcttgactgtatattatggaactagtaaaccttaggattttgaaaattggagtctaatctttcaaggaggtgggctcccaggatggtaccattgctctttcctagctaaccctagatatggcagctctttaatgtacttcaaaaagcaaatatatattactaaggaaaaaaagttatttataattgccttgtcataattgttaaggtgttctagagccatttgcatacaatttaatgtaatttcattccattctattgtttacacaacgattactcgaagatgactgcaaaggtaaaaggaaaataaaagtgtattgcacaatga

SEQ ID NO: 425247 - DNA, 3414 bp, Homo sapiens
  misc_feature (13)..(14): n is a, c, g, or t
cgagcggccggcnncctcccttccccgcctccgccggcgctgcctcctccctccgcccagctcggcctcccttgctccctcccctcctagctggcttcggcggggacggcggcggcggcggcggcggcggcggcgggcggggagggcgtgcgccggccgagaggtgtcggcggcgaggcaaaggaagtttcaagtggaaggtcgtccgtcggccggcgcgtcctcctgctctcctccgcagcatcatggcggagccgagcggctcgcccgtgcacgtccagcttccccagcaggcggccccggtgacagcggcggcggcggcggccccggcggccgcgacagcagcgccggccccggcagctcccgcggccccggccccggccccggccccggccccggcggcacaggctgtcggctggcccatctgcagggacgcgtacgagctgcaggaggttatcggcagtggagctactgctgtggttcaggcagccctatgcaaacccaggcaagaacgtgtagcaataaaacggatcaacttggaaaaatgccagaccagtatggatgaactattaaaagaaattcaagccatgagtcagtgcagccatcccaacgtagtgacctattacacctcttttgtggtcaaagatgaactttggctggtcatgaaattactaagtggaggttcaatgttggatatcataaaatacattgtcaaccgaggagaacacaagaatggagttctggaagaggcaataatagcaacaattcttaaagaggttttggaaggcttagactatctacacagaaacggtcagattcacagggatttgaaagctggtaatattcttctgggtgaggatggttcagtacaaatagcagattttggggtaagtgcgttcctagcaacagggggtgatgttacccgaaataaagtaagaaaaacattcgttggcaccccatgttggatggctcctgaagtcatggaacaggtgagaggctatgacttcaaggctgacatgtggagttttggaataactgccattgaattagcaacaggagcagcgccttatcacaaatatcctcccatgaaagtgttaatgttgactttgcaaaatgatccacccactttggaaacaggggtagaggataaagaaatgatgaaaaagtacggcaagtcctttagaaaattactttcactgtgtcttcagaaagatccttccaaaaggcccacagcagcagaacttttaaaatgcaaattcttccagaaagccaagaacagagagtacctgattgagaagctgcttacaagaacaccagacatagcccaaagagccaaaaaggtaagaagagttcctgggtcaagtggtcaccttcataaaaccgaagacggggactgggagtggagtgacgacgagatggatgagaagagcgaagaagggaaagcagctttttctcaggaaaagtcacgaagagtaaaagaagaaaatccagagattgcagtgagtgccagcaccatccccgaacaaatacagtccctctctgtgcacgactctcagggcccacccaatgctaatgaagactacagagaagcttcttcttgtgccgtgaacctcgttttgagattaagaaactccagaaaggaacttaatgacatacgatttgagtttactccaggaagagatacagcagatggtgtatctcaggagctcttctctgctggcttggtggatggtcacgatgtagttatagtggctgctaatttacagaagattgtagatgatcccaaagctttaaaaacattgacatttaagttggcttctggctgtgatgggtcggagattcctgatgaagtgaagctgattgggtttgctcagttgagtgtcagctgatgtatgtcccttgatgtcaccctgatctgtcatgccccaccgccacccctactcccttcaaccctccctctttctgcccatttcctcccaccccctcactcccatttcctagcaaaatcagaagattgtgaagaggccggcttcaacaaaatgggataaaaaaataattttttaaaacttacaacactccgagttctgctttattctctagcaatccacagtacaagaacaagcaaatgccacagctgcacgactgttgctcatttttccaaaagctatttaatattcttagcaatcaatttggatatcccttaagtgaaaagaatctgaaatacactcaggtggtcttatttattggcaacaaaaggaattttctatccagaagcctatttctcctttcattgttgttatttctgttataatactttaattgtacatctgacaatactgcctcttttatgttgtatttagaaattaatatacttataaaattaagatttattagccaaacttgaattctagttttaaaactgactgtgaattttatttttcatatatttatgcattacacaccttagctataagaaaaaaagggttttgattatatgcttcttgcagttaatctcgttatttaaacaaaaagttttgggtctgtctttggagtatttgtaacttctaaattttgaaatgactgaattaggaatttggatgcttattcttttagtctgtttgcctaaaaaccaatttacaatctgactgtctcttgggagagggaggtgccttgcaaactttcacattaagaatgtgcctgaggctgctttactctggaatagtctcagatctaaaatttcctctatataaggtggcatatgttaagttttgcttcattggaccgtttagaatgctatgtaaaatgttgccattctgttagattgctaactatatacccatctctgatttggctctccttaagtgataggatttgttattctaaaggtgataaacttgaaaatatcagaatctgagttttacttgaaattttgcagaatacccaggtggagtgaaaattggaagggttttgtgcaatgactaaaaggtaaaacgctgttaaggttcaagaatcaatactttcaacccaagtagccctctgcttgactgtatattatggaactagtaaaccttaggattttgaaaattggagtctaatctttcaaggaggtgggctcccaggatggtaccattgctctttcctagctaaccctagatatggcagctctttaatgtacttcaaaaagcaaatatatattactaaggaaaaaaagttatttataattgccttgtcataattgttaaggtgttctagagccatttgcatacaatttaatgtaatttcattccattctattgtttacacaacgattactcgaagatgactgcaaaggtaaaaggaaaataaaagtgtattgcacaatgaaaaaaaaaccacaccacactatgtaatataattcggggagtgggggaaata

SEQ ID NO: 425248 - DNA, 3300 bp, Homo sapiens
  misc_feature (13)..(14): n is a, c, g, or t
cgagcggccggcnncctcccttccccgcctccgccggcgctgcctcctccctccgcccagctcggcctcccttgctccctcccctcctagctggcttcggcggggacggcggcggcggcggcggcggcggcggcgggcggggagggcgtgcgccggccgagaggtgtcggcggcgaggcaaaggaagtttcaagtggaaggtcgtccgtcggccggcgcgtcctcctgctctcctccgcagcatcatggcggagccgagcggctcgcccgtgcacgtccagcttccccagcaggcggccccggtgacagcggcggcggcggcggccccggcggccgcgacagcagcgccggccccggcagctcccgcggccccggccccggccccggccccggccccggcggcacaggctgtcggctggcccatctgcagggacgcgtacgagctgcaggaggttatcggcagtggagctactgctgtggttcaggcagccctatgcaaacccaggcaagaacgtgtagcaataaaacggatcaacttggaaaaatgccagaccagtatggatgaactattaaaagaaattcaagccatgagtcagtgcagccatcccaacgtagtgacctattacacctcttttgtggtcaaagatgaactttggctggtcatgaaattactaagtggaggttcaatgttggatatcataaaatacattgtcaaccgaggagaacacaagaatggagttctggaagaggcaataatagcaacaattcttaaagaggttttggaaggcttagactatctacacagaaacggtcagattcacagggatttgaaagctggtaatattcttctgggtgaggatggttcagtacaaatagcagattttggggtaagtgcgttcctagcaacagggggtgatgttacccgaaataaagtaagaaaaacattcgttggcaccccatgttggatggctcctgaagtcatggaacaggtgagaggctatgacttcaaggctgacatgtggagttttggaataactgccattgaattagcaacaggagcagcgccttatcacaaatatcctcccatgaaagtgttaatgttgactttgcaaaatgatccacccactttggaaacaggggtagaggataaagaaatgatgaaaaagtacggcaagtcctttagaaaattactttcactgtgtcttcagaaagatccttccaaaaggcccacagcagcagaacttttaaaatgcaaattcttccagaaagccaagaacagagagtacctgattgagaagctgcttacaagaacaccagacatagcccaaagagccaaaaaggtaagaagagttcctgggtcaagtggtcaccttcataaaaccgaagacggggactgggagtggagtgacgacgagatggatgagaagagcgaagaagggaaagcagctttttctcaggaaaagtcacgaagagtaaaagaagaaaatccagagggcccacccaatgctaatgaagactacagagaagcttcttcttgtgccgtgaacctcgttttgagattaagaaactccagaaaggaacttaatgacatacgatttgagtttactccaggaagagatacagcagatggtgtatctcaggagctcttctctgctggcttggtggatggtcacgatgtagttatagtggctgctaatttacagaagattgtagatgatcccaaagctttaaaaacattgacatttaagttggcttctggctgtgatgggtcggagattcctgatgaagtgaagctgattgggtttgctcagttgagtgtcagctgatgtatgtcccttgatgtcaccctgatctgtcatgccccaccgccacccctactcccttcaaccctccctctttctgcccatttcctcccaccccctcactcccatttcctagcaaaatcagaagattgtgaagaggccggcttcaacaaaatgggataaaaaaataattttttaaaacttacaacactccgagttctgctttattctctagcaatccacagtacaagaacaagcaaatgccacagctgcacgactgttgctcatttttccaaaagctatttaatattcttagcaatcaatttggatatcccttaagtgaaaagaatctgaaatacactcaggtggtcttatttattggcaacaaaaggaattttctatccagaagcctatttctcctttcattgttgttatttctgttataatactttaattgtacatctgacaatactgcctcttttatgttgtatttagaaattaatatacttataaaattaagatttattagccaaacttgaattctagttttaaaactgactgtgaattttatttttcatatatttatgcattacacaccttagctataagaaaaaaagggttttgattatatgcttcttgcagttaatctcgttatttaaacaaaaagttttgggtctgtctttggagtatttgtaacttctaaattttgaaatgactgaattaggaatttggatgcttattcttttagtctgtttgcctaaaaaccaatttacaatctgactgtctcttgggagagggaggtgccttgcaaactttcacattaagaatgtgcctgaggctgctttactctggaatagtctcagatctaaaatttcctctatataaggtggcatatgttaagttttgcttcattggaccgtttagaatgctatgtaaaatgttgccattctgttagattgctaactatatacccatctctgatttggctctccttaagtgataggatttgttattctaaaggtgataaacttgaaaatatcagaatctgagttttacttgaaattttgcagaatacccaggtggagtgaaaattggaagggttttgtgcaatgactaaaaggtaaaacgctgttaaggttcaagaatcaatactttcaacccaagtagccctctgcttgactgtatattatggaactagtaaaccttaggattttgaaaattggagtctaatctttcaaggaggtgggctcccaggatggtaccattgctctttcctagctaaccctagatatggcagctctttaatgtacttcaaaaagcaaatatatattactaaggaaaaaaagttatttataattgccttgtcataattgttaaggtgttctagagccatttgcatacaatttaatgtaatttcattccattctattgtttacacaacgattactcgaagatgactgcaaaggtaaaaggaaaataaaagtgtattgcacaatga

SEQ ID NO: 425249 - DNA, 2022 bp, Homo sapiens
ttttttttttctccccactacctctcctctttgttttgtactgccctctcctggctaataaatttcttagtaatgaatatttagagaagccaagtggcggaaacactgggggctgctatcatttctactttccgttagaaatttcagattttattatatgaaatgcagagttgacatacagtgattaattcagatgtgcatagatacaagattgctgaaatgatatcaattgttgtagaaatatctgtatgagagtaatttggtcatttatatggactttgcaatgtttatgaaaaatgattttgcagtttattgcatcattagtcaaattttctgagtcattgatgtgaaaatccactgttattggaaataatctggaaactttctctctacgtttatattttacagtggctgctaatttacagaagattgtagatgatcccaaagctttaaaaacattgacatttaagttggcttctggctgtgatgggtcggagattcctgatgaagtgaagctgattgggtttgctcagttgagtgtcagctgatgtatgtcccttgatgtcaccctgatctgtcatgccccaccgccacccctactcccttcaaccctccctctttctgcccatttcctcccaccccctcactcccatttcctagcaaaatcagaagattgtgaagaggccggcttcaacaaaatgggataaaaaaataattttttaaaacttacaacactccgagttctgctttattctctagcaatccacagtacaagaacaagcaaatgccacagctgcacgactgttgctcatttttccaaaagctatttaatattcttagcaatcaatttggatatcccttaagtgaaaagaatctgaaatacactcaggtggtcttatttattggcaacaaaaggaattttctatccagaagcctatttctcctttcattgttgttatttctgttataatactttaattgtacatctgacaatactgcctcttttatgttgtatttagaaattaatatacttataaaattaagatttattagccaaacttgaattctagttttaaaactgactgtgaattttatttttcatatatttatgcattacacaccttagctataagaaaaaaagggttttgattatatgcttcttgcagttaatctcgttatttaaacaaaaagttttgggtctgtctttggagtatttgtaacttctaaattttgaaatgactgaattaggaatttggatgcttattcttttagtctgtttgcctaaaaaccaatttacaatctgactgtctcttgggagagggaggtgccttgcaaactttcacattaagaatgtgcctgaggctgctttactctggaatagtctcagatctaaaatttcctctatataaggtggcatatgttaagttttgcttcattggaccgtttagaatgctatgtaaaatgttgccattctgttagattgctaactatatacccatctctgatttggctctccttaagtgataggatttgttattctaaaggtgataaacttgaaaatatcagaatctgagttttacttgaaattttgcagaatacccaggtggagtgaaaattggaagggttttgtgcaatgactaaaaggtaaaacgctgttaaggttcaagaatcaatactttcaacccaagtagccctctgcttgactgtatattatggaactagtaaaccttaggattttgaaaattggagtctaatctttcaaggaggtgggctcccaggatggtaccattgctctttcctagctaaccctagatatggcagctctttaatgtacttcaaaaagcaaatatatattactaaggaaaaaaagttatttataattgccttgtcataattgttaaggtgttctagagccatttgcatacaatttaatgtaatttcattccattctattgtttacacaacgattactcgaagatgactgcaaaggtaaaaggaaaataaaagtgtattgcacaatga

SEQ ID NO: 425250 - DNA, 2052 bp, Homo sapiens
  misc_feature (13)..(14): n is a, c, g, or t
cgagcggccggcnncctcccttccccgcctccgccggcgctgcctcctccctccgcccagctcggcctcccttgctccctcccctcctagctggcttcggcggggacggcggcggcggcggcggcggcggcggcgggcggggagggcgtgcgccggccgagaggtgtcggcggcgaggcaaaggaagtttcaagtggaaggtcgtccgtcggccggcgcgtcctcctgctctcctccgcagcatcatggcggagccgagcggctcgcccgtgcacgtccagcttccccagcaggcggccccggtgacagcggcggcggcggcggccccggcggccgcgacagcagcgccggccccggcagctcccgcggccccggccccggccccggccccggccccggcggcacaggctgtcggctggcccatctgcagggacgcgtacgagctgcaggaggttatcggcagtggagctactgctgtggttcaggcagccctatgcaaacccaggcaagaacgtgtagcaataaaacggatcaacttggaaaaatgccagaccagtatggatgaactattaaaagaaattcaagccatgagtcagtgcagccatcccaacgtagtgacctattacacctcttttgtggtcaaagatgaactttggctggtcatgaaattactaagtggaggttcaatgttggatatcataaaatacattgtcaaccgaggagaacacaagaatggagttctggaagaggcaataatagcaacaattcttaaagaggttttggaaggcttagactatctacacagaaacggtcagattcacagggatttgaaagctggtaatattcttctgggtgaggatggttcagtacaaatagcagattttggggtaagtgcgttcctagcaacagggggtgatgttacccgaaataaagtaagaaaaacattcgttggcaccccatgttggatggctcctgaagtcatggaacaggtgagaggctatgacttcaaggctgacatgtggagttttggaataactgccattgaattagcaacaggagcagcgccttatcacaaatatcctcccatgaaagtgttaatgttgactttgcaaaatgatccacccactttggaaacaggggtagaggataaagaaatgatgaaaaagtacggcaagtcctttagaaaattactttcactgtgtcttcagaaagatccttccaaaaggcccacagcagcagaacttttaaaatgcaaattcttccagaaagccaagaacagagagtacctgattgagaagctgcttacaagaacaccagacatagcccaaagagccaaaaaggtaagaagagttcctgggtcaagtggtcaccttcataaaaccgaagacggggactgggagtggagtgacgacgagatggatgagaagagcgaagaagggaaagcagctttttctcaggaaaagtcacgaagagtaaaagaagaaaatccagagattgcagtgagtgccagcaccatccccgaacaaatacagtccctctctgtgcacgactctcagggcccacccaatgctaatgaagactacagagaagcttcttcttgtgccgtgaacctcgttttgagattaagaaactccagaaaggaacttaatgacatacgatttgagtttactccaggaagagatacagcagatggtgtatctcaggagctcttctctgctggcttggtggatggtcacgatgtagttatagtggctgctaatttacagaagattgtagatgatcccaaagctttaaaaacattgacatttaagttgaatcaatttttgcatttggaagcatttgactctgcagcgttagggaacgttttctgattgtgactggaagtgtcctcttctatgagcatagctttttcttatcgtcacacctttgactaagagcggccatataagaatcttgaagcctagatcattttgcttgcagtttgtattgcaacttgaccataaagacaaaattacactgaattcaaagcaacactcttaataaagctttcct

SEQ ID NO: 425251 - DNA, 3527 bp, Homo sapiens
  misc_feature (13)..(14): n is a, c, g, or t
cgagcggccggcnncctcccttccccgcctccgccggcgctgcctcctccctccgcccagctcggcctcccttgctccctcccctcctagctggcttcggcggggacggcggcggcggcggcggcggcggcggcgggcggggagggcgtgcgccggccgagaggtgtcggcggcgaggcaaaggaagtttcaagtggaaggtcgtccgtcggccggcgcgtcctcctgctctcctccgcagcatcatggcggagccgagcggctcgcccgtgcacgtccagcttccccagcaggcggccccggtgacagcggcggcggcggcggccccggcggccgcgacagcagcgccggccccggcagctcccgcggccccggccccggccccggccccggccccggcggcacaggctgtcggctggcccatctgcagggacgcgtacgagctgcaggaggttatcggcagtggagctactgctgtggttcaggcagccctatgcaaacccaggcaagaacgtgtagcaataaaacggatcaacttggaaaaatgccagaccagtatggatgaactattaaaagaaattcaagccatgagtcagtgcagccatcccaacgtagtgacctattacacctcttttgtggtcaaagatgaactttggctggtcatgaaattactaagtggaggttcaatgttggatatcataaaatacattgtcaaccgaggagaacacaagaatggagttctggaagaggcaataatagcaacaattcttaaagaggttttggaaggcttagactatctacacagaaacggtcagattcacagggatttgaaagctggtaatattcttctgggtgaggatggttcagtacaaatagcagattttggggtaagtgcgttcctagcaacagggggtgatgttacccgaaataaagtaagaaaaacattcgttggcaccccatgttggatggctcctgaagtcatggaacaggtgagaggctatgacttcaaggctgacatgtggagttttggaataactgccattgaattagcaacaggagcagcgccttatcacaaatatcctcccatgaaagtgttaatgttgactttgcaaaatgatccacccactttggaaacaggggtagaggataaagaaatgatgaaaaagtacggcaagtcctttagaaaattactttcactgtgtcttcagaaagatccttccaaaaggcccacagcagcagaacttttaaaatgcaaattcttccagaaagccaagaacagagagtacctgattgagaagctgcttacaagaacaccagacatagcccaaagagccaaaaaggtaagaagagttcctgggtcaagtggtcaccttcataaaaccgaagacggggactgggagtggagtgacgacgagatggatgagaagagcgaagaagggaaagcagctttttctcaggaaaagtcacgaagagtaaaagaagaaaatccagagattgcagtgagtgccagcaccatccccgaacaaatacagtccctctctgtgcacgactctcagggcccacccaatgctaatgaagactacagagaagcttcttcttgtgccgtgaacctcgttttgagattaagaaactccagaaaggaacttaatgacatacgatttgagtttactccaggaagagatacagcagatggtgtatctcaggagctcttctctgctggcttggtggatggtcacgatgtagttatagtggctgctaatttacagaagattgtagatgatcccaaagctttaaaaacattgacatttaagttggcttctggctgtgatgggtcggagattcctgatgaagtgaagctgattgggtttgctcagttgagtgtcagctgatgtatgtcccttgatgtcaccctgatctgtcatgccccaccgccacccctactcccttcaaccctccctctttctgcccatttcctcccaccccctcactcccatttcctagcaaaatcagaagattgtgaagaggccggcttcaacaaaatgggataaaaaaataattttttaaaacttacaacactccgagttctgctttattctctagcaatccacagtacaagaacaagcaaatgccacagctgcacgactgttgctcatttttccaaaagctatttaatattcttagcaatcaatttggatatcccttaagtgaaaagaatctgaaatacactcaggtggtcttatttattggcaacaaaaggaattttctatccagaagcctatttctcctttcattgttgttatttctgttataatactttaattgtacatctgacaatactgcctcttttatgttgtatttagaaattaatatacttataaaattaagatttattagccaaacttgaattctagttttaaaactgactgtgaattttatttttcatatatttatgcattacacaccttagctataagaaaaaaagggttttgattatatgcttcttgcagttaatctcgttatttaaacaaaaagttttgggtctgtctttggagtatttgtaacttctaaattttgaaatgactgaattaggaatttggatgcttattcttttagtctgtttgcctaaaaaccaatttacaatctgactgtctcttgggagagggaggtgccttgcaaactttcacattaagaatgtgcctgaggctgctttactctggaatagtctcagatctaaaatttcctctatataaggtggcatatgttaagttttgcttcattggaccgtttagaatgctatgtaaaatgttgccattctgttagattgctaactatatacccatctctgatttggctctccttaagtgataggatttgttattctaaaggtgataaacttgaaaatatcagaatctgagttttacttgaaattttgcagaatacccaggtggagtgaaaattggaagggttttgtgcaatgactaaaaggtaaaacgctgttaaggttcaagaatcaatactttcaacccaagtagccctctgcttgactgtatattatggaactagtaaaccttaggattttgaaaattggagtctaatctttcaaggaggtgggctcccaggatggtaccattgctctttcctagctaaccctagatatggcagctctttaatgtacttcaaaaagcaaatatatattactaaggaaaaaaagttatttataattgccttgtcataattgttaaggtgttctagagccatttgcatacaatttaatgtaatttcattccattctattgtttacacaacgattactcgaagatgactgcaaaggtaaaaggaaaataaaagtgtattgcacaatgaaaaaaagacaagaaacgccaagctcttttatatttaattttctaataaaaacctggggggggggcccggttcccatttcgccttatgagaagtggataacccgcgctaactgtccgggtgtttaaaaccgccgggactggaaaaacccctgccgttacccaact

SEQ ID NO: 425252 - DNA, 2070 bp, Homo sapiens
  misc_feature (13)..(14): n is a, c, g, or t
cgagcggccggcnncctcccttccccgcctccgccggcgctgcctcctccctccgcccagctcggcctcccttgctccctcccctcctagctggcttcggcggggacggcggcggcggcggcggcggcggcggcgggcggggagggcgtgcgccggccgagaggtgtcggcggcgaggcaaaggaagtttcaagtggaaggtcgtccgtcggccggcgcgtcctcctgctctcctccgcagcatcatggcggagccgagcggctcgcccgtgcacgtccagcttccccagcaggcggccccggtgacagcggcggcggcggcggccccggcggccgcgacagcagcgccggccccggcagctcccgcggccccggccccggccccggccccggccccggcggcacaggctgtcggctggcccatctgcagggacgcgtacgagctgcaggaggttatcggcagtggagctactgctgtggttcaggcagccctatgcaaacccaggcaagaacgtgtagcaataaaacggatcaacttggaaaaatgccagaccagtatggatgaactattaaaagaaattcaagccatgagtcagtgcagccatcccaacgtagtgacctattacacctcttttgtggtcaaagatgaactttggctggtcatgaaattactaagtggaggttcaatgttggatatcataaaatacattgtcaaccgaggagaacacaagaatggagttctggaagaggcaataatagcaacaattcttaaagaggttttggaaggcttagactatctacacagaaacggtcagattcacagggatttgaaagctggtaatattcttctgggtgaggatggttcagtacaaatagcagattttggggtaagtgcgttcctagcaacagggggtgatgttacccgaaataaagtaagaaaaacattcgttggcaccccatgttggatggctcctgaagtcatggaacaggtgagaggctatgacttcaaggctgacatgtggagttttggaataactgccattgaattagcaacaggagcagcgccttatcacaaatatcctcccatgaaagtgttaatgttgactttgcaaaatgatccacccactttggaaacaggggtagaggataaagaaatgatgaaaaagtacggcaagtcctttagaaaattactttcactgtgtcttcagaaagatccttccaaaaggcccacagcagcagaacttttaaaatgcaaattcttccagaaagccaagaacagagagtacctgattgagaagctgcttacaagaacaccagacatagcccaaagagccaaaaaggtaagaagagttcctgggtcaagtggtcaccttcataaaaccgaagacggggactgggagtggagtgacgacgagatggatgagaagagcgaagaagggaaagcagctttttctcaggaaaagtcacgaagagtaaaagaagaaaatccagagattgcagtgagtgccagcaccatccccgaacaaatacagtccctctctgtgcacgactctcagggcccacccaatgctaatgaagactacagagaagcttcttcttgtgccgtgaacctcgttttgagattaagaaactccagaaaggaacttaatgacatacgatttgagtttactccaggaagagatacagcagatggtgtatctcaggagctcttctctgctggcttggtggatggtcacgatgtagttatagtggctgctaatttacagaagattgtagatgatcccaaagctttaaaaacattgacatttaagttggcttctggctgtgatgggtcggagattcctgatgaagtgaagctgattgggtttgctcagttgagtgtcagctgatgtatgtcccttgatgtcaccctgatctgtcatgccccaccgccacccctactcccttcaaccctccctctttctgcccatttcctcccaccccctcactcccatttcctagcaaaatcagaagattgtgaagaggccggcttcaacaaaatgggataaaaaaataattttttaaaactta

SEQ ID NO: 425253 - DNA, 1656 bp, Homo sapiens
gccacccgttccagggaggctgcttggtttgggaagatactccccaggggtctccccttcccttgggggcgcagctgaggactgcgaggtgcgtccgagggccagaaagctgagatcgattctgagttcaaggatcaagtctgccctcaaaccattttacagatcgggaaatccgagacccagagaagggatactcccgcccaagggccaccgagccgagagaagcccgggccagggctttcttcgcgtatgtgggaatgcaggcgcgagccctttggggggcacagtccatacgggagctgaggccgaagccggagcactaactgtgctgtccaggggatcgagacggcactagagggctggactccttactgcctcagtttccccagcactacctttgttgaggaaacggagatggggatactggccgaacgcgcgcctgctgagacacagtgcaactgtatttagacgccccgcacctccccaaatctgatcgaggctccttttttcaagcacccgctatctctcagccctttaaaatccggccctgccgttcgagtctctcggcgttccattggaaagactcggggctccagctcccttctctagaatgaactgctctgactgccgcccggctttaccggagctttaactgcgcaggcgcaagggcagccaacccggtcgattcgccgattcgcacgagctgtcagagctggtgtactctgcctctaacctgcttgtgctgctcaatgacgggatcctacggaaggagcttcggaaaaagttgcctgtgtcgctgtcccagcagaagctgctgacatggctgagcgtgctggagtgcgtggaggtgttcatggagatgggagctgccaaggtgtggggtgaagtgggccgctggcttgtcatcgccctcatccagctggccaaggctgtactgcggatgctcctgctgctctggttcaaggctggcctccagacttcaccccctatcgttccactggacagagagacccaggcacagcccccggatggtgaccacagccctggcaaccatgagcagtcctacgtggggaagcggtcaaaccgggtggtgcgaaccctccagaacacgccgtccctgcactccaggcactggggagctccccagcagcgggagggacggcagcagcagcatcacgaggagctgagtgcgacccccacccccctggggctgcaggagaccatcgcagagtttttgtacattgcccggccgctgctgcacttgctcagcctgggcctgtggggtcagaggtcgtggaaaccctggctcttggctggtgttgtggacgtgaccagcctgagcctcctgagtgacagaaagggcctgacccggagggagcggcgggagctgcggcgccggaccatcctgctgctctactacctgctgcgctctcctttctacgaccgcttctccgaggccaggatcctcttcctgctccagttgctggccgaccacgtccctggcgttggcctggtcacaaggccgctcatggattacttgcccacctggcagaaaatctacttctacagttggggctgacagacctcccggaaggagggtgtggggaggggtggggcagggagcccctcttccctaataaaactgactccggcagc

SEQ ID NO: 425254 - DNA, 2460 bp, Homo sapiens
gccacccgttccagggaggctgcttggtttgggaagatactccccaggggtctccccttcccttgggggcgcagctgaggactgcgaggtgcgtccgagggccagaaagctgagatcgattctgagttcaaggatcaagtctgccctcaaaccattttacagatcgggaaatccgagacccagagaagggatactcccgcccaagggccaccgagccgagagaagcccgggccagggctttcttcgcgtatgtgggaatgcaggcgcgagccctttggggggcacagtccatacgggagctgaggccgaagccggagcactaactgtgctgtccaggggatcgagacggcactagagggctggactccttactgcctcagtttccccagcactacctttgttgaggaaacggagatggggatactggccgaacgcgcgcctgctgagacacagtgcaactgtatttagacgccccgcacctccccaaatctgatcgaggctccttttttcaagcacccgctatctctcagccctttaaaatccggccctgccgttcgagtctctcggcgttccattggaaagactcggggctccagctcccttctctagaatgaactgctctgactgccgcccggctttaccggagctttaactgcgcaggcgcaagggcagccaacccggtaaacggaagagctgggtgctgacggcgctgggcgggtcaggggcggagagcgtgctaaccaatgacttgagggagtagggggccgggtttgggccctcagttgctaagggctacccgagtgggaagcggttcaagagatggggtgaagggtggttcaccggttcttcaagtcctcagccttctggcccgcggaagttaagcaaccaagaggcgggcctaagaccggaagcaggaaggagggcgcaggaagcagggcgccgcagcctgtcgtacggtccttctgtgggtctgtcggtgccgagggcaggatggagaagctgcggctcctgggcctccgctaccaggagtacgtgactcgtcacccggccgccacggcccagctggagacagcagtgcggggcttcagttacctgctggcaggtcgattcgccgattcgcacgagctgtcagagctggtgtactctgcctctaacctgcttgtgctgctcaatgacgggatcctacggaaggagcttcggaaaaagttgcctgtgtcgctgtcccagcagaagctgctgacatggctgagcgtgctggagtgcgtggaggtgttcatggagatgggagctgccaaggtgtggggtgaagtgggccgctggcttgtcatcgccctcatccagctggccaaggctgtactgcggatgctcctgctgctctggttcaaggctggcctccagacttcaccccctatcgttccactggacagagagacccaggcacagcccccggatggtgaccacagccctggcaaccatgagcagtcctacgtggggaagcggtcaaaccgggtggtgcgaaccctccagaacacgccgtccctgcactccaggcactggggagctccccagcagcgggagggacggcagcagcagcatcacgaggagctgagtgcgacccccacccccctggggctgcaggagaccatcgcagagtttttgtacattgcccggccgctgctgcacttgctcagcctgggcctgtggggtcagaggtcgtggaaaccctggctcttggctggtgttgtggacgtgaccagcctgagcctcctgagtgacagaaagggcctgacccggagggagcggcgggagctgcggcgccggaccatcctgctgctctactacctgctgcgctctcctttctacgaccgcttctccgaggccaggatcctcttcctgctccagttgctggccgaccacgtccctggcgttggcctggtcacaagtcccagcgtgcggcctctccgtgcctaccggccaggccccacacacagccctggtcgccaccagcgttcctcccaggacacccttgactgcgctctcctgtgacgatgccactgcagcccgcaccttgtcactgctgggccaagaagccttcactaggagtgggatccaggctcctctcccacagaaagcggtgacttcacctcatggagcccgggaagctgcttgcctcggcagccataggagcgaacactgctgctctctcgctggcccctggtgaggacaggaagcctgaacccgggtgatggctgaacgctgcccagcgtgtcttctggctggggccctccgtctgccccttctccgcagggccctgtggctctggcagccccaggccatggcgttgccagcctccctgtgacagagcctggtgaacagtgagcctggctcccacgcaagtggcactttaagccctgcatcctcggttgagagtaaaaggcttttctcccttaaaaaaagaca

SEQ ID NO: 425255 - DNA, 1687 bp, Homo sapiens
agcttctgctgggacagcgacacaggcaactttttccgaagctccttccgtaggatcccgtcattgagcagcacaggcaggatggagaagctgcggctcctgggcctccgctaccaggagtacgtgactcgtcacccggccgccacggcccagctggagacagcagtgcggggcttcagttacctgctggcaggtcgattcgccgattcgcacgagctgtcagagctggtgtactctgcctctaacctgcttgtgctgctcaatgacgggatcctacggaaggagcttcggaaaaagttgcctgtgtcgctgtcccagcagaagctgctgacatggctgagcgtgctggagtgcgtggaggtgttcatggagatgggagctgccaaggtgtggggtgaagtgggccgctggcttgtcatcgccctcatccagctggccaaggctgtactgcggatgctcctgctgctctggttcaaggctggcctccagacttcaccccctatcgttccactggacagagagacccaggcacagcccccggatggtgaccacagccctggcaaccatgagcagtcctacgtggggaagcggtcaaaccgggtggtgcgaaccctccagaacacgccgtccctgcactccaggcactggggagctccccagcagcgggagggacggcagcagcagcatcacgaggagctgagtgcgacccccacccccctggggctgcaggagaccatcgcagagtttttgtacattgcccggccgctgctgcacttgctcagcctgggcctgtggggtcagaggtcgtggaaaccctggctcttggctggtgttgtggacgtgaccagcctgagcctcctgagtgacagaaagggcctgacccggagggagcggcgggagctgcggcgccggaccatcctgctgctctactacctgctgcgctctcctttctacgaccgcttctccgaggccaggatcctcttcctgctccagttgctggccgaccacgtccctggcgttggcctggtcacaaggccgctcatggattacttgcccacctggcagaaaatctacttctacagttggggctgacagacctcccggaaggagggtgtggggaggggtggggcagggagcccctcttccctaataaaactgactccggcagcgtcccagcgtgcggcctctccgtgcctaccggccaggccccacacacagccctggtcgccaccagcgttcctcccaggacacccttgactgcgctctcctgtgacgatgccactgcagcccgcaccttgtcactgctgggccaagaagccttcactaggagtgggatccaggctcctctcccacagaaagcggtgacttcacctcatggagcccgggaagctgcttgcctcggcagccataggagcgaacactgctgctctctcgctggcccctggtgaggacaggaagcctgaacccgggtgatggctgaacgctgcccagcgtgtcttctggctggggccctccgtctgccccttctccgcagggccctgtggctctggcagccccaggccatggcgttgccagcctccctgtgacagagcctggtgaacagtgagcctggctcccacgcaagtggcactttaagccctgcatcctcggttgagagtaaaaggcttttctcccttaaaaaaagaca

SEQ ID NO: 425256 - DNA, 1754 bp, Homo sapiens
gccacccgttccagggaggctgcttggtttgggaagatactccccaggggtctccccttcccttgggggcgcagctgaggactgcgaggtgcgtccgagggccagaaagctgagatcgattctgagttcaaggatcaagtctgccctcaaaccattttacagatcgggaaatccgagacccagagaagggatactcccgcccaagggccaccgagccgagagaagcccgggccagggctttcttcgcgtatgtgggaatgcaggcgcgagccctttggggggcacagtccatacgggagctgaggccgaagccggagcactaactgtgctgtccaggggatcgagacggcactagagggctggactccttactgcctcagtttccccagcactacctttgttgaggaaacggagatggggatactggccgaacgcgcgcctgctgagacacagtgcaactgtatttagacgccccgcacctccccaaatctgatcgaggctccttttttcaagcacccgctatctctcagccctttaaaatccggccctgccgttcgagtctctcggcgttccattggaaagactcggggctccagctcccttctctagaatgaactgctctgactgccgcccggctttaccggagctttaactgcgcaggcgcaagggcagccaacccggtaaacggaagagctgggtgctgacggcgctgggcgggtcaggggcggagagcgtgctaaccaatgacttgagggagtagggggccgggtttgggccctcagttgctaagggctacccgagtgggaagcggttcaagagatggggtgaagggtggttcaccggttcttcaagtcctcagccttctggcccgcggaagttaagcaaccaagaggcgggcctaagaccggaagcaggaaggagggcgcaggaagcagggcgccgcagcctgtcgtacggtccttctgtgggtctgtcggtgccgagggcaggatggagaagctgcggctcctgggcctccgctaccaggagtacgtgactcgtcacccggccgccacggcccagctggagacagcagtgcggggcttcagttacctgctggcaggtcgattcgccgattcgcacgagctgtcagagctggtgtactctgcctctaacctgcttgtgctgctcaatgacgggatcctacggaaggagcttcggaaaaagttgcctgtgtcgctgtcccagcagaagctgctgacatggctgagcgtgctggagtgcgtggaggtgttcatggagatgggagctgccaaggtgtggggtgaagtgggccgctggcttgtcatcgccctcatccagctggccaaggctgtactgcggatgctcctgctgctctggttcaaggctggcctccagacttcaccccctatcgttccactggacagagagacccaggcacagcccccggatggtgaccacagccctggcaaccatgagcagtcctacgtggggaagcggtcaaaccgggtggtgcgaaccctccagaacacgccgtccctgcactccaggcactggggagctccccagcagcgggagggacggcagcagcagcatcacgaggagctgagtgcgacccccacccccctggggctgcaggagaccatcgcagagtttttgtacattgcccggccgctgctgcactgtatccttagcgcggggcaggatagggctggcactgtgggctggggattgagtggggagtgtgctgagca

SEQ ID NO: 425257 - DNA, 2174 bp, Homo sapiens
gccacccgttccagggaggctgcttggtttgggaagatactccccaggggtctccccttcccttgggggcgcagctgaggactgcgaggtgcgtccgagggccagaaagctgagatcgattctgagttcaaggatcaagtctgccctcaaaccattttacagatcgggaaatccgagacccagagaagggatactcccgcccaagggccaccgagccgagagaagcccgggccagggctttcttcgcgtatgtgggaatgcaggcgcgagccctttggggggcacagtccatacgggagctgaggccgaagccggagcactaactgtgctgtccaggggatcgagacggcactagagggctggactccttactgcctcagtttccccagcactacctttgttgaggaaacggagatggggatactggccgaacgcgcgcctgctgagacacagtgcaactgtatttagacgccccgcacctccccaaatctgatcgaggctccttttttcaagcacccgctatctctcagccctttaaaatccggccctgccgttcgagtctctcggcgttccattggaaagactcggggctccagctcccttctctagaatgaactgctctgactgccgcccggctttaccggagctttaactgcgcaggcgcaagggcagccaacccggtcgattcgccgattcgcacgagctgtcagagctggtgtactctgcctctaacctgcttgtgctgctcaatgacgggatcctacggaaggagcttcggaaaaagttgcctgtgtcgctgtcccagcagaagctgctgacatggctgagcgtgctggagtgcgtggaggtgttcatggagatgggagctgccaaggtgtggggtgaagtgggccgctggcttgtcatcgccctcatccagctggccaaggctgtactgcggatgctcctgctgctctggttcaaggctggcctccagacttcaccccctatcgttccactggacagagagacccaggcacagcccccggatggtgaccacagccctggcaaccatgagcagtcctacgtggggaagcggtcaaaccgggtggtgcgaaccctccagaacacgccgtccctgcactccaggcactggggagctccccagcagcgggagggacggcagcagcagcatcacgaggagctgagtgcgacccccacccccctggggctgcaggagaccatcgcagagtttttgtacattgcccggccgctgctgcacttgctcagcctgggcctgtggggtcagaggtcgtggaaaccctggctcttggctggtgttgtggacgtgaccagcctgagcctcctgagtgacagaaagggcctgacccggagggagcggcgggagctgcggcgccggaccatcctgctgctctactacctgctgcgctctcctttctacgaccgcttctccgaggccaggatcctcttcctgctccagttgctggccgaccacgtccctggcgttggcctggtcacaaggccgctcatggattacttgcccacctggcagaaaatctacttctacagttggggctgacagacctcccggaaggagggtgtggggaggggtggggcagggagcccctcttccctaataaaactgactccggcagcgtcccagcgtgcggcctctccgtgcctaccggccaggccccacacacagccctggtcgccaccagcgttcctcccaggacacccttgactgcgctctcctgtgacgatgccactgcagcccgcaccttgtcactgctgggccaagaagccttcactaggagtgggatccaggctcctctcccacagaaagcggtgacttcacctcatggagcccgggaagctgcttgcctcggcagccataggagcgaacactgctgctctctcgctggcccctggtgaggacaggaagcctgaacccgggtgatggctgaacgctgcccagcgtgtcttctggctggggccctccgtctgccccttctccgcagggccctgtggctctggcagccccaggccatggcgttgccagcctccctgtgacagagcctggtgaacagtgagcctggctcccacgcaagtggcactttaagccctgcatcctcggttgagagtaaaaggcttttctcccttaaaaaaagaca

SEQ ID NO: 425258 - DNA, 1868 bp, Homo sapiens
gccacccgttccagggaggctgcttggtttgggaagatactccccaggggtctccccttcccttgggggcgcagctgaggactgcgaggtgcgtccgagggccagaaagctgagatcgattctgagttcaaggatcaagtctgccctcaaaccattttacagatcgggaaatccgagacccagagaagggatactcccgcccaagggccaccgagccgagagaagcccgggccagggctttcttcgcgtatgtgggaatgcaggcgcgagccctttggggggcacagtccatacgggagctgaggccgaagccggagcactaactgtgctgtccaggggatcgagacggcactagagggctggactccttactgcctcagtttccccagcactacctttgttgaggaaacggagatggggatactggccgaacgcgcgcctgctgagacacagtgcaactgtatttagacgccccgcacctccccaaatctgatcgaggctccttttttcaagcacccgctatctctcagccctttaaaatccggccctgccgttcgagtctctcggcgttccattggaaagactcggggctccagctcccttctctagaatgaactgctctgactgccgcccggctttaccggagctttaactgcgcaggcgcaagggcagccaacccggtaaacggaagagctgggtgctgacggcgctgggcgggtcaggggcggagagcgtgctaaccaatgacttgagggagtagggggccgggtttgggccctcagttgctaagggctacccgagtgggaagcggttcaagagatggggtgaagggtggttcaccggttcttcaagtcctcagccttctggcccgcggaagttaagcaaccaagaggcgggcctaagaccggaagcaggaaggagggcgcaggaagcagggcgccgcagcctgtcgtacggtccttctgtgggtctgtcggtgccgagggcaggatggagaagctgcggctcctgggcctccgctaccaggagtacgtgactcgtcacccggccgccacggcccagctggagacagcagtgcggggcttcagttacctgctggcagctgctctactacctgctgcgctctcctttctacgaccgcttctccgaggccaggatcctcttcctgctccagttgctggccgaccacgtccctggcgttggcctggtcacaaggccgctcatggattacttgcccacctggcagaaaatctacttctacagttggggctgacagacctcccggaaggagggtgtggggaggggtggggcagggagcccctcttccctaataaaactgactccggcagcgtcccagcgtgcggcctctccgtgcctaccggccaggccccacacacagccctggtcgccaccagcgttcctcccaggacacccttgactgcgctctcctgtgacgatgccactgcagcccgcaccttgtcactgctgggccaagaagccttcactaggagtgggatccaggctcctctcccacagaaagcggtgacttcacctcatggagcccgggaagctgcttgcctcggcagccataggagcgaacactgctgctctctcgctggcccctggtgaggacaggaagcctgaacccgggtgatggctgaacgctgcccagcgtgtcttctggctggggccctccgtctgccccttctccgcagggccctgtggctctggcagccccaggccatggcgttgccagcctccctgtgacagagcctggtgaacagtgagcctggctcccacgcaagtggcactttaagccctgcatcctcggttgagagtaaaaggcttttctcccttaaaaaaagaca

SEQ ID NO: 425259 - DNA, 2078 bp, Homo sapiens
gccacccgttccagggaggctgcttggtttgggaagatactccccaggggtctccccttcccttgggggcgcagctgaggactgcgaggtgcgtccgagggccagaaagctgagatcgattctgagttcaaggatcaagtctgccctcaaaccattttacagatcgggaaatccgagacccagagaagggatactcccgcccaagggccaccgagccgagagaagcccgggccagggctttcttcgcgtatgtgggaatgcaggcgcgagccctttggggggcacagtccatacgggagctgaggccgaagccggagcactaactgtgctgtccaggggatcgagacggcactagagggctggactccttactgcctcagtttccccagcactacctttgttgaggaaacggagatggggatactggccgaacgcgcgcctgctgagacacagtgcaactgtatttagacgccccgcacctccccaaatctgatcgaggctccttttttcaagcacccgctatctctcagccctttaaaatccggccctgccgttcgagtctctcggcgttccattggaaagactcggggctccagctcccttctctagaatgaactgctctgactgccgcccggctttaccggagctttaactgcgcaggcgcaagggcagccaacccggtaaacggaagagctgggtgctgacggcgctgggcgggtcaggggcggagagcgtgctaaccaatgacttgagggagtagggggccgggtttgggccctcagttgctaagggctacccgagtgggaagcggttcaagagatggggtgaagggtggttcaccggttcttcaagtcctcagccttctggcccgcggaagttaagcaaccaagaggcgggcctaagaccggaagcaggaaggagggcgcaggaagcagggcgccgcagcctgtcgtacggtccttctgtgggtctgtcggtgccgagggcaggatggagaagctgcggctcctgggcctccgctaccaggagtacgtgactcgtcacccggccgccacggcccagctggagacagcagtgcggggcttcagttacctgctggcaggtcgattcgccgattcgcacgagctgtcagagctggtgtactctgcctctaacctgcttgtgctgctcaatgacgggatcctacggaaggagcttcggaaaaagttgcctgtgtcgctgtcccagcagaagctgctgacatggctgagcgtgctggagtgcgtggaggtgttcatggagatgggagctgccaaggtgtggggtgaagtgggccgctggcttgtcatcgccctcatccagctggccaaggctgtactgcggatgctcctgctgctctggttcaaggctggcctccagacttcaccccctatcgttccactggacagagagacccaggcacagcccccggatggtgaccacagccctggcaaccatgagcagtcctacgtggggaagcggtcaaaccgggtggtgcgaaccctccagaacacgccgtccctgcactccaggcactggggagctccccagcagcgggagggacggcagcagcagcatcacgaggagctgagtgcgacccccacccccctggggctgcaggagaccatcgcagagtttttgtacattgcccggccgctgctgcacttgctcagcctgggcctgtggggtcagaggtcgtggaaaccctggctcttggctggtgttgtggacgtgaccagcctgagcctcctgagtgacagaaagggcctgacccggagggagcggcgggagctgcggcgccggaccatcctgctgctctactacctgctgcgctctcctttctacgaccgcttctccgaggccaggatcctcttcctgctccagttgctggccgaccacgtccctggcgttggcctggtcacaaggccgctcatggattacttgcccacctggcagaaaatctacttctacagttggggctgacagacctcccggaaggagggtgtggggaggggtggggcagggagcccctcttccctaataaaactgactccggcagc

SEQ ID NO: 425260 - DNA, 2596 bp, Homo sapiens
gccacccgttccagggaggctgcttggtttgggaagatactccccaggggtctccccttcccttgggggcgcagctgaggactgcgaggtgcgtccgagggccagaaagctgagatcgattctgagttcaaggatcaagtctgccctcaaaccattttacagatcgggaaatccgagacccagagaagggatactcccgcccaagggccaccgagccgagagaagcccgggccagggctttcttcgcgtatgtgggaatgcaggcgcgagccctttggggggcacagtccatacgggagctgaggccgaagccggagcactaactgtgctgtccaggggatcgagacggcactagagggctggactccttactgcctcagtttccccagcactacctttgttgaggaaacggagatggggatactggccgaacgcgcgcctgctgagacacagtgcaactgtatttagacgccccgcacctccccaaatctgatcgaggctccttttttcaagcacccgctatctctcagccctttaaaatccggccctgccgttcgagtctctcggcgttccattggaaagactcggggctccagctcccttctctagaatgaactgctctgactgccgcccggctttaccggagctttaactgcgcaggcgcaagggcagccaacccggtaaacggaagagctgggtgctgacggcgctgggcgggtcaggggcggagagcgtgctaaccaatgacttgagggagtagggggccgggtttgggccctcagttgctaagggctacccgagtgggaagcggttcaagagatggggtgaagggtggttcaccggttcttcaagtcctcagccttctggcccgcggaagttaagcaaccaagaggcgggcctaagaccggaagcaggaaggagggcgcaggaagcagggcgccgcagcctgtcgtacggtccttctgtgggtctgtcggtgccgagggcaggatggagaagctgcggctcctgggcctccgctaccaggagtacgtgactcgtcacccggccgccacggcccagctggagacagcagtgcggggcttcagttacctgctggcaggtcgattcgccgattcgcacgagctgtcagagctggtgtactctgcctctaacctgcttgtgctgctcaatgacgggatcctacggaaggagcttcggaaaaagttgcctgtgtcgctgtcccagcagaagctgctgacatggctgagcgtgctggagtgcgtggaggtgttcatggagatgggagctgccaaggtgtggggtgaagtgggccgctggcttgtcatcgccctcatccagctggccaaggctgtactgcggatgctcctgctgctctggttcaaggctggcctccagacttcaccccctatcgttccactggacagagagacccaggcacagcccccggatggtgaccacagccctggcaaccatgagcagtcctacgtggggaagcggtcaaaccgggtggtgcgaaccctccagaacacgccgtccctgcactccaggcactggggagctccccagcagcgggagggacggcagcagcagcatcacgaggagctgagtgcgacccccacccccctggggctgcaggagaccatcgcagagtttttgtacattgcccggccgctgctgcacttgctcagcctgggcctgtggggtcagaggtcgtggaaaccctggctcttggctggtgttgtggacgtgaccagcctgagcctcctgagtgacagaaagggcctgacccggagggagcggcgggagctgcggcgccggaccatcctgctgctctactacctgctgcgctctcctttctacgaccgcttctccgaggccaggatcctcttcctgctccagttgctggccgaccacgtccctggcgttggcctggtcacaaggccgctcatggattacttgcccacctggcagaaaatctacttctacagttggggctgacagacctcccggaaggagggtgtggggaggggtggggcagggagcccctcttccctaataaaactgactccggcagcgtcccagcgtgcggcctctccgtgcctaccggccaggccccacacacagccctggtcgccaccagcgttcctcccaggacacccttgactgcgctctcctgtgacgatgccactgcagcccgcaccttgtcactgctgggccaagaagccttcactaggagtgggatccaggctcctctcccacagaaagcggtgacttcacctcatggagcccgggaagctgcttgcctcggcagccataggagcgaacactgctgctctctcgctggcccctggtgaggacaggaagcctgaacccgggtgatggctgaacgctgcccagcgtgtcttctggctggggccctccgtctgccccttctccgcagggccctgtggctctggcagccccaggccatggcgttgccagcctccctgtgacagagcctggtgaacagtgagcctggctcccacgcaagtggcactttaagccctgcatcctcggttgagagtaaaaggcttttctcccttaaaaaaagaca

SEQ ID NO: 425261 - DNA, 2522 bp, Homo sapiens
gccacccgttccagggaggctgcttggtttgggaagatactccccaggggtctccccttcccttgggggcgcagctgaggactgcgaggtgcgtccgagggccagaaagctgagatcgattctgagttcaaggatcaagtctgccctcaaaccattttacagatcgggaaatccgagacccagagaagggatactcccgcccaagggccaccgagccgagagaagcccgggccagggctttcttcgcgtatgtgggaatgcaggcgcgagccctttggggggcacagtccatacgggagctgaggccgaagccggagcactaactgtgctgtccaggggatcgagacggcactagagggctggactccttactgcctcagtttccccagcactacctttgttgaggaaacggagatggggatactggccgaacgcgcgcctgctgagacacagtgcaactgtatttagacgccccgcacctccccaaatctgatcgaggctccttttttcaagcacccgctatctctcagccctttaaaatccggccctgccgttcgagtctctcggcgttccattggaaagactcggggctccagctcccttctctagaatgaactgctctgactgccgcccggctttaccggagctttaactgcgcaggcgcaagggcagccaacccggtaaacggaagagctgggtgctgacggcgctgggcgggtcaggggcggagagcgtgctaaccaatgacttgagggagtagggggccgggtttgggccctcagttgctaagggctacccgagtgggaagcggttcaagagatggggtgaagggtggttcaccggttcttcaagtcctcagccttctggcccgcggaagttaagcaaccaagaggcgggcctaagaccggaagcaggaaggagggcgcaggaagcagggcgccgcagcctgtcgtacggtccttctgtgggtctgtcggtgccgagggcaggatggagaagctgcggctcctgggcctccgctaccaggagtcgattcgccgattcgcacgagctgtcagagctggtgtactctgcctctaacctgcttgtgctgctcaatgacgggatcctacggaaggagcttcggaaaaagttgcctgtgtcgctgtcccagcagaagctgctgacatggctgagcgtgctggagtgcgtggaggtgttcatggagatgggagctgccaaggtgtggggtgaagtgggccgctggcttgtcatcgccctcatccagctggccaaggctgtactgcggatgctcctgctgctctggttcaaggctggcctccagacttcaccccctatcgttccactggacagagagacccaggcacagcccccggatggtgaccacagccctggcaaccatgagcagtcctacgtggggaagcggtcaaaccgggtggtgcgaaccctccagaacacgccgtccctgcactccaggcactggggagctccccagcagcgggagggacggcagcagcagcatcacgaggagctgagtgcgacccccacccccctggggctgcaggagaccatcgcagagtttttgtacattgcccggccgctgctgcacttgctcagcctgggcctgtggggtcagaggtcgtggaaaccctggctcttggctggtgttgtggacgtgaccagcctgagcctcctgagtgacagaaagggcctgacccggagggagcggcgggagctgcggcgccggaccatcctgctgctctactacctgctgcgctctcctttctacgaccgcttctccgaggccaggatcctcttcctgctccagttgctggccgaccacgtccctggcgttggcctggtcacaaggccgctcatggattacttgcccacctggcagaaaatctacttctacagttggggctgacagacctcccggaaggagggtgtggggaggggtggggcagggagcccctcttccctaataaaactgactccggcagcgtcccagcgtgcggcctctccgtgcctaccggccaggccccacacacagccctggtcgccaccagcgttcctcccaggacacccttgactgcgctctcctgtgacgatgccactgcagcccgcaccttgtcactgctgggccaagaagccttcactaggagtgggatccaggctcctctcccacagaaagcggtgacttcacctcatggagcccgggaagctgcttgcctcggcagccataggagcgaacactgctgctctctcgctggcccctggtgaggacaggaagcctgaacccgggtgatggctgaacgctgcccagcgtgtcttctggctggggccctccgtctgccccttctccgcagggccctgtggctctggcagccccaggccatggcgttgccagcctccctgtgacagagcctggtgaacagtgagcctggctcccacgcaagtggcactttaagccctgcatcctcggttgagagtaaaaggcttttctcccttaaaaaaagaca

SEQ ID NO: 425262 - DNA, 1986 bp, Homo sapiens
gccacccgttccagggaggctgcttggtttgggaagatactccccaggggtctccccttcccttgggggcgcagctgaggactgcgaggtgcgtccgagggccagaaagctgagatcgattctgagttcaaggatcaagtctgccctcaaaccattttacagatcgggaaatccgagacccagagaagggatactcccgcccaagggccaccgagccgagagaagcccgggccagggctttcttcgcgtatgtgggaatgcaggcgcgagccctttggggggcacagtccatacgggagctgaggccgaagccggagcactaactgtgctgtccaggggatcgagacggcactagagggctggactccttactgcctcagtttccccagcactacctttgttgaggaaacggagatggggatactggccgaacgcgcgcctgctgagacacagtgcaactgtatttagacgccccgcacctccccaaatctgatcgaggctccttttttcaagcacccgctatctctcagccctttaaaatccggccctgccgttcgagtctctcggcgttccattggaaagactcggggctccagctcccttctctagaatgaactgctctgactgccgcccggctttaccggagctttaactgcgcaggcgcaagggcagccaacccggtaaacggaagagctgggtgctgacggcgctgggcgggtcaggggcggagagcgtgctaaccaatgacttgagggagtagggggccgggtttgggccctcagttgctaagggctacccgagtgggaagcggttcaagagatggggtgaagggtggttcaccggttcttcaagtcctcagccttctggcccgcggaagttaagcaaccaagaggcgggcctaagaccggaagcaggaaggagggcgcaggaagcagggcgccgcagcctgtcgtacggtccttctgtgggtctgtcggtgccgagggcaggatggagaagctgcggctcctgggcctccgctaccaggagtacgtgactcgtcacccggccgccacggcccagctggagacagcatgctcagcctgggcctgtggggtcagaggtcgtggaaaccctggctcttggctggtgttgtggacgtgaccagcctgagcctcctgagtgacagaaagggcctgacccggagggagcggcgggagctgcggcgccggaccatcctgctgctctactacctgctgcgctctcctttctacgaccgcttctccgaggccaggatcctcttcctgctccagttgctggccgaccacgtccctggcgttggcctggtcacaaggccgctcatggattacttgcccacctggcagaaaatctacttctacagttggggctgacagacctcccggaaggagggtgtggggaggggtggggcagggagcccctcttccctaataaaactgactccggcagcgtcccagcgtgcggcctctccgtgcctaccggccaggccccacacacagccctggtcgccaccagcgttcctcccaggacacccttgactgcgctctcctgtgacgatgccactgcagcccgcaccttgtcactgctgggccaagaagccttcactaggagtgggatccaggctcctctcccacagaaagcggtgacttcacctcatggagcccgggaagctgcttgcctcggcagccataggagcgaacactgctgctctctcgctggcccctggtgaggacaggaagcctgaacccgggtgatggctgaacgctgcccagcgtgtcttctggctggggccctccgtctgccccttctccgcagggccctgtggctctggcagccccaggccatggcgttgccagcctccctgtgacagagcctggtgaacagtgagcctggctcccacgcaagtggcactttaagccctgcatcctcggttgagagtaaaaggcttttctcccttaaaaaaagaca

SEQ ID NO: 425263 - DNA, 374 bp, Homo sapiens
ctttctacgaccgcttctccgagtaagcacccaggacaccctgagccagggagagggctggcaagcgggcactggtgctccggtccctgctggcgccttcccttccccacgcctcatccagggttcaccaagcactgtgtgttgtccgggtggcagtcaccagatgccagcccagtcccgcccgcagagctctctgggccatcaggccacttgagcaggaacttaaacattggttggcaggagaggcactgagggcagggctgagggcattgccaggtggcccacagggatggcgacagggcgggcgcccatggcctctagctcatttccacttcttcctgccaaatagtttggcttatcctcacttctcagag

SEQ ID NO: 425264 - DNA, 1393 bp, Homo sapiens
ataggcacccgccgccacactcagctacttttttttgtatgttagtagaggcggggtttcaccatgttggccaggctagtcttgaactcctgacctcgtgatccgcccgcctcagcctcccaaagtgctgggattacaggcatgagccactgcatccagcctaaaatacttgtttttaaaggagatcactgccttgtgtgagaattcttttaaattttttaaaaactgaagtgtgttttaaatacaaattctgtcatgattgtgttcatgtggttcatggtttcctagtgtctcccatgagatccataatgccactttctgtttacatgtcttgttgtttggttagtagtcatcagagactaatctattaaatatggagccctctccattttttttcaaaatgactgcattttaagtttcttaaattgtaaagtaaggtgggtacagtttcttctagttcttagatggtgctgtcacgggccagcataattgctaaaacatccatacgtatggtagaccttaagtcatgtgctaatcatgaaagctgggctcaccctgaataccggcagttgcctggtctttataatgattactgaatgcataaccagttacgcttgcatgtgttcatcatcataacttattttctaattatcttaattttcagaggttggaggtttgcaatgtccactcaagttgcaatgcaaaactctggctcatattcaatttctcagtttcaatccagaatgatcaggtaaatcaactgttttctttttatacttcgttaaaaggaaagtggggaggggggtggtaatttttacaggtttaatgtagttaaatgaatgtacctaaaggttgaagatttttgtttagttgcagaaaatagagtttaacgtctgtgtttaagataaatttaatgtctaaatgtattttatttgctgtataacactgaaagcactcattagaggaaatgttgagactgaattttttaatatgctgatctttattttctaactttctgtgctgattaaattttattatctgtattcatcagagcgtaggccatacaaatgaatttaaagacatttttctttgacatcctagacaaaaatagaaaagagagtcattaaaaaaaatttttaggttgtgtgtggtggctcacacctgtaatcccagcgctttgggaggccaaggcgagaggactgcttgagcccaggagtttgagaccagcctgggcaaaatggtgaaaccctgtctctacaaaaaatgcaaaaattagccaggtgtggtggcgtgtacacctgtggtcccagctacttggtgggatgaggtgggaagatcgcttgagcctgggagattgaagctacagtgagtgccactgcactccagcctgggt

SEQ ID NO: 425265 - DNA, 478 bp, Homo sapiens
tctatcacagggtaaaaaaattgattatttgagggaaaaaaaaaaggatttgtcttgtagccaggatattgttttaaagaaaatcctttttgtttttccaggtggaccaaactacgaattaacatgcttcctgctacaataatttgtgagccaatttcagaatgctttgttgccagtttaattattggatgggcagcccaccatgtgttcagatgggatattatggtatttttcatgtgtcattgcctggcatggtttatatttgactacattcaactcaggggtgtccaggtatgtggataggcatgaaaaggttggcagtcccttggtggaactagaactatttcaatttagaaaaagttgaaggaaatgtatctgagccattcttcagcttcccattgtaggttagtctcgggtttgaacatgactttctctagtggaatgttgatgcaaaacttaagtcgatttgcaactttct

SEQ ID NO: 425266 - DNA, 4009 bp, Homo sapiens
ttccgggggcgggacgcgccgaggagtggggcgcgagccgccggttttgattagtgcgcggagctgcggcggtggagctgctcggccgggagcccggcggcgagacggagaggcggcggaggtgcccgcgcgcagggtctggtgggcggccgcgaggctcgggagaggcgaaccggagcgcggggccgcggtcgccccgaccagagccgggagaccgcagcacccgcagccgcccgcgagcgcgccgaagacagcgcgcaggcgagagcgcgcgggcgggggcgcgcaggccctgcccgccccttccgtccccacccccctccgccctttcctctccccaccttcctctcgcctcccgcgcccccgcaccgggcgcccaccctgtcctcctcctgcgggagcgttgtccgtgttggcggccgcagcgggccgggccggtccggcgggccgggggatggcgctgctggacctggccttggagggaatggccgtcttcgggttcgtcctcttcttggtgctgtggctgatgcatttcatggctatcatctacacccgattacacctcaacaagaaggcaactgacaaacagccttatagcaagctcccaggtgtctctcttctgaaaccactgaaaggggtagatcctaacttaatcaacaacctggaaacattctttgaattggattatcccaaatatgaagtgctcctttgtgtacaagatcatgatgatccagccattgatgtatgtaagaagcttcttggaaaatatccaaatgttgatgctagattgtttataggtggcaaaaaagttggcattaatcctaaaattaataatttaatgccaggatatgaagttgcaaagtatgatcttatatggatttgtgatagtggaataagagtaattccagatacgcttactgacatggtgaatcaaatgacagaaaaagtaggcttggttcacgggctgccttacgtagcagacagacagggctttgctgccaccttagagcaggtatattttggaacttcacatccaagatactatatctctgccaatgtaactggtttcaaatgtgtgacaggaatgtcttgtttaatgagaaaagatgtgttggatcaagcaggaggacttatagcttttgctcagtacattgccgaagattactttatggccaaagcgatagctgaccgaggttggaggtttgcaatgtccactcaagttgcaatgcaaaactctggctcatattcaatttctcagtttcaatccagaatgatcaggtggaccaaactacgaattaacatgcttcctgctacaataatttgtgagccaatttcagaatgctttgttgccagtttaattattggatgggcagcccaccatgtgttcagatgggatattatggtatttttcatgtgtcattgcctggcatggtttatatttgactacattcaactcaggggtgtccagggtggcacactgtgtttttcaaaacttgattatgcagtcgcctggttcatccgcgaatccatgacaatatacatttttttgtctgcattatgggacccaactataagctggagaactggtcgctacagattacgctgtgggggtacagcagaggaaatcctagatgtataactacagctttgtgactgtatataaaggaaaaaagagaagtattataaattatgtttatataaatgcttttaaaaatctaccttctgtagttttatcacatgtatgttttggtatctgttctttaatttatttttgcatggcacttgcatctgtgaaaaaaaaaaaaaacacatctgtagtcttggccaaatgatacactttattttgtggaagtagagaatcaagagaattggttctaggaacctgggttcgttcatcattgttgtttatttttttaaaataaataaataaatatatatatagatgctctgcaacaaactctgtgacagtatccttcagtagagaaagtttcttacttgtgagtacactcttttagaacatttacgggtggcagcagctttgctttagagtttagaagataatagaaggaatgactattcatgtccaaagtgaatggttttgtgcagtgaacaacacatggcgaggtactaactgagaaactttttcatgctttatgcctacctcttgtagttgttgcagagcaaatataaattgtaataagatagctaggccttgcagaaacaaacagaaaaacttaaaaaaaaatgatataagagctggagtctagtatttatatgaatctgtgagagataatttttttggtctcactgcaatgaaccaaaagcggctgagtttggtttttaattgtagccatgtattgaaggcatctttttgaccaactcttgttggttctgtcttgaaccattgttaatcactgtgctgtaattagtatagctaaatcttttccttccttgctcctcccccagcccaccccgtcttcccttaacattttttcagggggggttgggagtggtttcattttagtgtgagtggatgttttgatagttgtaaggaaaaaatgcatttcagacacatttcacacatgagctattttcttacacagtatgtcttattgttaataagaatgtaatttcatgatacaagtatttaataccttttttaagtcagtaaatattctagccatcaataaattgcagtagagtattaagaggggacaggatgagtttactcttaaaattaatcagtatcaaactaagtctactgtgtgtgtttttttttttgttttttgtttttgtttgtttactattatagtaagtctagtcttatttaaattggatttttgtattcaagtttatatgacaaaatagactagatcagcgctggttgtaaatgcatgctgtacctcactgttttctccccatcatgccgctaaacttgctcgccaggttgtgcttaacttgtggtgaactggacttgattctgttttgttttgtttttttaaaaaaaaaaaacaaaaatgtaagggacagtgcataagccttttctttgttaagtagtggtgttttgctttttcttcaggattggatggcatgttgtccacaggaatgcctactgcagggctaacactggcaatatggcagctttaaattctgagttactacagtctccatgtcaaagcataatgtgtagcatatcagcaataactacatatttatagaaaacactttttcactttactgagccaattcatttaattgtcaaatgtctatatccatggtttaaatggcaacatatctataagtatgtatacacattatatttaagcttttctctgggccaaactgcttcatccttttttctttcttttttttttttttagccttatgatgaatttgtttgaagggcattttctttatgaacaaaggcttggatgcatattcctttctttctgtgaatgggtattattccctgaggaaagttgcacagtgaaaaccagtctggttgtgacccactacatgttttgtttttaatcactattacctgagttgaactttgctcaccatgtttgtacttgttggtctgtttaatgaagtttggttgatgccatcctttgcactgccgaagcgtaatcttgtgtattacttagctctctgctgatctcagtatggacagtgtaacaacaaaaccaaaatggctggacagacttcttgtgttttgtaaatataaactaggacagttctgtaggtttgttcagtgtgctagtggagtatttccttaatgtaaaacttcacttaacagagagattctttgtttagcaagcttggagtgatgataaaatggtaagaaataatataaatgttgaagaaagcatcacaacagaactataggagtctaaatttaataaatctttaaaaaaaaccagtgtctagaatatataccatgttttattatttaaaatcattgtcttaaatttttgttcaaaaaataaaaatttgaatacaatcaaaa

SEQ ID NO: 425267 - DNA, 3955 bp, Homo sapiens
ttccgggggcgggacgcgccgaggagtggggcgcgagccgccggttttgattagtgcgcggagctgcggcggtggagctgctcggccgggagcccggcggcgagacggagaggcggcggaggtgcccgcgcgcagggtctggtgggcggccgcgaggctcgggagaggcgaaccggagcgcggggccgcggtcgccccgaccagagccgggagaccgcagcacccgcagccgcccgcgagcgcgccgaagacagcgcgcaggcgagagcgcgcgggcgggggcgcgcaggccctgcccgccccttccgtccccacccccctccgccctttcctctccccaccttcctctcgcctcccgcgcccccgcaccgggcgcccaccctgtcctcctcctgcgggagcgttgtccgtgttggcggccgcagcgggccgggccggtccggcgggccgggggatggcgctgctggacctggccttggagggaatggccgtcttcgggttcgtcctcttcttggtgctgtggctgatgcatttcatggctatcatctacacccgattacacctcaacaagaaggcaactgacaaacagccttatagcaagctcccaggtgtctctcttctgaaaccactgaaaggggtagatcctaacttaatcaacaacctggaaacattctttgaattggattatcccaaatatgaagtgctcctttgtgtacaagatcatgatgatccagccattgatgtatgtaagaagcttcttggaaaatatccaaatgttgatgctagattgtttataggtggcaaaaaagttggcattaatcctaaaattaataatttaatgccaggatatgaagttgcaaagtatgatcttatatggatttgtgatagtggaataagagtaattccagatacgcttactgacatggtgaatcaaatgacagaaaaagtaggcttggttcacgggctgccttacgtagcagacagacagggctttgctgccaccttagagcaggtatattttggaacttcacatccaagatactatatctctgccaatgtaactggtttcaaatgtgtgacaggaatgtcttgtttaatgagaaaagatgtgttggatcaagcaggaggacttatagcttttgctcagtacattgccgaagattactttatggccaaagcgatagctgaccgaggttggaggtttgcaatgtccactcaagttgcaatgcaaaactctggctcatattcaatttctcagtttcaatccagaatgatcaggtggaccaaactacgaattaacatgcttcctgctacaataatttgtgagccaatttcagaatgctttgttgccagtttaattattggatgggcagcccaccatgtgttcagatgggatattatggtatttttcatgtgtcattgcctggcatggtttatatttgactacattcaactcaggggtgtccagggtggcacactgtgtttttcaaaacttgattatgcagtcgcctggttcatccgcgaatccatgacaatatacatttttttgtctgcattatgggacccaactataagctggagaactggtcgctacagattacgctgtgggggtacagcagaggaaatcctagatgtataactacagctttgtgactgtatataaaggaaaaaagagaagtattataaattatgtttatataaatgcttttaaaaatctaccttctgtagttttatcacatgtatgttttggtatctgttctttaatttatttttgcatggcacttgcatctgtgaaaaaaaaaaaaaacacatctgtagtcttggccaaatgatacactttattttgtggaagtagagaatcaagagaattggttctaggaacctgggttcgttcatcattgttgtttatttttttaaaataaataaataaatatatatatagatgctctgcaacaaactctgtgacagtatccttcagtagagaaagtttcttacttgtgagtacactcttttagaacatttacgggtggcagcagctttgctttagagtttagaagataatagaaggaatgactattcatgtccaaagtgaatggttttgtgcagtgaacaacacatggcgaggtactaactgagaaactttttcatgctttatgcctacctcttgtagttgttgcagagcaaatataaattgtaataagatagctaggccttgcagaaacaaacagaaaaacttaaaaaaaaatgatataagagctggagtctagtatttatatgaatctgtgagagataatttttttggtctcactgcaatgaaccaaaagcggctgagtttggtttttaattgtagccatgtattgaaggcatctttttgaccaactcttgttggttctgtcttgaaccattgttaatcactgtgctgtaattagtatagctaaatcttttccttccttgctcctcccccagcccaccccgtcttcccttaacattttttcagggggggttgggagtggtttcattttagtgtgagtggatgttttgatagttgtaaggaattattgttaataagaatgtaatttcatgatacaagtatttaataccttttttaagtcagtaaatattctagccatcaataaattgcagtagagtattaagaggggacaggatgagtttactcttaaaattaatcagtatcaaactaagtctactgtgtgtgtttttttttttgttttttgtttttgtttgtttactattatagtaagtctagtcttatttaaattggatttttgtattcaagtttatatgacaaaatagactagatcagcgctggttgtaaatgcatgctgtacctcactgttttctccccatcatgccgctaaacttgctcgccaggttgtgcttaacttgtggtgaactggacttgattctgttttgttttgtttttttaaaaaaaaaaaacaaaaatgtaagggacagtgcataagccttttctttgttaagtagtggtgttttgctttttcttcaggattggatggcatgttgtccacaggaatgcctactgcagggctaacactggcaatatggcagctttaaattctgagttactacagtctccatgtcaaagcataatgtgtagcatatcagcaataactacatatttatagaaaacactttttcactttactgagccaattcatttaattgtcaaatgtctatatccatggtttaaatggcaacatatctataagtatgtatacacattatatttaagcttttctctgggccaaactgcttcatccttttttctttcttttttttttttttagccttatgatgaatttgtttgaagggcattttctttatgaacaaaggcttggatgcatattcctttctttctgtgaatgggtattattccctgaggaaagttgcacagtgaaaaccagtctggttgtgacccactacatgttttgtttttaatcactattacctgagttgaactttgctcaccatgtttgtacttgttggtctgtttaatgaagtttggttgatgccatcctttgcactgccgaagcgtaatcttgtgtattacttagctctctgctgatctcagtatggacagtgtaacaacaaaaccaaaatggctggacagacttcttgtgttttgtaaatataaactaggacagttctgtaggtttgttcagtgtgctagtggagtatttccttaatgtaaaacttcacttaacagagagattctttgtttagcaagcttggagtgatgataaaatggtaagaaataatataaatgttgaagaaagcatcacaacagaactataggagtctaaatttaataaatctttaaaaaaaaccagtgtctagaatatataccatgttttattatttaaaatcattgtcttaaatttttgttcaaaaaataaaaatttgaatacaatcaaaa

SEQ ID NO: 425268 - DNA, 4370 bp, Homo sapiens
ttccgggggcgggacgcgccgaggagtggggcgcgagccgccggttttgattagtgcgcggagctgcggcggtggagctgctcggccgggagcccggcggcgagacggagaggcggcggaggtgcccgcgcgcagggtctggtgggcggccgcgaggctcgggagaggcgaaccggagcgcggggccgcggtcgccccgaccagagccgggagaccgcagcacccgcagccgcccgcgagcgcgccgaagacagcgcgcaggcgagagcgcgcgggcgggggcgcgcaggccctgcccgccccttccgtccccacccccctccgccctttcctctccccaccttcctctcgcctcccgcgcccccgcaccgggcgcccaccctgtcctcctcctgcgggagcgttgtccgtgttggcggccgcagcgggccgggccggtccggcgggccgggggatggcgctgctggacctggccttggagggaatggccgtcttcgggttcgtcctcttcttggtgctgtggctgatgcatttcatggctatcatctacacccgattacacctcaacaagaaggcaactgacaaacagccttatagcaagctcccaggtgtctctcttctgaaaccactgaaaggggtagatcctaacttaatcaacaacctggaaacattctttgaattggattatcccaaatatgaagtgctcctttgtgtacaagatcatgatgatccagccattgatgtatgtaagaagcttcttggaaaatatccaaatgttgatgctagattgtttataggtggcaaaaaagttggcattaatcctaaaattaataatttaatgccaggatatgaagttgcaaagtatgatcttatatggatttgtgatagtggaataagagtaattccagatacgcttactgacatggtgaatcaaatgacagaaaaagtaggcttggttcacgggctgccttacgtagcagacagacagggctttgctgccaccttagagcaggtatattttggaacttcacatccaagatactatatctctgccaatgtaactggtttcaaatgtgtgacaggaatgtcttgtttaatgagaaaagatgtgttggatcaagcaggaggacttatagcttttgctcagtacattgccgaagattactttatggccaaagcgatagctgaccgaggttggaggtttgcaatgtccactcaagttgcaatgcaaaactctggctcatattcaatttctcagtttcaatccagaatgatcaggtggaccaaactacgaattaacatgcttcctgctacaataatttgtgagccaatttcagaatgctttgttgccagtttaattattggatgggcagcccaccatgtgttcagatgggatattatggtatttttcatgtgtcattgcctggcatggtttatatttgactacattcaactcaggggtgtccagggtggcacactgtgtttttcaaaacttgattatgcagtcgcctggttcatccgcgaatccatgacaatatacatttttttgtctgcattatgggacccaactataagctggagaactggtcgctacagattacgctgtgggggtacagcagaggaaatcctagatgtataactacagctttgtgactgtatataaaggaaaaaagagaagtattataaattatgtttatataaatgcttttaaaaatctaccttctgtagttttatcacatgtatgttttggtatctgttctttaatttatttttgcatggcacttgcatctgtgaaaaaaaaaaaaaacacatctgtagtcttggccaaatgatacactttattttgtggaagtagagaatcaagagaattggttctaggaacctgggttcgttcatcattgttgtttatttttttaaaataaataaataaatatatatatagatgctctgcaacaaactctgtgacagtatccttcagtagagaaagtttcttacttgtgagtacactcttttagaacatttacgggtggcagcagctttgctttagagtttagaagataatagaaggaatgactattcatgtccaaagtgaatggttttgtgcagtgaacaacacatggcgaggtactaactgagaaactttttcatgctttatgcctacctcttgtagttgttgcagagcaaatataaattgtaataagatagctaggccttgcagaaacaaacagaaaaacttaaaaaaaaatgatataagagctggagtctagtatttatatgaatctgtgagagataatttttttggtctcactgcaatgaaccaaaagcggctgagtttggtttttaattgtagccatgtattgaaggcatctttttgaccaactcttgttggttctgtcttgaaccattgttaatcactgtgctgtaattagtatagctaaatcttttccttccttgctcctcccccagcccaccccgtcttcccttaacattttttcagggggggttgggagtggtttcattttagtgtgagtggatgttttgatagttgtaaggaaaaaatgcatttcagacacatttcacacatgagctattttcttacacagtatgtcttattgttaataagaatgtaatttcatgatacaagtatttaataccttttttaagtcagtaaatattctagccatcaataaattgcagtagagtattaagaggggacaggatgagtttactcttaaaattaatcagtatcaaactaagtctactgtgtgtgtttttttttttgttttttgtttttgtttgtttactattatagtaagtctagtcttatttaaattggatttttgtattcaagtttatatgacaaaatagactagatcagcgctggttgtaaatgcatgctgtacctcactgttttctccccatcatgccgctaaacttgctcgccaggttgtgcttaacttgtggtgaactggacttgattctgttttgttttgtttttttaaaaaaaaaaaacaaaaatgtaagggacagtgcataagccttttctttgttaagtagtggtgttttgctttttcttcaggattggatggcatgttgtccacaggaatgcctactgcagggctaacactggcaatatggcagctttaaattctgagttactacagtctccatgtcaaagcataatgtgtagcatatcagcaataactacatatttatagaaaacactttttcactttactgagccaattcatttaattgtcaaatgtctatatccatggtttaaatggcaacatatctataagtatgtatacacattatatttaagcttttctctgggccaaactgcttcatccttttttctttcttttttttttttttagccttatgatgaatttgtttgaagggcattttctttatgaacaaaggcttggatgcatattcctttctttctgtgaatgggtattattccctgaggaaagttgcacagtgaaaaccagtctggttgtgacccactacatgttttgtttttaatcactattacctgagttgaactttgctcaccatgtttgtacttgttggtctgtttaatgaagtttggttgatgccatcctttgcactgccgaagcgtaatcttgtgtattacttagctctctgctgatctcagtatggacagtgtaacaacaaaaccaaaatggctggacagacttcttgtgttttgtaaatataaactaggacagttctgtaggtttgttcagtgtgctagtggagtatttccttaatgtaaaacttcacttaacagagagattctttgtttagcaagcttggagtgatgataaaatggtaagaaataatataaatgttgaagaaagcatcacaacagaactataggagtctaaatttaataaatctttaaaaaaaaccagtgtctagaatatataccatgttttattatttaaaatcattgtcttaaatttttgttcaaaaaataaaaatttgaatacaatcaaaaaaaaaaaaaaaaaaaaaaaaaaaaaaaaaaaaaaaaaaaaaaaaaaaaaaaaaaaaaaaagagagggggggcgcgcgcccaaaaaaaaccccggagggggggccccatggcgcgcgccccccttttgggaaaagggggcgcccccaaaggggggggttaaagaggcagcagcgcgggcggcggcattaaaaacacacggcgagcgggcgaaacacgtgccccccgggggacccctgggggggaggaaaccactcaccgacggggagggcacaacatgtgcggcaccaaaccccacacgagataatagcggccgcgaggagacataacacagtacagagccggcatccgtgtgcacaacgtg

SEQ ID NO: 425269 - DNA, 4087 bp, Homo sapiens
ttccgggggcgggacgcgccgaggagtggggcgcgagccgccggttttgattagtgcgcggagctgcggcggtggagctgctcggccgggagcccggcggcgagacggagaggcggcggaggtgcccgcgcgcagggtctggtgggcggccgcgaggctcgggagaggcgaaccggagcgcggggccgcggtcgccccgaccagagccgggagaccgcagcacccgcagccgcccgcgagcgcgccgaagacagcgcgcaggcgagagcgcgcgggcgggggcgcgcaggccctgcccgccccttccgtccccacccccctccgccctttcctctccccaccttcctctcgcctcccgcgcccccgcaccgggcgcccaccctgtcctcctcctgcgggagcgttgtccgtgttggcggccgcagcgggccgggccggtccggcgggccgggggatggcgctgctggacctggccttggagggaatggccgtcttcgggttcgtcctcttcttggtgctgtggctgatgcatttcatggctatcatctacacccgattacacctcaacaagaaggcaactgacaaacagccttatagcaagctcccaggtgtctctcttctgaaaccactgaaaggggtagatcctaacttaatcaacaacctggaaacattctttgaattggattatcccaaacctttatttttctcggtagcaccaatgaaaagaatagagaagacacagatgtgatagccttaatgcagcacttattaatatgaagtgctcctttgtgtacaagatcatgatgatccagccattgatgtatgtaagaagcttcttggaaaatatccaaatgttgatgctagattgtttataggtggcaaaaaagttggcattaatcctaaaattaataatttaatgccaggatatgaagttgcaaagtatgatcttatatggatttgtgatagtggaataagagtaattccagatacgcttactgacatggtgaatcaaatgacagaaaaagtaggcttggttcacgggctgccttacgtagcagacagacagggctttgctgccaccttagagcaggtatattttggaacttcacatccaagatactatatctctgccaatgtaactggtttcaaatgtgtgacaggaatgtcttgtttaatgagaaaagatgtgttggatcaagcaggaggacttatagcttttgctcagtacattgccgaagattactttatggccaaagcgatagctgaccgaggttggaggtttgcaatgtccactcaagttgcaatgcaaaactctggctcatattcaatttctcagtttcaatccagaatgatcaggtggaccaaactacgaattaacatgcttcctgctacaataatttgtgagccaatttcagaatgctttgttgccagtttaattattggatgggcagcccaccatgtgttcagatgggatattatggtatttttcatgtgtcattgcctggcatggtttatatttgactacattcaactcaggggtgtccagggtggcacactgtgtttttcaaaacttgattatgcagtcgcctggttcatccgcgaatccatgacaatatacatttttttgtctgcattatgggacccaactataagctggagaactggtcgctacagattacgctgtgggggtacagcagaggaaatcctagatgtataactacagctttgtgactgtatataaaggaaaaaagagaagtattataaattatgtttatataaatgcttttaaaaatctaccttctgtagttttatcacatgtatgttttggtatctgttctttaatttatttttgcatggcacttgcatctgtgaaaaaaaaaaaaaacacatctgtagtcttggccaaatgatacactttattttgtggaagtagagaatcaagagaattggttctaggaacctgggttcgttcatcattgttgtttatttttttaaaataaataaataaatatatatatagatgctctgcaacaaactctgtgacagtatccttcagtagagaaagtttcttacttgtgagtacactcttttagaacatttacgggtggcagcagctttgctttagagtttagaagataatagaaggaatgactattcatgtccaaagtgaatggttttgtgcagtgaacaacacatggcgaggtactaactgagaaactttttcatgctttatgcctacctcttgtagttgttgcagagcaaatataaattgtaataagatagctaggccttgcagaaacaaacagaaaaacttaaaaaaaaatgatataagagctggagtctagtatttatatgaatctgtgagagataatttttttggtctcactgcaatgaaccaaaagcggctgagtttggtttttaattgtagccatgtattgaaggcatctttttgaccaactcttgttggttctgtcttgaaccattgttaatcactgtgctgtaattagtatagctaaatcttttccttccttgctcctcccccagcccaccccgtcttcccttaacattttttcagggggggttgggagtggtttcattttagtgtgagtggatgttttgatagttgtaaggaaaaaatgcatttcagacacatttcacacatgagctattttcttacacagtatgtcttattgttaataagaatgtaatttcatgatacaagtatttaataccttttttaagtcagtaaatattctagccatcaataaattgcagtagagtattaagaggggacaggatgagtttactcttaaaattaatcagtatcaaactaagtctactgtgtgtgtttttttttttgttttttgtttttgtttgtttactattatagtaagtctagtcttatttaaattggatttttgtattcaagtttatatgacaaaatagactagatcagcgctggttgtaaatgcatgctgtacctcactgttttctccccatcatgccgctaaacttgctcgccaggttgtgcttaacttgtggtgaactggacttgattctgttttgttttgtttttttaaaaaaaaaaaacaaaaatgtaagggacagtgcataagccttttctttgttaagtagtggtgttttgctttttcttcaggattggatggcatgttgtccacaggaatgcctactgcagggctaacactggcaatatggcagctttaaattctgagttactacagtctccatgtcaaagcataatgtgtagcatatcagcaataactacatatttatagaaaacactttttcactttactgagccaattcatttaattgtcaaatgtctatatccatggtttaaatggcaacatatctataagtatgtatacacattatatttaagcttttctctgggccaaactgcttcatccttttttctttcttttttttttttttagccttatgatgaatttgtttgaagggcattttctttatgaacaaaggcttggatgcatattcctttctttctgtgaatgggtattattccctgaggaaagttgcacagtgaaaaccagtctggttgtgacccactacatgttttgtttttaatcactattacctgagttgaactttgctcaccatgtttgtacttgttggtctgtttaatgaagtttggttgatgccatcctttgcactgccgaagcgtaatcttgtgtattacttagctctctgctgatctcagtatggacagtgtaacaacaaaaccaaaatggctggacagacttcttgtgttttgtaaatataaactaggacagttctgtaggtttgttcagtgtgctagtggagtatttccttaatgtaaaacttcacttaacagagagattctttgtttagcaagcttggagtgatgataaaatggtaagaaataatataaatgttgaagaaagcatcacaacagaactataggagtctaaatttaataaatctttaaaaaaaaccagtgtctagaatatataccatgttttattatttaaaatcattgtcttaaatttttgttcaaaaaataaaaatttgaatacaatcaaaa

SEQ ID NO: 425270 - DNA, 3745 bp, Homo sapiens
ttccgggggcgggacgcgccgaggagtggggcgcgagccgccggttttgattagtgcgcggagctgcggcggtggagctgctcggccgggagcccggcggcgagacggagaggcggcggaggtgcccgcgcgcagggtctggtgggcggccgcgaggctcgggagaggcgaaccggagcgcggggccgcggtcgccccgaccagagccgggagaccgcagcacccgcagccgcccgcgagcgcgccgaagacagcgcgcaggcgagagcgcgcgggcgggggcgcgcaggccctgcccgccccttccgtccccacccccctccgccctttcctctccccaccttcctctcgcctcccgcgcccccgcaccgggcgcccaccctgtcctcctcctgcgggagcgttgtccgtgttggcggccgcagcgggccgggccggtccggcgggccgggggatggcgctgctggacctggccttggagggaatggccgtcttcgggttcgtcctcttcttggtgctgtggctgatgcatttcatggctatcatctacacccgattacacctcaacaagaaggcaactgacaaacagccttatagcaagctcccaggtgtctctcttctgaaaccactgaaaggggtagatcctaacttaatcaacaacctggaaacattctttgaattggattatcccaaatatgaagtgctcctttgtgtacaagatcatgatgatccagccattgatgtatgtaagaagcttcttggaaaatatccaagatactatatctctgccaatgtaactggtttcaaatgtgtgacaggaatgtcttgtttaatgagaaaagatgtgttggatcaagcaggaggacttatagcttttgctcagtacattgccgaagattactttatggccaaagcgatagctgaccgaggttggaggtttgcaatgtccactcaagttgcaatgcaaaactctggctcatattcaatttctcagtttcaatccagaatgatcaggtggaccaaactacgaattaacatgcttcctgctacaataatttgtgagccaatttcagaatgctttgttgccagtttaattattggatgggcagcccaccatgtgttcagatgggatattatggtatttttcatgtgtcattgcctggcatggtttatatttgactacattcaactcaggggtgtccagggtggcacactgtgtttttcaaaacttgattatgcagtcgcctggttcatccgcgaatccatgacaatatacatttttttgtctgcattatgggacccaactataagctggagaactggtcgctacagattacgctgtgggggtacagcagaggaaatcctagatgtataactacagctttgtgactgtatataaaggaaaaaagagaagtattataaattatgtttatataaatgcttttaaaaatctaccttctgtagttttatcacatgtatgttttggtatctgttctttaatttatttttgcatggcacttgcatctgtgaaaaaaaaaaaaaacacatctgtagtcttggccaaatgatacactttattttgtggaagtagagaatcaagagaattggttctaggaacctgggttcgttcatcattgttgtttatttttttaaaataaataaataaatatatatatagatgctctgcaacaaactctgtgacagtatccttcagtagagaaagtttcttacttgtgagtacactcttttagaacatttacgggtggcagcagctttgctttagagtttagaagataatagaaggaatgactattcatgtccaaagtgaatggttttgtgcagtgaacaacacatggcgaggtactaactgagaaactttttcatgctttatgcctacctcttgtagttgttgcagagcaaatataaattgtaataagatagctaggccttgcagaaacaaacagaaaaacttaaaaaaaaatgatataagagctggagtctagtatttatatgaatctgtgagagataatttttttggtctcactgcaatgaaccaaaagcggctgagtttggtttttaattgtagccatgtattgaaggcatctttttgaccaactcttgttggttctgtcttgaaccattgttaatcactgtgctgtaattagtatagctaaatcttttccttccttgctcctcccccagcccaccccgtcttcccttaacattttttcagggggggttgggagtggtttcattttagtgtgagtggatgttttgatagttgtaaggaaaaaatgcatttcagacacatttcacacatgagctattttcttacacagtatgtcttattgttaataagaatgtaatttcatgatacaagtatttaataccttttttaagtcagtaaatattctagccatcaataaattgcagtagagtattaagaggggacaggatgagtttactcttaaaattaatcagtatcaaactaagtctactgtgtgtgtttttttttttgttttttgtttttgtttgtttactattatagtaagtctagtcttatttaaattggatttttgtattcaagtttatatgacaaaatagactagatcagcgctggttgtaaatgcatgctgtacctcactgttttctccccatcatgccgctaaacttgctcgccaggttgtgcttaacttgtggtgaactggacttgattctgttttgttttgtttttttaaaaaaaaaaaacaaaaatgtaagggacagtgcataagccttttctttgttaagtagtggtgttttgctttttcttcaggattggatggcatgttgtccacaggaatgcctactgcagggctaacactggcaatatggcagctttaaattctgagttactacagtctccatgtcaaagcataatgtgtagcatatcagcaataactacatatttatagaaaacactttttcactttactgagccaattcatttaattgtcaaatgtctatatccatggtttaaatggcaacatatctataagtatgtatacacattatatttaagcttttctctgggccaaactgcttcatccttttttctttcttttttttttttttagccttatgatgaatttgtttgaagggcattttctttatgaacaaaggcttggatgcatattcctttctttctgtgaatgggtattattccctgaggaaagttgcacagtgaaaaccagtctggttgtgacccactacatgttttgtttttaatcactattacctgagttgaactttgctcaccatgtttgtacttgttggtctgtttaatgaagtttggttgatgccatcctttgcactgccgaagcgtaatcttgtgtattacttagctctctgctgatctcagtatggacagtgtaacaacaaaaccaaaatggctggacagacttcttgtgttttgtaaatataaactaggacagttctgtaggtttgttcagtgtgctagtggagtatttccttaatgtaaaacttcacttaacagagagattctttgtttagcaagcttggagtgatgataaaatggtaagaaataatataaatgttgaagaaagcatcacaacagaactataggagtctaaatttaataaatctttaaaaaaaaccagtgtctagaatatataccatgttttattatttaaaatcattgtcttaaatttttgttcaaaaaataaaaatttgaatacaatcaaaa

SEQ ID NO: 425271 - DNA, 3465 bp, Homo sapiens
gattgtgtcccctccccaccccccaccccccaaaaaaataggattgtcccgaaggttgatatacctatgggtggtgtgtgtatgcatgcatgtatatatacacacatatacgtaacatacaaatatgtatattgatcccagtaaagtagatgtgtgtgtatatttacatgaacaccctaaaaacaagatacattgaatatttgttaatattttatatatcaatgagtgatatttttaccttattttgtatctaaattaagttttatttggatgcatttttagcttactaactgtgcttgctctatgaaagcaatattgtctaccactttttattcaggtagtctacgtaagaataataagatattcactcaatcatacttataaaaaaaccattgggaaaaacagttcgtgaacaccatgcttttaacatgaaattctaatcatacacgtttgtggttttttgggcaggtatattttggaacttcacatccaagatactatatctctgccaatgtaactggtttcaaatgtgtgacaggaatgtcttgtttaatgagaaaagatgtgttggatcaagcaggaggacttatagcttttgctcagtacattgccgaagattactttatggccaaagcgatagctgaccgaggttggaggtttgcaatgtccactcaagttgcaatgcaaaactctggctcatattcaatttctcagtttcaatccagaatgatcaggtggaccaaactacgaattaacatgcttcctgctacaataatttgtgagccaatttcagaatgctttgttgccagtttaattattggatgggcagcccaccatgtgttcagatgggatattatggtatttttcatgtgtcattgcctggcatggtttatatttgactacattcaactcaggggtgtccagggtggcacactgtgtttttcaaaacttgattatgcagtcgcctggttcatccgcgaatccatgacaatatacatttttttgtctgcattatgggacccaactataagctggagaactggtcgctacagattacgctgtgggggtacagcagaggaaatcctagatgtataactacagctttgtgactgtatataaaggaaaaaagagaagtattataaattatgtttatataaatgcttttaaaaatctaccttctgtagttttatcacatgtatgttttggtatctgttctttaatttatttttgcatggcacttgcatctgtgaaaaaaaaaaaaaacacatctgtagtcttggccaaatgatacactttattttgtggaagtagagaatcaagagaattggttctaggaacctgggttcgttcatcattgttgtttatttttttaaaataaataaataaatatatatatagatgctctgcaacaaactctgtgacagtatccttcagtagagaaagtttcttacttgtgagtacactcttttagaacatttacgggtggcagcagctttgctttagagtttagaagataatagaaggaatgactattcatgtccaaagtgaatggttttgtgcagtgaacaacacatggcgaggtactaactgagaaactttttcatgctttatgcctacctcttgtagttgttgcagagcaaatataaattgtaataagatagctaggccttgcagaaacaaacagaaaaacttaaaaaaaaatgatataagagctggagtctagtatttatatgaatctgtgagagataatttttttggtctcactgcaatgaaccaaaagcggctgagtttggtttttaattgtagccatgtattgaaggcatctttttgaccaactcttgttggttctgtcttgaaccattgttaatcactgtgctgtaattagtatagctaaatcttttccttccttgctcctcccccagcccaccccgtcttcccttaacattttttcagggggggttgggagtggtttcattttagtgtgagtggatgttttgatagttgtaaggaaaaaatgcatttcagacacatttcacacatgagctattttcttacacagtatgtcttattgttaataagaatgtaatttcatgatacaagtatttaataccttttttaagtcagtaaatattctagccatcaataaattgcagtagagtattaagaggggacaggatgagtttactcttaaaattaatcagtatcaaactaagtctactgtgtgtgtttttttttttgttttttgtttttgtttgtttactattatagtaagtctagtcttatttaaattggatttttgtattcaagtttatatgacaaaatagactagatcagcgctggttgtaaatgcatgctgtacctcactgttttctccccatcatgccgctaaacttgctcgccaggttgtgcttaacttgtggtgaactggacttgattctgttttgttttgtttttttaaaaaaaaaaaacaaaaatgtaagggacagtgcataagccttttctttgttaagtagtggtgttttgctttttcttcaggattggatggcatgttgtccacaggaatgcctactgcagggctaacactggcaatatggcagctttaaattctgagttactacagtctccatgtcaaagcataatgtgtagcatatcagcaataactacatatttatagaaaacactttttcactttactgagccaattcatttaattgtcaaatgtctatatccatggtttaaatggcaacatatctataagtatgtatacacattatatttaagcttttctctgggccaaactgcttcatccttttttctttcttttttttttttttagccttatgatgaatttgtttgaagggcattttctttatgaacaaaggcttggatgcatattcctttctttctgtgaatgggtattattccctgaggaaagttgcacagtgaaaaccagtctggttgtgacccactacatgttttgtttttaatcactattacctgagttgaactttgctcaccatgtttgtacttgttggtctgtttaatgaagtttggttgatgccatcctttgcactgccgaagcgtaatcttgtgtattacttagctctctgctgatctcagtatggacagtgtaacaacaaaaccaaaatggctggacagacttcttgtgttttgtaaatataaactaggacagttctgtaggtttgttcagtgtgctagtggagtatttccttaatgtaaaacttcacttaacagagagattctttgtttagcaagcttggagtgatgataaaatggtaagaaataatataaatgttgaagaaagcatcacaacagaactataggagtctaaatttaataaatctttaaaaaaaaccagtgtctagaatatataccatgttttattatttaaaatcattgtcttaaatttttgttcaaaaaataaaaatttgaatacaatcaaaa

SEQ ID NO: 425272 - DNA, 3482 bp, Homo sapiens
ataggcacccgccgccacactcagctacttttttttgtatgttagtagaggcggggtttcaccatgttggccaggctagtcttgaactcctgacctcgtgatccgcccgcctcagcctcccaaagtgctgggattacaggcatgagccactgcatccagcctaaaatacttgtttttaaaggagatcactgccttgtgtgagaattcttttaaattttttaaaaactgaagtgtgttttaaatacaaattctgtcatgattgtgttcatgtggttcatggtttcctagtgtctcccatgagatccataatgccactttctgtttacatgtcttgttgtttggttagtagtcatcagagactaatctattaaatatggagccctctccattttttttcaaaatgactgcattttaagtttcttaaattgtaaagtaaggtgggtacagtttcttctagttcttagatggtgctgtcacgggccagcataattgctaaaacatccatacgtatggtagaccttaagtcatgtgctaatcatgaaagctgggctcaccctgaataccggcagttgcctggtctttataatgattactgaatgcataaccagttacgcttgcatgtgttcatcatcataacttattttctaattatcttaattttcagaggttggaggtttgcaatgtccactcaagttgcaatgcaaaactctggctcatattcaatttctcagtttcaatccagaatgatcaggtggaccaaactacgaattaacatgcttcctgctacaataatttgtgagccaatttcagaatgctttgttgccagtttaattattggatgggcagcccaccatgtgttcagatgggatattatggtatttttcatgtgtcattgcctggcatggtttatatttgactacattcaactcaggggtgtccagggtggcacactgtgtttttcaaaacttgattatgcagtcgcctggttcatccgcgaatccatgacaatatacatttttttgtctgcattatgggacccaactataagctggagaactggtcgctacagattacgctgtgggggtacagcagaggaaatcctagatgtataactacagctttgtgactgtatataaaggaaaaaagagaagtattataaattatgtttatataaatgcttttaaaaatctaccttctgtagttttatcacatgtatgttttggtatctgttctttaatttatttttgcatggcacttgcatctgtgaaaaaaaaaaaaaacacatctgtagtcttggccaaatgatacactttattttgtggaagtagagaatcaagagaattggttctaggaacctgggttcgttcatcattgttgtttatttttttaaaataaataaataaatatatatatagatgctctgcaacaaactctgtgacagtatccttcagtagagaaagtttcttacttgtgagtacactcttttagaacatttacgggtggcagcagctttgctttagagtttagaagataatagaaggaatgactattcatgtccaaagtgaatggttttgtgcagtgaacaacacatggcgaggtactaactgagaaactttttcatgctttatgcctacctcttgtagttgttgcagagcaaatataaattgtaataagatagctaggccttgcagaaacaaacagaaaaacttaaaaaaaaatgatataagagctggagtctagtatttatatgaatctgtgagagataatttttttggtctcactgcaatgaaccaaaagcggctgagtttggtttttaattgtagccatgtattgaaggcatctttttgaccaactcttgttggttctgtcttgaaccattgttaatcactgtgctgtaattagtatagctaaatcttttccttccttgctcctcccccagcccaccccgtcttcccttaacattttttcagggggggttgggagtggtttcattttagtgtgagtggatgttttgatagttgtaaggaaaaaatgcatttcagacacatttcacacatgagctattttcttacacagtatgtcttattgttaataagaatgtaatttcatgatacaagtatttaataccttttttaagtcagtaaatattctagccatcaataaattgcagtagagtattaagaggggacaggatgagtttactcttaaaattaatcagtatcaaactaagtctactgtgtgtgtttttttttttgttttttgtttttgtttgtttactattatagtaagtctagtcttatttaaattggatttttgtattcaagtttatatgacaaaatagactagatcagcgctggttgtaaatgcatgctgtacctcactgttttctccccatcatgccgctaaacttgctcgccaggttgtgcttaacttgtggtgaactggacttgattctgttttgttttgtttttttaaaaaaaaaaaacaaaaatgtaagggacagtgcataagccttttctttgttaagtagtggtgttttgctttttcttcaggattggatggcatgttgtccacaggaatgcctactgcagggctaacactggcaatatggcagctttaaattctgagttactacagtctccatgtcaaagcataatgtgtagcatatcagcaataactacatatttatagaaaacactttttcactttactgagccaattcatttaattgtcaaatgtctatatccatggtttaaatggcaacatatctataagtatgtatacacattatatttaagcttttctctgggccaaactgcttcatccttttttctttcttttttttttttttagccttatgatgaatttgtttgaagggcattttctttatgaacaaaggcttggatgcatattcctttctttctgtgaatgggtattattccctgaggaaagttgcacagtgaaaaccagtctggttgtgacccactacatgttttgtttttaatcactattacctgagttgaactttgctcaccatgtttgtacttgttggtctgtttaatgaagtttggttgatgccatcctttgcactgccgaagcgtaatcttgtgtattacttagctctctgctgatctcagtatggacagtgtaacaacaaaaccaaaatggctggacagacttcttgtgttttgtaaatataaactaggacagttctgtaggtttgttcagtgtgctagtggagtatttccttaatgtaaaacttcacttaacagagagattctttgtttagcaagcttggagtgatgataaaatggtaagaaataatataaatgttgaagaaagcatcacaacagaactataggagtctaaatttaataaatctttaaaaaaaaccagtgtctagaatatataccatgttttattatttaaaatcattgtcttaaatttttgttcaaaaaataaaaatttgaatacaatcaaaa

SEQ ID NO: 425273 - DNA, 2739 bp, Homo sapiens
aagatagcagttattttaatgcttcattaacaattagcattttcttgaacggtataacatggcagttaaattacataaggaagcagacttgattttacatagtatacttagaaaagtgaaatccaagaatttaattttttaaccttgtctttagtttgacagtgagtgaaattaaaaaatttttttttccattcctagggtggcacactgtgtttttcaaaacttgattatgcagtcgcctggttcatccgcgaatccatgacaatatacatttttttgtctgcattatgggacccaactataagctggagaactggtcgctacagattacgctgtgggggtacagcagaggaaatcctagatgtataactacagctttgtgactgtatataaaggaaaaaagagaagtattataaattatgtttatataaatgcttttaaaaatctaccttctgtagttttatcacatgtatgttttggtatctgttctttaatttatttttgcatggcacttgcatctgtgaaaaaaaaaaaaaacacatctgtagtcttggccaaatgatacactttattttgtggaagtagagaatcaagagaattggttctaggaacctgggttcgttcatcattgttgtttatttttttaaaataaataaataaatatatatatagatgctctgcaacaaactctgtgacagtatccttcagtagagaaagtttcttacttgtgagtacactcttttagaacatttacgggtggcagcagctttgctttagagtttagaagataatagaaggaatgactattcatgtccaaagtgaatggttttgtgcagtgaacaacacatggcgaggtactaactgagaaactttttcatgctttatgcctacctcttgtagttgttgcagagcaaatataaattgtaataagatagctaggccttgcagaaacaaacagaaaaacttaaaaaaaaatgatataagagctggagtctagtatttatatgaatctgtgagagataatttttttggtctcactgcaatgaaccaaaagcggctgagtttggtttttaattgtagccatgtattgaaggcatctttttgaccaactcttgttggttctgtcttgaaccattgttaatcactgtgctgtaattagtatagctaaatcttttccttccttgctcctcccccagcccaccccgtcttcccttaacattttttcagggggggttgggagtggtttcattttagtgtgagtggatgttttgatagttgtaaggaaaaaatgcatttcagacacatttcacacatgagctattttcttacacagtatgtcttattgttaataagaatgtaatttcatgatacaagtatttaataccttttttaagtcagtaaatattctagccatcaataaattgcagtagagtattaagaggggacaggatgagtttactcttaaaattaatcagtatcaaactaagtctactgtgtgtgtttttttttttgttttttgtttttgtttgtttactattatagtaagtctagtcttatttaaattggatttttgtattcaagtttatatgacaaaatagactagatcagcgctggttgtaaatgcatgctgtacctcactgttttctccccatcatgccgctaaacttgctcgccaggttgtgcttaacttgtggtgaactggacttgattctgttttgttttgtttttttaaaaaaaaaaaacaaaaatgtaagggacagtgcataagccttttctttgttaagtagtggtgttttgctttttcttcaggattggatggcatgttgtccacaggaatgcctactgcagggctaacactggcaatatggcagctttaaattctgagttactacagtctccatgtcaaagcataatgtgtagcatatcagcaataactacatatttatagaaaacactttttcactttactgagccaattcatttaattgtcaaatgtctatatccatggtttaaatggcaacatatctataagtatgtatacacattatatttaagcttttctctgggccaaactgcttcatccttttttctttcttttttttttttttagccttatgatgaatttgtttgaagggcattttctttatgaacaaaggcttggatgcatattcctttctttctgtgaatgggtattattccctgaggaaagttgcacagtgaaaaccagtctggttgtgacccactacatgttttgtttttaatcactattacctgagttgaactttgctcaccatgtttgtacttgttggtctgtttaatgaagtttggttgatgccatcctttgcactgccgaagcgtaatcttgtgtattacttagctctctgctgatctcagtatggacagtgtaacaacaaaaccaaaatggctggacagacttcttgtgttttgtaaatataaactaggacagttctgtaggtttgttcagtgtgctagtggagtatttccttaatgtaaaacttcacttaacagagagattctttgtttagcaagcttggagtgatgataaaatggtaagaaataatataaatgttgaagaaagcatcacaacagaactataggagtctaaatttaataaatctttaaaaaaaaccagtgtctagaatatataccatgttttattatttaaaatcattgtcttaaatttttgttcaaaaaataaaaatttgaatacaatcaaaa

SEQ ID NO: 425274 - DNA, 859 bp, Homo sapiens
agcagcagtcaagcagtacagcagctatcagagaaaagcttaaatataatgtgtatacatatttatagaaaacactttttcactttactgagccaattcatttaattgtcaaatgtctatatccatggtttaaatggcaacatatctataagtatgtatacacattatatttaagcttttctctgggccaaactgcttcatccttttttctttcttttttttttttttagccttatgatgaatttgtttgaagggcattttctttatgaacaaaggcttggatgcatattcctttctttctgtgaatgggtattattccctgaggaaagttgcacagtgaaaaccagtctggttgtgacccactacatgttttgtttttaatcactattacctgagttgaactttgctcaccatgtttgtacttgttggtctgtttaatgaagtttggttgatgccatcctttgcactgccgaagcgtaatcttgtgtattacttagctctctgctgatctcagtatggacagtgtaacaacaaaaccaaaatggctggacagacttcttgtgttttgtaaatataaactaggacagttctgtaggtttgttcagtgtgctagtggagtatttccttaatgtaaaacttcacttaacagagagattctttgtttagcaagcttggagtgatgataaaatggtaagaaataatataaatgttgaagaaagcatcacaacagaactataggagtctaaatttaataaatctttaaaaaaaaccagtgtctagaatatataccatgttttattatttaaaatcattgtcttaaatttttgttcaaaaaataaaaatttgaatacaatcaaaa

SEQ ID NO: 425275 - DNA, 1130 bp, Homo sapiens
ttccgggggcgggacgcgccgaggagtggggcgcgagccgccggttttgattagtgcgcggagctgcggcggtggagctgctcggccgggagcccggcggcgagacggagaggcggcggaggtgcccgcgcgcagggtctggtgggcggccgcgaggctcgggagaggcgaaccggagcgcggggccgcggtcgccccgaccagagccgggagaccgcagcacccgcagccgcccgcgagcgcgccgaagacagcgcgcaggcgagagcgcgcgggcgggggcgcgcaggccctgcccgccccttccgtccccacccccctccgccctttcctctccccaccttcctctcgcctcccgcgcccccgcaccgggcgcccaccctgtcctcctcctgcgggagcgttgtccgtgttggcggccgcagcgggccgggccggtccggcgggccgggggatggcgctgctggacctggccttggagggaatggccgtcttcgggttcgtcctcttcttggtgctgtggctgatgcatttcatggctatcatctacacccgattacacctcaacaagaaggcaactgacaaacagccttatagcaagctcccaggtgtctctcttctgaaaccactgaaaggggtagatcctaacttaatcaacaacctggaaacattctttgaattggattatcccaaatatgaagtgctcctttgtgtacaagatcatgatgatccagccattgatgtatgtaagaagcttcttggaaaatatccaaatgttgatgctagattgtttataggtggcaaaaaagttggcattaatcctaaaattaataatttaatgccaggatatgaagttgcaaagtatgatcttatatggatttgtgatagtggaataagagtaattccagatacgcttactgacatggtgaatcaaatgacagaaaaagtaggcttggttcacgggctgccttacgtagcagacagacagggctttgctgccaccttagagcagatggagtctcgctctgtcgcccaggctagagtgcagtggcgcgatctcggctcactgcaagctccgcctcccgggttcacgccattctcctgcctcagtcgactgagtagctgggact

SEQ ID NO: 425276 - DNA, 948 bp, Homo sapiens
ttccgggggcgggacgcgccgaggagtggggcgcgagccgccggttttgattagtgcgcggagctgcggcggtggagctgctcggccgggagcccggcggcgagacggagaggcggcggaggtgcccgcgcgcagggtctggtgggcggccgcgaggctcgggagaggcgaaccggagcgcggggccgcggtcgccccgaccagagccgggagaccgcagcacccgcagccgcccgcgagcgcgccgaagacagcgcgcaggcgagagcgcgcgggcgggggcgcgcaggccctgcccgccccttccgtccccacccccctccgccctttcctctccccaccttcctctcgcctcccgcgcccccgcaccgggcgcccaccctgtcctcctcctgcgggagcgttgtccgtgttggcggccgcagcgggccgggccggtccggcgggccgggggatggcgctgctggacctggccttggagggaatggccgtcttcgggttcgtcctcttcttggtgctgtggctgatgcatttcatggctatcatctacacccgattacacctcaacaagaaggcaactgacaaacagccttatagcaagctcccaggtgtctctcttctgaaaccactgaaaggggtagatcctaacttaatcaacaacctggaaacattctttgaattggattatcccaaagtaagttcagtgttacggttttttgttttgttttgttttgttttgttcccctcatgataaacatttagggattttaacactgtataaggtgaaggtattaaaaattcatgatgatattggcctcataaaatataacctttagtagtagtcatcacagaacagaaataggttgaggaaggggtgtaaattccctttctaaccacctatatgtccgtgtgaagtagagatccctgagtaaaccttctgaaactcag

SEQ ID NO: 425277 - DNA, 3955 bp, Homo sapiens
ttccgggggcgggacgcgccgaggagtggggcgcgagccgccggttttgattagtgcgcggagctgcggcggtggagctgctcggccgggagcccggcggcgagacggagaggcggcggaggtgcccgcgcgcagggtctggtgggcggccgcgaggctcgggagaggcgaaccggagcgcggggccgcggtcgccccgaccagagccgggagaccgcagcacccgcagccgcccgcgagcgcgccgaagacagcgcgcaggcgagagcgcgcgggcgggggcgcgcaggccctgcccgccccttccgtccccacccccctccgccctttcctctccccaccttcctctcgcctcccgcgcccccgcaccgggcgcccaccctgtcctcctcctgcgggagcgttgtccgtgttggcggccgcagcgggccgggccggtccggcgggccgggggatggcgctgctggacctggccttggagggaatggccgtcttcgggttcgtcctcttcttggtgctgtggctgatgcatttcatggctatcatctacacccgattacacctcaacaagaaggcaactgacaaacagccttatagcaagctcccaggtgtctctcttctgaaaccactgaaaggggtagatcctaacttaatcaacaacctggaaacattctttgaattggattatcccaaatatgaagtgctcctttgtgtacaagatcatgatgatccagccattgatgtatgtaagaagcttcttggaaaatatccaaatgttgatgctagattgtttataggtggcaaaaaagttggcattaatcctaaaattaataatttaatgccaggatatgaagttgcaaagtatgatcttatatggatttgtgatagtggaataagagtaattccagatacgcttactgacatggtgaatcaaatgacagaaaaagtaggcttggttcacgggctgccttacgtagcagacagacagggctttgctgccaccttagagcaggtatattttggaacttcacatccaagatactatatctctgccaatgtaactggtttcaaatgtgtgacaggaatgtcttgtttaatgagaaaagatgtgttggatcaagcaggaggacttatagcttttgctcagtacattgccgaagattactttatggccaaagcgatagctgaccgaggttggaggtttgcaatgtccactcaagttgcaatgcaaaactctggctcatattcaatttctcagtttcaatccagaatgatcaggtggaccaaactacgaattaacatgcttcctgctacaataatttgtgagccaatttcagaatgctttgttgccagtttaattattggatgggcagcccaccatgtgttcagatgggatattatggtatttttcatgtgtcattgcctggcatggtttatatttgactacattcaactcaggggtgtccagggtggcacactgtgtttttcaaaacttgattatgcagtcgcctggttcatccgcgaatccatgacaatatacatttttttgtctgcattatgggacccaactataagctggagaactggtcgctacagattacgctgtgggggtacagcagaggaaatcctagatgtataactacagctttgtgactgtatataaaggaaaaaagagaagtattataaattatgtttatataaatgcttttaaaaatctaccttctgtagttttatcacatgtatgttttggtatctgttctttaatttatttttgcatggcacttgcatctgtgaaaaaaaaaaaaaacacatctgtagtcttggccaaatgatacactttattttgtggaagtagagaatcaagagaattggttctaggaacctgggttcgttcatcattgttgtttatttttttaaaataaataaataaatatatatatagatgctctgcaacaaactctgtgacagtatccttcagtagagaaagtttcttacttgtgagtacactcttttagaacatttacgggtggcagcagctttgctttagagtttagaagataatagaaggaatgactattcatgtccaaagtgaatggttttgtgcagtgaacaacacatggcgaggtactaactgagaaactttttcatgctttatgcctacctcttgtagttgttgcagagcaaatataaattgtaataagatagctaggccttgcagaaacaaacagaaaaacttaaaaaaaaatgatataagagctggagtctagtatttatatgaatctgtgagagataatttttttggtctcactgcaatgaaccgaccaactcttgttggttctgtcttgaaccattgttaatcactgtgctgtaattagtatagctaaatcttttccttccttgctcctcccccagcccaccccgtcttcccttaacattttttcagggggggttgggagtggtttcattttagtgtgagtggatgttttgatagttgtaaggaaaaaatgcatttcagacacatttcacacatgagctattttcttacacagtatgtcttattgttaataagaatgtaatttcatgatacaagtatttaataccttttttaagtcagtaaatattctagccatcaataaattgcagtagagtattaagaggggacaggatgagtttactcttaaaattaatcagtatcaaactaagtctactgtgtgtgtttttttttttgttttttgtttttgtttgtttactattatagtaagtctagtcttatttaaattggatttttgtattcaagtttatatgacaaaatagactagatcagcgctggttgtaaatgcatgctgtacctcactgttttctccccatcatgccgctaaacttgctcgccaggttgtgcttaacttgtggtgaactggacttgattctgttttgttttgtttttttaaaaaaaaaaaacaaaaatgtaagggacagtgcataagccttttctttgttaagtagtggtgttttgctttttcttcaggattggatggcatgttgtccacaggaatgcctactgcagggctaacactggcaatatggcagctttaaattctgagttactacagtctccatgtcaaagcataatgtgtagcatatcagcaataactacatatttatagaaaacactttttcactttactgagccaattcatttaattgtcaaatgtctatatccatggtttaaatggcaacatatctataagtatgtatacacattatatttaagcttttctctgggccaaactgcttcatccttttttctttcttttttttttttttagccttatgatgaatttgtttgaagggcattttctttatgaacaaaggcttggatgcatattcctttctttctgtgaatgggtattattccctgaggaaagttgcacagtgaaaaccagtctggttgtgacccactacatgttttgtttttaatcactattacctgagttgaactttgctcaccatgtttgtacttgttggtctgtttaatgaagtttggttgatgccatcctttgcactgccgaagcgtaatcttgtgtattacttagctctctgctgatctcagtatggacagtgtaacaacaaaaccaaaatggctggacagacttcttgtgttttgtaaatataaactaggacagttctgtaggtttgttcagtgtgctagtggagtatttccttaatgtaaaacttcacttaacagagagattctttgtttagcaagcttggagtgatgataaaatggtaagaaataatataaatgttgaagaaagcatcacaacagaactataggagtctaaatttaataaatctttaaaaaaaaccagtgtctagaatatataccatgttttattatttaaaatcattgtcttaaatttttgttcaaaaaataaaaatttgaatacaatcaaaa

SEQ ID NO: 425278 - DNA, 4326 bp, Homo sapiens
ttccgggggcgggacgcgccgaggagtggggcgcgagccgccggttttgattagtgcgcggagctgcggcggtggagctgctcggccgggagcccggcggcgagacggagaggcggcggaggtgcccgcgcgcagggtctggtgggcggccgcgaggctcgggagaggcgaaccggagcgcggggccgcggtcgccccgaccagagccgggagaccgcagcacccgcagccgcccgcgagcgcgccgaagacagcgcgcaggcgagagcgcgcgggcgggggcgcgcaggccctgcccgccccttccgtccccacccccctccgccctttcctctccccaccttcctctcgcctcccgcgcccccgcaccgggcgcccaccctgtcctcctcctgcgggagcgttgtccgtgttggcggccgcagcgggccgggccggtccggcgggccgggggatggcgctgctggacctggccttggagggaatggccgtcttcgggttcgtcctcttcttggtgctgtggctgatgcatttcatggctatcatctacacccgattacacctcaacaagaaggcaactgacaaacagccttatagcaagctcccaggtgtctctcttctgaaaccactgaaaggggtagatcctaacttaatcaacaacctggaaacattctttgaattggattatcccaaatatgaagtgctcctttgtgtacaagatcatgatgatccagccattgatgtatgtaagaagcttcttggaaaatatccaaatgttgatgctagattgtttataggtggcaaaaaagttggcattaatcctaaaattaataatttaatgccaggatatgaagttgcaaagtatgatcttatatggatttgtgatagtggaataagagtaattccagatacgcttactgacatggtgaatcaaatgacagaaaaagtaggcttggttcacgggctgccttacgtagcagacagacagggctttgctgccaccttagagcaggtatattttggaacttcacatccaagatactatatctctgccaatgtaactggtttcaaatgtgtgacaggaatgtcttgtttaatgagaaaagatgtgttggatcaagcaggaggacttatagcttttgctcagtacattgccgaagattactttatggccaaagcgatagctgaccgaggttggaggtttgcaatgtccactcaagttgcaatgcaaaactctggctcatattcaatttctcagtttcaatccagaatgatcaggtggaccaaactacgaattaacatgcttcctgctacaataatttgtgagccaatttcagaatgctttgttgccagtttaattattggatgggcagcccaccatgtgttcagatgggatattatggtatttttcatgtgtcattgcctggcatggtttatatttgactacattcaactcaggggtgtccagggtggcacactgtgtttttcaaaacttgattatgcagtcgcctggttcatccgcgaatccatgacaatatacatttttttgtctgcattatgggacccaactataagctggagaactggtcgctacagattacgctgtgggggtacagcagaggaaatcctagatgtataactacagctttgtgactgtatataaaggaaaaaagagaagtattataaattatgtttatataaatgcttttaaaaatctaccttctgtagttttatcacatgtatgttttggtatctgttctttaatttatttttgcatggcacttgcatctgtgaaaaaaaaaaaaaacacatctgtagtcttggccaaatgatacactttattttgtggaagtagagaatcaagagaattggttctaggaacctgggttcgttcatcattgttgtttatttttttaaaataaataaataaatatatatatagatgctctgcaacaaactctgtgacagtatccttcagtagagaaagtttcttacttgtgagtacactcttttagaacatttacgggtggcagcagctttgctttagagtttagaagataatagaaggaatgactattcatgtccaaagtgaatggttttgtgcagtgaacaacacatggcgaggtactaactgagaaactttttcatgctttatgcctacctcttgtagttgttgcagagcaaatataaattgtaataagatagctaggccttgcagaaacaaacagaaaaacttaaaaaaaaatgatataagagctggagtctagtatttatatgaatctgtgagagataatttttttggtctcactgcaatgaaccaaaagcggctgagtttggtttttaattgtagccatgtattgaaggcatctttttgaccaactcttgttggttctgtcttgaaccattgttaatcactgtgctgtaattagtatagctaaatcttttccttccttgctcctcccccagcccaccccgtcttcccttaacattttttcagggggggttgggagtggtttcattttagtgtgagtggatgttttgatagttgtaaggaaaaaatgcatttcagacacatttcacacatgagctattttcttacacagtatgtcttattgttaataagaatgtaatttcatgatacaagtatttaataccttttttaagtcagtaaatattctagccatcaataaattgcagtagagtattaagaggggacaggatgagtttactcttaaaattaatcagtatcaaactaagtctactgtgtgtgtttttttttttgttttttgtttttgtttgtttactattatagtaagtctagtcttatttaaattggatttttgtattcaagtttatatgacaaaatagactagatcagcgctggttgtaaatgcatgctgtacctcactgttttctccccatcatgccgctaaacttgctcgccaggttgtgcttaacttgtggtgaactggacttgattctgttttgttttgtttttttaaaaaaaaaaaacaaaaatgtaagggacagtgcataagccttttctttgttaagtagtggtgttttgctttttcttcaggattggatggcatgttgtccacaggaatgcctactgcagggctaacactggcaatatggcagctttaaattctgagttactacagtctccatgtcaaagcataatgtgtagcatatcagcaataactacatatttatagaaaacactttttcactttactgagccaattcatttaattgtcaaatgtctatatccatggtttaaatggcaacatatctataagtatgtatacacattatatttaagcttttctctgggccaaactgcttcatccttttttctttcttttttttttttttagccttatgatgaatttgtttgaagggcattttctttatgaacaaaggcttggatgcatattcctttctttctgtgaatgggtattattccctgaggaaagttgcacagtgaaaaccagtctggttgtgacccactacatgttttgtttttaatcactattacctgagttgaactttgctcaccatgtttgtacttgttggtctgtttaatgaagtttggttgatgccatcctttgcactgccgaagcgtaatcttgtgtattacttagctctctgctgatctcagtatggacagtgtaacaacaaaaccaaaatggctggacagacttcttgtgttttgtaaatataaactaggacagttctgtaggtttgttcagtgtgctagtggagtatttccttaatgtaaaacttcacttaacagagagattctttgtttagcaagcttggagtgatgataaaatggtaagaaataatataaatgttgaagaaagcatcacaacagaactataggagtctaaatttaataaatctttaaaaaaaaccagtgtctagaatatataccatgttttattatttaaaatcattgtcttaaatttttgttcaaaaaataaaaatttgaatacaatcaaaaaaaaaaaaaaaaaaaagagagggggggcgcgcgcccaaaaaaaaccccggagggggggccccatggcgcgcgccccccttttgggaaaagggggcgcccccaaaggggggggttaaagaggcagcagcgcgggcggcggcattaaaaacacacggcgagcgggcgaaacacgtgccccccgggggacccctgggggggaggaaaccactcaccgacggggagggcacaacatgtgcggcaccaaaccccacacgagataatagcggccgcgaggagacataacacagtacagagccggcatccgtgtgcacaacgtg

SEQ ID NO: 425279 - DNA, 4041 bp, Homo sapiens
ttccgggggcgggacgcgccgaggagtggggcgcgagccgccggttttgattagtgcgcggagctgcggcggtggagctgctcggccgggagcccggcggcgagacggagaggcggcggaggtgcccgcgcgcagggtctggtgggcggccgcgaggctcgggagaggcgaaccggagcgcggggccgcggtcgccccgaccagagccgggagaccgcagcacccgcagccgcccgcgagcgcgccgaagacagcgcgcaggcgagagcgcgcgggcgggggcgcgcaggccctgcccgccccttccgtccccacccccctccgccctttcctctccccaccttcctctcgcctcccgcgcccccgcaccgggcgcccaccctgtcctcctcctgcgggagcgttgtccgtgttggcggccgcagcgggccgggccggtccggcgggccgggggatggcgctgctggacctggccttggagggaatggccgtcttcgggttcgtcctcttcttggtgctgtggctgatgcatttcatggctatcatctacacccgattacacctcaacaagaaggcaactgacaaacagccttatagcaagctcccaggtgtctctcttctgaaaccactgaaaggggtagatcctaacttaatcaacaacctggaaacattctttgaattggattatcccaaaaatttaatttacatacaatgctttttgactagtatgaagtgctcctttgtgtacaagatcatgatgatccagccattgatgtatgtaagaagcttcttggaaaatatccaaatgttgatgctagattgtttataggtggcaaaaaagttggcattaatcctaaaattaataatttaatgccaggatatgaagttgcaaagtatgatcttatatggatttgtgatagtggaataagagtaattccagatacgcttactgacatggtgaatcaaatgacagaaaaagtaggcttggttcacgggctgccttacgtagcagacagacagggctttgctgccaccttagagcaggtatattttggaacttcacatccaagatactatatctctgccaatgtaactggtttcaaatgtgtgacaggaatgtcttgtttaatgagaaaagatgtgttggatcaagcaggaggacttatagcttttgctcagtacattgccgaagattactttatggccaaagcgatagctgaccgaggttggaggtttgcaatgtccactcaagttgcaatgcaaaactctggctcatattcaatttctcagtttcaatccagaatgatcaggtggaccaaactacgaattaacatgcttcctgctacaataatttgtgagccaatttcagaatgctttgttgccagtttaattattggatgggcagcccaccatgtgttcagatgggatattatggtatttttcatgtgtcattgcctggcatggtttatatttgactacattcaactcaggggtgtccagggtggcacactgtgtttttcaaaacttgattatgcagtcgcctggttcatccgcgaatccatgacaatatacatttttttgtctgcattatgggacccaactataagctggagaactggtcgctacagattacgctgtgggggtacagcagaggaaatcctagatgtataactacagctttgtgactgtatataaaggaaaaaagagaagtattataaattatgtttatataaatgcttttaaaaatctaccttctgtagttttatcacatgtatgttttggtatctgttctttaatttatttttgcatggcacttgcatctgtgaaaaaaaaaaaaaacacatctgtagtcttggccaaatgatacactttattttgtggaagtagagaatcaagagaattggttctaggaacctgggttcgttcatcattgttgtttatttttttaaaataaataaataaatatatatatagatgctctgcaacaaactctgtgacagtatccttcagtagagaaagtttcttacttgtgagtacactcttttagaacatttacgggtggcagcagctttgctttagagtttagaagataatagaaggaatgactattcatgtccaaagtgaatggttttgtgcagtgaacaacacatggcgaggtactaactgagaaactttttcatgctttatgcctacctcttgtagttgttgcagagcaaatataaattgtaataagatagctaggccttgcagaaacaaacagaaaaacttaaaaaaaaatgatataagagctggagtctagtatttatatgaatctgtgagagataatttttttggtctcactgcaatgaaccaaaagcggctgagtttggtttttaattgtagccatgtattgaaggcatctttttgaccaactcttgttggttctgtcttgaaccattgttaatcactgtgctgtaattagtatagctaaatcttttccttccttgctcctcccccagcccaccccgtcttcccttaacattttttcagggggggttgggagtggtttcattttagtgtgagtggatgttttgatagttgtaaggaaaaaatgcatttcagacacatttcacacatgagctattttcttacacagtatgtcttattgttaataagaatgtaatttcatgatacaagtatttaataccttttttaagtcagtaaatattctagccatcaataaattgcagtagagtattaagaggggacaggatgagtttactcttaaaattaatcagtatcaaactaagtctactgtgtgtgtttttttttttgttttttgtttttgtttgtttactattatagtaagtctagtcttatttaaattggatttttgtattcaagtttatatgacaaaatagactagatcagcgctggttgtaaatgcatgctgtacctcactgttttctccccatcatgccgctaaacttgctcgccaggttgtgcttaacttgtggtgaactggacttgattctgttttgttttgtttttttaaaaaaaaaaaacaaaaatgtaagggacagtgcataagccttttctttgttaagtagtggtgttttgctttttcttcaggattggatggcatgttgtccacaggaatgcctactgcagggctaacactggcaatatggcagctttaaattctgagttactacagtctccatgtcaaagcataatgtgtagcatatcagcaataactacatatttatagaaaacactttttcactttactgagccaattcatttaattgtcaaatgtctatatccatggtttaaatggcaacatatctataagtatgtatacacattatatttaagcttttctctgggccaaactgcttcatccttttttctttcttttttttttttttagccttatgatgaatttgtttgaagggcattttctttatgaacaaaggcttggatgcatattcctttctttctgtgaatgggtattattccctgaggaaagttgcacagtgaaaaccagtctggttgtgacccactacatgttttgtttttaatcactattacctgagttgaactttgctcaccatgtttgtacttgttggtctgtttaatgaagtttggttgatgccatcctttgcactgccgaagcgtaatcttgtgtattacttagctctctgctgatctcagtatggacagtgtaacaacaaaaccaaaatggctggacagacttcttgtgttttgtaaatataaactaggacagttctgtaggtttgttcagtgtgctagtggagtatttccttaatgtaaaacttcacttaacagagagattctttgtttagcaagcttggagtgatgataaaatggtaagaaataatataaatgttgaagaaagcatcacaacagaactataggagtctaaatttaataaatctttaaaaaaaaccagtgtctagaatatataccatgttttattatttaaaatcattgtcttaaatttttgttcaaaaaataaaaatttgaatacaatcaaaa

SEQ ID NO: 425280 - DNA, 1920 bp, Homo sapiens
ttccgggggcgggacgcgccgaggagtggggcgcgagccgccggttttgattagtgcgcggagctgcggcggtggagctgctcggccgggagcccggcggcgagacggagaggcggcggaggtgcccgcgcgcagggtctggtgggcggccgcgaggctcgggagaggcgaaccggagcgcggggccgcggtcgccccgaccagagccgggagaccgcagcacccgcagccgcccgcgagcgcgccgaagacagcgcgcaggcgagagcgcgcgggcgggggcgcgcaggccctgcccgccccttccgtccccacccccctccgccctttcctctccccaccttcctctcgcctcccgcgcccccgcaccgggcgcccaccctgtcctcctcctgcgggagcgttgtccgtgttggcggccgcagcgggccgggccggtccggcgggccgggggatggcgctgctggacctggccttggagggaatggccgtcttcgggttcgtcctcttcttggtgctgtggctgatgcatttcatggctatcatctacacccgattacacctcaacaagaaggcaactgacaaacagccttatagcaagctcccaggtgtctctcttctgaaaccactgaaaggggtagatcctaacttaatcaacaacctggaaacattctttgaattggattatcccaaatatgaagtgctcctttgtgtacaagatcatgatgatccagccattgatgtatgtaagaagcttcttggaaaatatccaaatgttgatgctagattgtttataggtggcaaaaaagttggcattaatcctaaaattaataatttaatgccaggatatgaagttgcaaagtatgatcttatatggatttgtgatagtggaataagagtaattccagatacgcttactgacatggtgaatcaaatgacagaaaaagtaggcttggttcacgggctgccttacgtagcagacagacagggctttgctgccaccttagagcaggtatattttggaacttcacatccaagatactatatctctgccaatgtaactggtttcaaatgtgtgacaggaatgtcttgtttaatgagaaaagatgtgttggatcaagcaggaggacttatagcttttgctcagtacattgccgaagattactttatggccaaagcgatagctgaccgaggttggaggtttgcaatgtccactcaagttgcaatgcaaaactctggctcatattcaatttctcagtttcaatccagaatgatcaggtaaatcaactgttttctttttatacttcgttaaaaggaaagtggggaggggggtggtaatttttacaggtttaatgtagttaaatgaatgtacctaaaggttgaagatttttgtttagttgcagaaaatagagtttaacgtctgtgtttaagataaatttaatgtctaaatgtattttatttgctgtataacactgaaagcactcattagaggaaatgttgagactgaattttttaatatgctgatctttattttctaactttctgtgctgattaaattttattatctgtattcatcagagcgtaggccatacaaatgaatttaaagacatttttctttgacatcctagacaaaaatagaaaagagagtcattaaaaaaaatttttaggttgtgtgtggtggctcacacctgtaatcccagcgctttgggaggccaaggcgagaggactgcttgagcccaggagtttgagaccagcctgggcaaaatggtgaaaccctgtctctacaaaaaatgcaaaaattagccaggtgtggtggcgtgtacacctgtggtcccagctacttggtgggatgaggtgggaagatcgcttgagcctgggagattgaagctacagtgagtgccactgcactccagcctgggt

SEQ ID NO: 425281 - DNA, 5651 bp, Homo sapiens
acacaagcagcgtcaagtcagagtacacggacccctggggttattacattgactacacgggcatgcaggaagatccggggaacccggcagggggctgttcaaccagcagtggggtgcccactgggaacgggccagtccgccatgtccaagaagggtccagagccacaatgccccaagtgcccggtggttcagtcaaaccaaagatcatgtcaccagagaagtcacacagagtcatttctccatccagtgggtattccagccagtcgaatacacccacagcactcacccctgtgcctgtgtttttaaaatcagtgtcaccagcaaacgggaaggggaagcccaagcccaaggtaccagaaaggaagtcctctctgatatcttcagtatccatttcctcatcgtccacttctctttcttctagtacttctactgaaggaagtggcactatgaagaagctggatccagccgtgggctctcccccggctcctcctcctcctcctgttccctctcctccattcccttgtcctgcagacaggtctcctttccttcctcccccacctcctgtcacagattgctcccagggctctcctctgcctcactctcctgtgttcccccctccgccgccagaagctctcattcctttctgctccccacctgattggtgcctttctcctccccgccctgcactgagccccattcttccagattcacctgtgtccttgccattgcccccacctctcttaccttcctcggaacccccacctgccccacctcttgaccccaaattcatgaaagacaccaggccgcctttcacaaattctggccagccagaatcctcccggggatccttgaggccgccttctaccaaggaggagaccagcaggccccccatgcccctgataaccacggaagcattgcagatggtgcagttgaggcccgtgagaaagaactcaggcgctgaggcggcacagttgtctgaacgaacagctcaggaacaacgaactccagttgctccacagtaccacttaaagccatctgctttcctgaaatcccgaaatagcacaaatgaaatggagagtgaaagccagcctgcctctgtgacaagctcgcttccgacgcctgccaagagctcgagtcagggtgaccatggcagtgcggctgagcgtggtggccctgtgagccgcagccctggagctccaagcgctggggaggcagaggctcggcccagccccagcaccaccccactcccagactcttcacccagcaggaagccaccccccatttccaagaagcccaaactgttcctggtggtaccacctccgcagaaagattttgcagtggagcccgcagagaacgtgagcgaagccctccgagctgtgcccagccccacgacgggagaggagggctctgtgcacagcagggaggcaaaagagagttctgcagcccaagctggctctcatgccacgcaccctggcacctcggttcttgagggaggagctgcaggatccatgtctcccagcagagtggaagccaatgtccccatggttcagcctgatgtctcaccagcccccaagcaggaggagccagccgagaacagtgcggatactgggggcgatggggagagctgcctatctcaacaggacggagcagctggggtgccggagaccaacgcagccggttcatcctcagaggcctgtgacttcctcaaggaagacgggaatgatgaggtaatgacccccagtcgacccaggaccacagaagacctttttgcagctattcacagatccaaaaggaaagtcctcggccgtagagattcagatgatgaccactcccgaaaccattctccctccccgcccgtgacacccaccggcgctgccccaagcctggcctctccaaagcaagtggggtcgattcagagaagcatccgaaagagcagcaccagcagtgacaacttcaaagctctgctgctgaaaaagggcagtcgttcagacaccagcgcccgcatgtctgcagcagagatgctcaagaacacagaccctagattccagaggtcgaggtcagagccttccccagatgcccccgagagcccgtcaagctgctccccaagcaagaacagaagggcgcaggaggagtgggccaagaacgaaggcttgatgcctcggagtctgtccttttccggccccaggtacggccgcagccgaacgccgccttctgccgccagcagcaggtacagcatgcggaaccggatccagagcagccccatgaccgtcatctcggagggagaaggggaagccgtggagcctgtggacagcatagcccgcggggctctgggcgctgcggagggatgttccctggacggactggcgagggaggagatggacgagggcggcctgctctgtggggaggggcctgccgcctccctgcagccccaggcccccggccctgtggatgggacagccagtgcagagggcagagagccctccccacagtgtggcggttctctgagcgaggagagttagggccaagaacgtaactctcccaggtgacacggggggagacgagcaatgcagcactctaggaagcctgctaggcgcccttccctggctcacccggggagcccactctgcttctgtgctgtgggccccggggttgccagccctgcagtgtgagtgaacggttatttaggactcacctggcacttgccctgtggcttaagaacaagtagaagcttaaacttctgaaagtgcttcccggggaagattttttttttttttttttttttttgctaaatgctgggtgtgtatgtgtgcattttccacactttttaatttttaaaaaatacacatatacacaaacaacatgtacagaaatagaagaaagcaagccagacttaagcttggtagagtaacggagtcctctggtctaggcggtaattgctttcagagaattacgtttatagaaatcagcgagttttgtaagaaaggagaagatgttacttcaagaaagaggcagtagagttgctggttcttaatgcacagaacacacagatatatgcacacgtgtgctgctgaggtgaggcaggtctggtgagcacggagaggctgggaaggggctaagtgactaattggttcaggtacttttttctgggggaggtagactttgcttcttttttgtaaaaatgacaaacgtagaagtggcaatgctgtaacctggtgcctgctgctgtgcagccacatacacacaattgtagcctgatttttagaagtgtgggtaattttttaatgaatttcctccttgagtagcagctgaggtcattgacaactgaagtgatggtgtggacatagagagaggggaagggttggaaaggagtaagtgatacactgctggaatttgtttcctgcctatgaaataaaattatttttcagaattaaatttgaaaacttgcactacagaactatgggtggagcttttccttttacaacagtttttttttttttttttttttaaccagagtttaaacttccattaggcaatttcctgtcacttgaaatgtcaacatttgctaacttttggatatccttttggttacaccaaagaaaaagttatggctatttttttttccttgaactgcctacagtatcatgtcctaattcagaaagatttatcaaaatctattatatattatcttactttgaagaaaatgctgaatagctcttgttagtcaaataaactgataaaaattggtagggcctggctatcaattagccctgggaaatgaatttttagattaaaaaggtttttttgcatcatttggtttgtgcatttttatatttgtttataaataattgagttgctaattacttctaatcttctccaatcagattttcaacaattttagacatgggacacacgtgtgtgaagtctttattttaatgtaataatctcattacccccacccttactcccttaacttccatgtacttagactcctttatttgttaaataaactagagtattgtcttcttcattagaaggacctaggatgacaatgcggagagtcttggtctgaatctagtgcgactaccacctgccagcttttggggggtatggaaatactatctaaaagttggactgcatgggtcaaatcattatgagacttataaactaaaactttagatacccatatagaaatgtctttgaggcaaaaacaaacctaaagaatgaaggctctttcccttctctgaaaaaaacaaaacactgctcttcacacaaccggaagtcaagaccagagatttggagcaattgtctactaatttggcacaaagatcgtttctttagaaaagtggcattggcttttgaatatgaaatcttctcatagctgcctaaaaaagactagaatgtatatggatatcagaaacctttaataatacataatttatgcaaagataagataaagcaacataacactaattataaaactatttttaaatccccatttttaatgaaaaatatacatttgtatttaatttcctttgaataaaacaattgtaaagtaaatatttgaaatatttctttttgtttatacatgcattttttttgaataatgagataggtgttcttatacagaattgttgagtgttttgctggatacaaacagaaaagcagtgagaccagaaggtctctgggggaggtgacaacccaacagaggaggtggaacatcacagacactggatggcaccatctacaagggcacgtggaaaaacaagtccacatcgtgtcctatggactttggaataaaatacgaataacctatcgcctggcggttcagatgacgtggcatgtggagagacgtgagaacttcttacaggcatggatgaaatacagggagagaagaatcgagactcatccctgaaacatggcaccttccatgtggctactctactccttggggcccgcttctgttatggaccgcatcttaaaaagctccacaggggtagatctgatggctctcataccctcatactttaagttccagataatcacagaagccccagccctaaattatttccactttatttttactatcagtggggagagaaacaaattactgcttggtctgtcagttggaaacaacctcaatgcgatctgctttctgccatcctactatttctgaagaatcttgattgaactcttgcttttcctgtgggggtgactgtatattccttaggagaatcacagtgaaaaggagacgtttctgtgtctccgtctttctccccacccaccactggcaccctgctctgtggtggcatcttaggaggagaggggaaagagtggctttcttggttctgccgtagtaggggttcagcctgcatgcgatgctgattccatcatcaaatgagcacagcagcataatttgctttggcagatgtgaggatgttgttgggggaatggagggtcatttgaatgaaacatggacctgattgttgcaccactttccttaataagccactcggtaactgtaatacagtttctctcagttgcctgctctgacctaccttccacagcggccagcctttattcacagaacaagaggtagagcaatctgtagtcatttgttcagcaatgggggaaaaaaagtcctaataaatgct

SEQ ID NO: 425282 - DNA, 4557 bp, Homo sapiens
acacaagcagcgtcaagtcagagtacacggacccctggggttattacattgactacacgggcatgcaggaagatccggggaacccggcagggggctgttcaaccagcagtggggtgcccactgggaacgggccagtccgccatgtccaagaagggtccagagccacaatgccccaagtgcccggtggttcagtcaaaccaaagatcatgtcaccagagaagtcacacagagtcatttctccatccagtgggtattccagccagtcgaatacacccacagcactcacccctgtgcctgtgtttttaaaatcagtgtcaccagcaaacgggaaggggaagcccaagcccaaggtaccagaaaggaagtcctctctgatatcttcagtatccatttcctcatcgtccacttctctttcttctagtacttctactgaaggaagtggcactatgaagaagctggatccagccgtgggctctcccccggctcctcctcctcctcctgttccctctcctccattcccttgtcctgcagacaggtctcctttccttcctcccccacctcctgtcacagattgctcccagggctctcctctgcctcactctcctgtgttcccccctccgccgccagaagctctcattcctttctgctccccacctgattggtgcctttctcctccccgccctgcactgagccccattcttccagattcacctgtgtccttgccattgcccccacctctcttaccttcctcggaacccccacctgccccacctcttgaccccaaattcatgaaagacaccaggccgcctttcacaaattctggccagccagaatcctcccggggatccttgaggccgccttctaccaaggaggagaccagcaggccccccatgcccctgataaccacggaagcattgcagatggtgcagttgaggcccgtgagaaagaactcaggcgctgaggcggcacagttgtctgaacgaacagctcaggaacaacgaactccagttgctccacagtaccacttaaagccatctgctttcctgaaatcccgaaatagcacaaatgaaatggagagtgaaagccagcctgcctctgtgacaagctcgcttccgacgcctgccaagagctcgagtcagggtgaccatggcagtgcggctgagcgtggtggccctgtgagccgcagccctggagctccaagcgctggggaggcagaggctcggcccagccccagcaccaccccactcccagactcttcacccagcaggaagccaccccccatttccaagaagcccaaactgttcctggtggtaccacctccgcagaaagattttgcagtggagcccgcagagaacgtgagcgaagccctccgagctgtgcccagccccacgacgggagaggagggctctgtgcacagcagggaggcaaaagagagttctgcagcccaagctggctctcatgccacgcaccctggcacctcggttcttgagggaggagctgcaggatccatgtctcccagcagagtggaagccaatgtccccatggttcagcctgatgtctcaccagcccccaagcaggaggagccagccgagaacagtgcggatactgggggcgatggggagagctgcctatctcaacaggacggagcagctggggtgccggagaccaacgcagccggttcatcctcagaggcctgtgacttcctcaaggaagacgggaatgatgaggtaatgacccccagtcgacccaggaccacagaagacctttttgcagctattcacagatccaaaaggaaagtcctcggccgtagagattcagatgatgaccactcccgaaaccattctccctccccgcccgtgacacccaccggcgctgccccaagcctggcctctccaaagcaagtggggtcgattcagagaagcatccgaaagagcagcaccagcagtgacaacttcaaagctctgctgctgaaaaagggcagtcgttcagacaccagcgcccgcatgtctgcagcagagatgctcaagaacacagaccctagattccagaggtcgaggtcagagccttccccagatgcccccgagagcccgtcaagctgctccccaagcaagaacagaagggcgcaggaggagtgggccaagaacgaaggcttgatgcctcggagtctgtccttttccggccccaggtacggccgcagccgaacgccgccttctgccgccagcagcaggtacagcatgcggaaccggatccagagcagccccatgaccgtcatctcggagggagaaggggaagccgtggagcctgtggacagcatagcccgcggggctctgggcgctgcggagggatgttccctggacggactggcgagggaggagatggacgagggcggcctgctctgtggggaggggcctgccgcctccctgcagccccaggcccccggccctgtggatgggacagccagtgcagagggcagagagccctccccacagtgtggcggttctctgagcgaggagagttagggccaagaacgtaactctcccaggtgacacggggggagacgagcaatgcagcactctaggaagcctgctaggcgcccttccctggctcacccggggagcccactctgcttctgtgctgtgggccccggggttgccagccctgcagtgtgagtgaacggttatttaggactcacctggcacttgccctgtggcttaagaacaagtagaagcttaaacttctgaaagtgcttcccggggaagattttttttttttttttttttttttgctaaatgctgggtgtgtatgtgtgcattttccacactttttaatttttaaaaaatacacatatacacaaacaacatgtacagaaatagaagaaagcaagccagacttaagcttggtagagtaacggagtcctctggtctaggcggtaattgctttcagagaattacgtttatagaaatcagcgagttttgtaagaaaggagaagatgttacttcaagaaagaggcagtagagttgctggttcttaatgcacagaacacacagatatatgcacacgtgtgctgctgaggtgaggcaggtctggtgagcacggagaggctgggaaggggctaagtgactaattggttcaggtacttttttctgggggaggtagactttgcttcttttttgtaaaaatgacaaacgtagaagtggcaatgctgtaacctggtgcctgctgctgtgcagccacatacacacaattgtagcctgatttttagaagtgtgggtaattttttaatgaatttcctccttgagtagcagctgaggtcattgacaactgaagtgatggtgtggacatagagagaggggaagggttggaaaggagtaagtgatacactgctggaatttgtttcctgcctatgaaataaaattatttttcagaattaaatttgaaaacttgcactacagaactatgggtggagcttttccttttacaacagtttttttttttttttttttttaaccagagtttaaacttccattaggcaatttcctgtcacttgaaatgtcaacatttgctaacttttggatatccttttggttacaccaaagaaaaagttatggctatttttttttccttgaactgcctacagtatcatgtcctaattcagaaagatttatcaaaatctattatatattatcttactttgaagaaaatgctgaatagctcttgttagtcaaataaactgataaaaattggtagggcctggctatcaattagccctgggaaatgaatttttagattaaaaaggtttttttgcatcatttggtttgtgcatttttatatttgtttataaataattgagttgctaattacttctaatcttctccaatcagattttcaacaattttagacatgggacacacgtgtgtgaagtctttattttaatgtaataatctcattacccccacccttactcccttaacttccatgtacttagactcctttatttgttaaataaactagagtattgtcttcttcattagaaggacctaggatgacaatgcggagagtcttggtctgaatctagtgcgactaccacctgccagcttttggggggtatggaaatactatctaaaagttggactgcatgggtcaaatcattatgagacttataaactaaaactttagatacccatatagaaatgtctttgaggcaaaaacaaacctaaagaatgaaggctctttcccttctctgaaaaaaacaaaacactgctcttcacacaaccggaagtcaagaccagagatttggagcaattgtctactaatttggcacaaagatcgtttctttagaaaagtggcattggcttttgaatatgaaatcttctcatagctgcctaaaaaagactagaatgtatatggatatcagaaacctttaataatacataatttatgcaaagataagataaagcaacataacactaattataaaactatttttaaatccccatttttaatgaaaaatatacatttgtatttaatttcctttgaataaaacaattgtaaagtaaa

SEQ ID NO: 425283 - DNA, 5452 bp, Homo sapiens
acacaagcagcgtcaagtcagagtacacggacccctggggttattacattgactacacgggcatgcaggaagatccggggaacccggcagggggctgttcaaccagcagtggggtgcccactgggaacgggccagtccgccatgtccaagaagggtccagagccacaatgccccaagtgcccggtggttcagtcaaaccaaagatcatgtcaccagagaagtcacacagagtcatttctccatccagtgggtattccagccagtcgaatacacccacagcactcacccctgtgcctgtgtttttaaaatcagtgtcaccatggatccagccgtgggctctcccccggctcctcctcctcctcctgttccctctcctccattcccttgtcctgcagacaggtctcctttccttcctcccccacctcctgtcacagattgctcccagggctctcctctgcctcactctcctgtgttcccccctccgccgccagaagctctcattcctttctgctccccacctgattggtgcctttctcctccccgccctgcactgagccccattcttccagattcacctgtgtccttgccattgcccccacctctcttaccttcctcggaacccccacctgccccacctcttgaccccaaattcatgaaagacaccaggccgcctttcacaaattctggccagccagaatcctcccggggatccttgaggccgccttctaccaaggaggagaccagcaggccccccatgcccctgataaccacggaagcattgcagatggtgcagttgaggcccgtgagaaagaactcaggcgctgaggcggcacagttgtctgaacgaacagctcaggaacaacgaactccagttgctccacagtaccacttaaagccatctgctttcctgaaatcccgaaatagcacaaatgaaatggagagtgaaagccagcctgcctctgtgacaagctcgcttccgacgcctgccaagagctcgagtcagggtgaccatggcagtgcggctgagcgtggtggccctgtgagccgcagccctggagctccaagcgctggggaggcagaggctcggcccagccccagcaccaccccactcccagactcttcacccagcaggaagccaccccccatttccaagaagcccaaactgttcctggtggtaccacctccgcagaaagattttgcagtggagcccgcagagaacgtgagcgaagccctccgagctgtgcccagccccacgacgggagaggagggctctgtgcacagcagggaggcaaaagagagttctgcagcccaagctggctctcatgccacgcaccctggcacctcggttcttgagggaggagctgcaggatccatgtctcccagcagagtggaagccaatgtccccatggttcagcctgatgtctcaccagcccccaagcaggaggagccagctggggtgccggagaccaacgcagccggttcatcctcagaggcctgtgacttcctcaaggaagacgggaatgatgaggtaatgacccccagtcgacccaggaccacagaagacctttttgcagctattcacagatccaaaaggaaagtcctcggccgtagagattcagatgatgaccactcccgaaaccattctccctccccgcccgtgacacccaccggcgctgccccaagcctggcctctccaaagcaagtggggtcgattcagagaagcatccgaaagagcagcaccagcagtgacaacttcaaagctctgctgctgaaaaagggcagtcgttcagacaccagcgcccgcatgtctgcagcagagatgctcaagaacacagaccctagattccagaggtcgaggtcagagccttccccagatgcccccgagagcccgtcaagctgctccccaagcaagaacagaagggcgcaggaggagtgggccaagaacgaaggcttgatgcctcggagtctgtccttttccggccccaggtacggccgcagccgaacgccgccttctgccgccagcagcaggtacagcatgcggaaccggatccagagcagccccatgaccgtcatctcggagggagaaggggaagccgtggagcctgtggacagcatagcccgcggggctctgggcgctgcggagggatgttccctggacggactggcgagggaggagatggacgagggcggcctgctctgtggggaggggcctgccgcctccctgcagccccaggcccccggccctgtggatgggacagccagtgcagagggcagagagccctccccacagtgtggcggttctctgagcgaggagagttagggccaagaacgtaactctcccaggtgacacggggggagacgagcaatgcagcactctaggaagcctgctaggcgcccttccctggctcacccggggagcccactctgcttctgtgctgtgggccccggggttgccagccctgcagtgtgagtgaacggttatttaggactcacctggcacttgccctgtggcttaagaacaagtagaagcttaaacttctgaaagtgcttcccggggaagattttttttttttttttttttttttgctaaatgctgggtgtgtatgtgtgcattttccacactttttaatttttaaaaaatacacatatacacaaacaacatgtacagaaatagaagaaagcaagccagacttaagcttggtagagtaacggagtcctctggtctaggcggtaattgctttcagagaattacgtttatagaaatcagcgagttttgtaagaaaggagaagatgttacttcaagaaagaggcagtagagttgctggttcttaatgcacagaacacacagatatatgcacacgtgtgctgctgaggtgaggcaggtctggtgagcacggagaggctgggaaggggctaagtgactaattggttcaggtacttttttctgggggaggtagactttgcttcttttttgtaaaaatgacaaacgtagaagtggcaatgctgtaacctggtgcctgctgctgtgcagccacatacacacaattgtagcctgatttttagaagtgtgggtaattttttaatgaatttcctccttgagtagcagctgaggtcattgacaactgaagtgatggtgtggacatagagagaggggaagggttggaaaggagtaagtgatacactgctggaatttgtttcctgcctatgaaataaaattatttttcagaattaaatttgaaaacttgcactacagaactatgggtggagcttttccttttacaacagtttttttttttttttttttttaaccagagtttaaacttccattaggcaatttcctgtcacttgaaatgtcaacatttgctaacttttggatatccttttggttacaccaaagaaaaagttatggctatttttttttccttgaactgcctacagtatcatgtcctaattcagaaagatttatcaaaatctattatatattatcttactttgaagaaaatgctgaatagctcttgttagtcaaataaactgataaaaattggtagggcctggctatcaattagccctgggaaatgaatttttagattaaaaaggtttttttgcatcatttggtttgtgcatttttatatttgtttataaataattgagttgctaattacttctaatcttctccaatcagattttcaacaattttagacatgggacacacgtgtgtgaagtctttattttaatgtaataatctcattacccccacccttactcccttaacttccatgtacttagactcctttatttgttaaataaactagagtattgtcttcttcattagaaggacctaggatgacaatgcggagagtcttggtctgaatctagtgcgactaccacctgccagcttttggggggtatggaaatactatctaaaagttggactgcatgggtcaaatcattatgagacttataaactaaaactttagatacccatatagaaatgtctttgaggcaaaaacaaacctaaagaatgaaggctctttcccttctctgaaaaaaacaaaacactgctcttcacacaaccggaagtcaagaccagagatttggagcaattgtctactaatttggcacaaagatcgtttctttagaaaagtggcattggcttttgaatatgaaatcttctcatagctgcctaaaaaagactagaatgtatatggatatcagaaacctttaataatacataatttatgcaaagataagataaagcaacataacactaattataaaactatttttaaatccccatttttaatgaaaaatatacatttgtatttaatttcctttgaataaaacaattgtaaagtaaatatttgaaatatttctttttgtttatacatgcattttttttgaataatgagataggtgttcttatacagaattgttgagtgttttgctggatacaaacagaaaagcagtgagaccagaaggtctctgggggaggtgacaacccaacagaggaggtggaacatcacagacactggatggcaccatctacaagggcacgtggaaaaacaagtccacatcgtgtcctatggactttggaataaaatacgaataacctatcgcctggcggttcagatgacgtggcatgtggagagacgtgagaacttcttacaggcatggatgaaatacagggagagaagaatcgagactcatccctgaaacatggcaccttccatgtggctactctactccttggggcccgcttctgttatggaccgcatcttaaaaagctccacaggggtagatctgatggctctcataccctcatactttaagttccagataatcacagaagccccagccctaaattatttccactttatttttactatcagtggggagagaaacaaattactgcttggtctgtcagttggaaacaacctcaatgcgatctgctttctgccatcctactatttctgaagaatcttgattgaactcttgcttttcctgtgggggtgactgtatattccttaggagaatcacagtgaaaaggagacgtttctgtgtctccgtctttctccccacccaccactggcaccctgctctgtggtggcatcttaggaggagaggggaaagagtggctttcttggttctgccgtagtaggggttcagcctgcatgcgatgctgattccatcatcaaatgagcacagcagcataatttgctttggcagatgtgaggatgttgttgggggaatggagggtcatttgaatgaaacatggacctgattgttgcaccactttccttaataagccactcggtaactgtaatacagtttctctcagttgcctgctctgacctaccttccacagcggccagcctttattcacagaacaagaggtagagcaatctgtagtcatttgttcagcaatgggggaaaaaaagtcctaataaatgct

SEQ ID NO: 425284 - DNA, 4923 bp, Homo sapiens
  misc_feature (86)..(86): n is a, c, g, or t
  misc_feature (271)..(271): n is a, c, g, or t
tttctttgattgccccttcgtcttccccaccccaccccacccctcacattttcttgatcagtgcaaggtttgctgagtcgatcatnaagcagggtctggcatggagggttcgcctttgttttctggaaggctggattttagaagttggcacatggtcctggaagagctgaggaagactggtctgacggcaacttctagaataactgagaatgtgaagctgaggagttgttctaggacctggagtggggtacatcttagtacaggggatatnctggcatggaacaagaaaaggaagcatagaaagaaaggagggtcagcatgtgaaattcactccggatcagcccgtctaggagagatcaaggaaaactggccattattaaaacttttggtcctgtccaaagtaagttaatagtgtctaagatttgtttcaaatagggagggtggagacaaaagaagggtgaccgtaattaatgattatcataggtgagttatgggctcatgcggtcttgcagtgagctgttctcttttgtgtgggtgtttgaaattttccaaagttaaaaataaattatttgccaggcacagtggctcacgcctataatcccagcactttgggaggccgaggcaggcagatcacctgaggtcaggagtttgagaccagcctgggcaacatggcaaaaccccgtctctactaaaaatacaaaaattagctgggctgggcatggtggcaggtgcctgtaatcccagctacttgggaggctgaggcagggagaatcgcttgaatccgggaggcagaggttgcaatgagctgagattgcgctattgcactccagcctgagcgacagagtgagtctcaaaaaaataaaataaattatgcatttattactttttctttttttttgaatagagataaggtcttactgtgttgcccaggctggtctcgaactcctaagctcaagtgatcctcccaccgtggcctcccaaaatgctgggattacaggtgtgagccactgtgcccagtcaaaaataaattttttgaaagtgaatcttaagtagatggtgacctgaagatgcgataagagcagagtggttgtggctgacagcctgtggtcccgtgggaattaacctttttcttaatgttattaaatctcagatccaaaaggaaagtcctcggccgtagagattcagatgatgaccactcccgaaaccattctccctctccaaagcaagtggggtcgattcagagaagcatccgaaagagcagcaccagcagtgacaacttcaaagctctgctgctgaaaaagggcagtcgttcagacaccagcgcccgcatgtctgcagcagagatgctcaagaacacagaccctagattccagaggtcgaggtcagagccttccccagatgcccccgagagcccgtcaagctgctccccaagcaagaacagaagggcgcaggaggagtgggccaagaacgaaggcttgatgcctcggagtctgtccttttccggccccaggtacggccgcagccgaacgccgccttctgccgccagcagcaggtacagcatgcggaaccggatccagagcagccccatgaccgtcatctcggagggagaaggggaagccgtggagcctgtggacagcatagcccgcggggctctgggcgctgcggagggatgttccctggacggactggcgagggaggagatggacgagggcggcctgctctgtggggaggggcctgccgcctccctgcagccccaggcccccggccctgtggatgggacagccagtgcagagggcagagagccctccccacagtgtggcggttctctgagcgaggagagttagggccaagaacgtaactctcccaggtgacacggggggagacgagcaatgcagcactctaggaagcctgctaggcgcccttccctggctcacccggggagcccactctgcttctgtgctgtgggccccggggttgccagccctgcagtgtgagtgaacggttatttaggactcacctggcacttgccctgtggcttaagaacaagtagaagcttaaacttctgaaagtgcttcccggggaagattttttttttttttttttttttttgctaaatgctgggtgtgtatgtgtgcattttccacactttttaatttttaaaaaatacacatatacacaaacaacatgtacagaaatagaagaaagcaagccagacttaagcttggtagagtaacggagtcctctggtctaggcggtaattgctttcagagaattacgtttatagaaatcagcgagttttgtaagaaaggagaagatgttacttcaagaaagaggcagtagagttgctggttcttaatgcacagaacacacagatatatgcacacgtgtgctgctgaggtgaggcaggtctggtgagcacggagaggctgggaaggggctaagtgactaattggttcaggtacttttttctgggggaggtagactttgcttcttttttgtaaaaatgacaaacgtagaagtggcaatgctgtaacctggtgcctgctgctgtgcagccacatacacacaattgtagcctgatttttagaagtgtgggtaattttttaatgaatttcctccttgagtagcagctgaggtcattgacaactgaagtgatggtgtggacatagagagaggggaagggttggaaaggagtaagtgatacactgctggaatttgtttcctgcctatgaaataaaattatttttcagaattaaatttgttttttttttttttttaaccagagtttaaacttccattaggcaatttcctgtcacttgaaatgtcaacatttgctaacttttggatatccttttggttacaccaaagaaaaagttatggctatttttttttccttgaactgcctacagtatcatgtcctaattcagaaagatttatcaaaatctattatatattatcttactttgaagaaaatgctgaatagctcttgttagtcaaataaactgataaaaattggtagggcctggctatcaattagccctgggaaatgaatttttagattaaaaaggtttttttgcatcatttggtttgtgcatttttatatttgtttataaataattgagttgctaattacttctaatcttctccaatcagattttcaacaattttagacatgggacacacgtgtgtgaagtctttattttaatgtaataatctcattacccccacccttactcccttaacttccatgtacttagactcctttatttgttaaataaactagagtattgtcttcttcattagaaggacctaggatgacaatgcggagagtcttggtctgaatctagtgcgactaccacctgccagcttttggggggtatggaaatactatctaaaagttggactgcatgggtcaaatcattatgagacttataaactaaaactttagatacccatatagaaatgtctttgaggcaaaaacaaacctaaagaatgaaggctctttcccttctctgaaaaaaacaaaacactgctcttcacacaaccggaagtcaagaccagagatttggagcaattgtctactaatttggcacaaagatcgtttctttagaaaagtggcattggcttttgaatatgaaatcttctcatagctgcctaaaaaagactagaatgtatatggatatcagaaacctttaataatacataatttatgcaaagataagataaagcaacataacactaattataaaactatttttaaatccccatttttaatgaaaaatatacatttgtatttaatttcctttgaataaaacaattgtaaagtaaatatttgaaatatttctttttgtttatacatgcattttttttgaataatgagataggtgttcttatacagaattgttgagtgttttgctggatacaaacagaaaagcagtgagaccagaaggtctctgggggaggtgacaacccaacagaggaggtggaacatcacagacactggatggcaccatctacaagggcacgtggaaaaacaagtccacatcgtgtcctatggactttggaataaaatacgaataacctatcgcctggcggttcagatgacgtggcatgtggagagacgtgagaacttcttacaggcatggatgaaatacagggagagaagaatcgagactcatccctgaaacatggcaccttccatgtggctactctactccttggggcccgcttctgttatggaccgcatcttaaaaagctccacaggggtagatctgatggctctcataccctcatactttaagttccagataatcacagaagccccagccctaaattatttccactttatttttactatcagtggggagagaaacaaattactgcttggtctgtcagttggaaacaacctcaatgcgatctgctttctgccatcctactatttctgaagaatcttgattgaactcttgcttttcctgtgggggtgactgtatattccttaggagaatcacagtgaaaaggagacgtttctgtgtctccgtctttctccccacccaccactggcaccctgctctgtggtggcatcttaggaggagaggggaaagagtggctttcttggttctgccgtagtaggggttcagcctgcatgcgatgctgattccatcatcaaatgagcacagcagcataatttgctttggcagatgtgaggatgttgttgggggaatggagggtcatttgaatgaaacatggacctgattgttgcaccactttccttaataagccactcggtaactgtaatacagtttctctcagttgcctgctctgacctaccttccacagcggccagcctttattcacagaacaagaggtagagcaatctgtagtcatttgttcagcaatgggggaaaaaaagtcctaataaatgct

SEQ ID NO: 425285 - DNA, 2771 bp, Homo sapiens
  misc_feature (86)..(86): n is a, c, g, or t
  misc_feature (271)..(271): n is a, c, g, or t
tttctttgattgccccttcgtcttccccaccccaccccacccctcacattttcttgatcagtgcaaggtttgctgagtcgatcatnaagcagggtctggcatggagggttcgcctttgttttctggaaggctggattttagaagttggcacatggtcctggaagagctgaggaagactggtctgacggcaacttctagaataactgagaatgtgaagctgaggagttgttctaggacctggagtggggtacatcttagtacaggggatatnctggcatggaacaagaaaaggaagcatagaaagaaaggagggtcagcatgtgaaattcactccggatcagcccgtctaggagagatcaaggaaaactggccattattaaaacttttggtcctgtccaaagtaagttaatagtgtctaagatttgtttcaaatagggagggtggagacaaaagaagggtgaccgtaattaatgattatcataggtgagttatgggctcatgcggtcttgcagtgagctgttctcttttgtgtgggtgtttgaaattttccaaagttaaaaataaattatttgccaggcacagtggctcacgcctataatcccagcactttgggaggccgaggcaggcagatcacctgaggtcaggagtttgagaccagcctgggcaacatggcaaaaccccgtctctactaaaaatacaaaaattagctgggctgggcatggtggcaggtgcctgtaatcccagctacttgggaggctgaggcagggagaatcgcttgaatccgggaggcagaggttgcaatgagctgagattgcgctattgcactccagcctgagcgacagagtgagtctcaaaaaaataaaataaattatgcatttattactttttctttttttttgaatagagataaggtcttactgtgttgcccaggctggtctcgaactcctaagctcaagtgatcctcccaccgtggcctcccaaaatgctgggattacaggtgtgagccactgtgcccagtcaaaaataaattttttgaaagtgaatcttaagtagatggtgacctgaagatgcgataagagcagagtggttgtggctgacagcctgtggtcccgtgggaattaacctttttcttaatgttattaaatctcagatccaaaaggaaagtcctcggccgtagagattcagatgatgaccactcccgaaaccattctccctctccaaagcaagtggggtcgattcagagaagcatccgaaagagcagcaccagcagtgacaacttcaaagctctgctgctgaaaaagggcagtcgttcagacaccagcgcccgcatgtctgcagcagagatgctcaagaacacagaccctagattccagaggtcgaggtcagagccttccccagatgcccccgagagcccgtcaagctgctccccaagcaagaacagaagggcgcaggaggagtgggccaagaacgaaggcttgatgcctcggagtctgtccttttccggccccaggtacggccgcagccgaacgccgccttctgccgccagcagcaggtacagcatgcggaaccggatccagagcagccccatgaccgtcatctcggagggagaaggggaagccgtggagcctgtggacagcatagcccgcggggctctgggcgctgcggagggatgttccctggacggactggcgagggaggagatggacgagggcggcctgctctgtggggaggggcctgccgcctccctgcagccccaggcccccggccctgtggatgggacagccagtgcagagggcagagagccctccccacagtgtggcggttctctgagcgaggagagttagggccaagaacgtaactctcccaggtgacacggggggagacgagcaatgcagcactctaggaagcctgctaggcgcccttccctggctcacccggggagcccactctgcttctgtgctgtgggccccggggttgccagccctgcagtgtgagtgaacggttatttaggactcacctggcacttgccctgtggcttaagaacaagtagaagcttaaacttctgaaagtgcttcccggggaagattttttttttttttttttttttttgctaaatgctgggtgtgtatgtgtgcattttccacactttttaatttttaaaaaatacacatatacacaaacaacatgtacagaaatagaagaaagcaagccagacttaagcttggtagagtaacggagtcctctggtctaggcggtaattgctttcagagaattacgtttatagaaatcagcgagttttgtaagaaaggagaagatgttacttcaagaaagaggcagtagagttgctggttcttaatgcacagaacacacagatatatgcacacgtgtgctgctgaggtgaggcaggtctggtgagcacggagaggctgggaaggggctaagtgactaattggttcaggtacttttttctgggggaggtagactttgcttcttttttgtaaaaatgacaaacgtagaagtggcaatgctgtaacctggtgcctgctgctgtgcagccacatacacacaattgtagcctgatttttagaagtgtgggtaattttttaatgaatttcctccttgagtagcagctgaggtcattgacaactgaagtgatggtgtggacatagagagaggggaagggacccaatgtagccataatccctaggatccaactattttccgggcaattcattaaaagccttcttttcaaataaatggcatcatacaat

SEQ ID NO: 425286 - DNA, 4631 bp, Homo sapiens
acacaagcagcgtcaagtcagagtacacggacccctggggttattacattgactacacgggcatgcaggaagatccggggaacccggcagggggctgttcaaccagcagtggggtgcccactgggaacgggccagtccgccatgtccaagaagggtccagagccacaatgccccaagtgcccggtggttcagtcaaaccaaagatcatgtcaccagagaagtcacacagagtcatttctccatccagtgggtattccagccagtcgaatacacccacagcactcacccctgtgcctgtgtttttaaaatcagtgtcaccagcaaacgggaaggggaagcccaagcccaaggtaccagaaaggaagtcctctctgatatcttcagtatccatttcctcatcgtccacttctctttcttctagtacttctactgaaggaagtggcactatgaagaagctggatccagccgtgggctctcccccggctcctcctcctcctcctgttccctctcctccattcccttgtcctgcagacaggtctcctttccttcctcccccacctcctgtcacagattgctcccagggctctcctctgcctcactctcctgtgttcccccctccgccgccagaagctctcattcctttctgctccccacctgattggtgcctttctcctccccgccctgcactgagccccattcttccagattcacctgtgtccttgccattgcccccacctctcttaccttcctcggaacccccacctgccccacctcttgaccccaaattcatgaaagacaccaggccgcctttcacaaattctggccagccagaatcctcccggggatccttgaggccgccttctaccaaggaggagaccagcaggccccccatgcccctgataaccacggaagcattgcagatggtgcagttgaggcccgtgagaaagaactcaggcgctgaggcggcacagttgtctgaacgaacagctcaggaacaacgaactccagttgctccacagtaccacttaaagccatctgctttcctgaaatcccgaaatagcacaaatgaaatggagagtgaaagccagcctgcctctgtgacaagctcgcttccgacgcctgccaagagctcgagtcagggtgaccatggcagtgcggctgagcgtggtggccctgtgagccgcagccctggagctccaagcgctggggaggcagaggctcggcccagccccagcaccaccccactcccagactcttcacccagcaggaagccaccccccatttccaagaagcccaaactgttcctggtggtaccacctccgcagaaagattttgcagtggagcccgcagagaacgtgagcgaagccctccgagctgtgcccagccccacgacgggagaggagggctctgtgcacagcagggaggcaaaagagagttctgcagcccaagctggctctcatgccacgcaccctggcacctcggttcttgagggaggagctgcaggatccatgtctcccagcagagtggaagccaatgtccccatggttcagcctgatgtctcaccagcccccaagcaggaggagccagccgagaacagtgcggatactgggggcgatggggagagctgcctatctcaacaggacggagcagctggggtgccggagaccaacgcagccggttcatcctcagaggcctgtgacttcctcaaggaagacgggaatgatgaggtaatgacccccagtcgacccaggaccacagaagacctttttgcagctattcacagatccaaaaggaaagtcctcggccgtagagattcagatgatgaccactcccgaaaccattctccctccccgcccgtgacacccaccggcgctgccccaagcctggcctctccaaagcaagtggggtcgattcagagaagcatccgaaagagcagcaccagcagtgacaacttcaaagctctgctgctgaaaaagggcagtcgttcagacaccagcgcccgcatgtctgcagcagagatgctcaagaacacagaccctagattccagaggtcgaggtcagagccttccccagatgcccccgagagcccgtcaagctgctccccaagcaagaacagaagggcgcaggaggagtgggccaagaacgaaggcttgatgcctcggagtctgtccttttccggccccaggtacggccgcagccgaacgccgccttctgccgccagcagcaggtacagcatgcggaaccggatccagagcagccccatgaccgtcatctcggagggagaaggggaagccgtggagcctgtggacagcatagcccgcggggctctgggcgctgcggagggatgttccctggacggactggcgagggaggagatggacgagggcggcctgctctgtggggaggggcctgccgcctccctgcagccccaggcccccggccctgtggatgggacagccagtgcagagggcagagagccctccccacagtgtggcggttctctgagcgaggagagttagggccaagaacgtaactctcccaggtgacacggggggagacgagcaatgcagcactctaggaagcctgctaggcgcccttccctggctcacccggggagcccactctgcttctgtgctgtgggccccggggttgccagccctgcagtgtgagtgaacggttatttaggactcacctggcacttgccctgtggcttaagaacaagtagaagcttaaacttctgaaagtgcttcccggggaagattttttttttttttttttttttttgctaaatgctgggtgtgtatgtgtgcattttccacactttttaatttttaaaaaatacacatatacacaaacaacatgtacagaaatagaagaaagcaagccagacttaagcttggtagagtaacggagtcctctggtctaggcggtaattgctttcagagaattacgtttatagaaatcagcgagttttgtaagaaaggagaagatgttacttcaagaaagaggcagtagagttgctggttcttaatgcacagaacacacagatatatgcacacgtgtgctgctgaggtgaggcaggtctggtgagcacggagaggctgggaaggggctaagtgactaattggttcaggtacttttttctgggggaggtagactttgcttcttttttgtaaaaatgacaaacgtagaagtggcaatgctgtaacctggtgcctgctgctgtgcagccacatacacacaattgtagcctgatttttagaagtgtgggtaattttttaatgaatttcctccttgagtagcagctgaggtcattgacaactgaagtgatggtgtggacatagagagaggggaagggttggaaaggagtaagtgatacactgctggaatttgtttcctgcctatgaaataaaattatttttcagaattaaatttgaaaacttgcactacagaactatgggtggagcttttccttttacaacagtttttttttttttttttttttaaccagagtttaaacttccattaggcaatttcctgtcacttgaaatgtcaacatttgctaacttttggatatccttttggttacaccaaagaaaaagttatggctatttttttttccttgaactgcctacagtatcatgtcctaattcagaaagatttatcaaaatctattatatattatcttactttgaagaaaatgctgaatagctcttgttagtcaaataaactgataaaaattggtagggcctggctatcaattagccctgggaaatgaatttttagattaaaaaggtttttttgcatcatttggtttgtgcatttttatatttgtttataaataattgagttgctaattacttctaatcttctccaatcagattttcaacaattttagacatgggacacacgtgtgtgaagtctttattttaatgtaataatctcattacccccacccttactcccttaacttccatgtacttagactcctttatttgttaaataaactagagtattgtcttcttcattagaaggacctaggatgacaatgcggagagtcttggtctgaatctagtgcgactaccacctgccagcttttggggggtatggaaatactatctaaaagttggactgcatgggtcaaatcattatgagacttataaactaaaactttagatacccatatagaaatgtctttgaggcaaaaacaaacctaaagaatgaaggctctttcccttctctgaaaaaaacaaaacactgctcttcacacaaccggaagtcaagaccagagatttggagcaattgtctactaatttggcacaaagatcgtttctttagaaaagtggcattggcttttgaatatgaaatcttctcatagctgcctaaaaaagactagaatgtatatggatatcagaaacctttaataatacataatttatgcaaagataagataaagcaacataacactaattataaaactatttttaaatccccatttttaatgaaaaatatacatttgtatttaatttcctttgaataaaacaattgtaaagtaaaaacctcaaacttgaagcttaaaaacgaaggcggcccctaggcttattcccctttagtgaagggataaatttaag

SEQ ID NO: 425287 - DNA, 4976 bp, Homo sapiens
  misc_feature (86)..(86): n is a, c, g, or t
  misc_feature (271)..(271): n is a, c, g, or t
tttctttgattgccccttcgtcttccccaccccaccccacccctcacattttcttgatcagtgcaaggtttgctgagtcgatcatnaagcagggtctggcatggagggttcgcctttgttttctggaaggctggattttagaagttggcacatggtcctggaagagctgaggaagactggtctgacggcaacttctagaataactgagaatgtgaagctgaggagttgttctaggacctggagtggggtacatcttagtacaggggatatnctggcatggaacaagaaaaggaagcatagaaagaaaggagggtcagcatgtgaaattcactccggatcagcccgtctaggagagatcaaggaaaactggccattattaaaacttttggtcctgtccaaagtaagttaatagtgtctaagatttgtttcaaatagggagggtggagacaaaagaagggtgaccgtaattaatgattatcataggtgagttatgggctcatgcggtcttgcagtgagctgttctcttttgtgtgggtgtttgaaattttccaaagttaaaaataaattatttgccaggcacagtggctcacgcctataatcccagcactttgggaggccgaggcaggcagatcacctgaggtcaggagtttgagaccagcctgggcaacatggcaaaaccccgtctctactaaaaatacaaaaattagctgggctgggcatggtggcaggtgcctgtaatcccagctacttgggaggctgaggcagggagaatcgcttgaatccgggaggcagaggttgcaatgagctgagattgcgctattgcactccagcctgagcgacagagtgagtctcaaaaaaataaaataaattatgcatttattactttttctttttttttgaatagagataaggtcttactgtgttgcccaggctggtctcgaactcctaagctcaagtgatcctcccaccgtggcctcccaaaatgctgggattacaggtgtgagccactgtgcccagtcaaaaataaattttttgaaagtgaatcttaagtagatggtgacctgaagatgcgataagagcagagtggttgtggctgacagcctgtggtcccgtgggaattaacctttttcttaatgttattaaatctcagatccaaaaggaaagtcctcggccgtagagattcagatgatgaccactcccgaaaccattctccctctccaaagcaagtggggtcgattcagagaagcatccgaaagagcagcaccagcagtgacaacttcaaagctctgctgctgaaaaagggcagtcgttcagacaccagcgcccgcatgtctgcagcagagatgctcaagaacacagaccctagattccagaggtcgaggtcagagccttccccagatgcccccgagagcccgtcaagctgctccccaagcaagaacagaagggcgcaggaggagtgggccaagaacgaaggcttgatgcctcggagtctgtccttttccggccccaggtacggccgcagccgaacgccgccttctgccgccagcagcaggtacagcatgcggaaccggatccagagcagccccatgaccgtcatctcggagggagaaggggaagccgtggagcctgtggacagcatagcccgcggggctctgggcgctgcggagggatgttccctggacggactggcgagggaggagatggacgagggcggcctgctctgtggggaggggcctgccgcctccctgcagccccaggcccccggccctgtggatgggacagccagtgcagagggcagagagccctccccacagtgtggcggttctctgagcgaggagagttagggccaagaacgtaactctcccaggtgacacggggggagacgagcaatgcagcactctaggaagcctgctaggcgcccttccctggctcacccggggagcccactctgcttctgtgctgtgggccccggggttgccagccctgcagtgtgagtgaacggttatttaggactcacctggcacttgccctgtggcttaagaacaagtagaagcttaaacttctgaaagtgcttcccggggaagattttttttttttttttttttttttgctaaatgctgggtgtgtatgtgtgcattttccacactttttaatttttaaaaaatacacatatacacaaacaacatgtacagaaatagaagaaagcaagccagacttaagcttggtagagtaacggagtcctctggtctaggcggtaattgctttcagagaattacgtttatagaaatcagcgagttttgtaagaaaggagaagatgttacttcaagaaagaggcagtagagttgctggttcttaatgcacagaacacacagatatatgcacacgtgtgctgctgaggtgaggcaggtctggtgagcacggagaggctgggaaggggctaagtgactaattggttcaggtacttttttctgggggaggtagactttgcttcttttttgtaaaaatgacaaacgtagaagtggcaatgctgtaacctggtgcctgctgctgtgcagccacatacacacaattgtagcctgatttttagaagtgtgggtaattttttaatgaatttcctccttgagtagcagctgaggtcattgacaactgaagtgatggtgtggacatagagagaggggaagggttggaaaggagtaagtgatacactgctggaatttgtttcctgcctatgaaataaaattatttttcagaattaaatttgaaaacttgcactacagaactatgggtggagcttttccttttacaacagtttttttttttttttttttttaaccagagtttaaacttccattaggcaatttcctgtcacttgaaatgtcaacatttgctaacttttggatatccttttggttacaccaaagaaaaagttatggctatttttttttccttgaactgcctacagtatcatgtcctaattcagaaagatttatcaaaatctattatatattatcttactttgaagaaaatgctgaatagctcttgttagtcaaataaactgataaaaattggtagggcctggctatcaattagccctgggaaatgaatttttagattaaaaaggtttttttgcatcatttggtttgtgcatttttatatttgtttataaataattgagttgctaattacttctaatcttctccaatcagattttcaacaattttagacatgggacacacgtgtgtgaagtctttattttaatgtaataatctcattacccccacccttactcccttaacttccatgtacttagactcctttatttgttaaataaactagagtattgtcttcttcattagaaggacctaggatgacaatgcggagagtcttggtctgaatctagtgcgactaccacctgccagcttttggggggtatggaaatactatctaaaagttggactgcatgggtcaaatcattatgagacttataaactaaaactttagatacccatatagaaatgtctttgaggcaaaaacaaacctaaagaatgaaggctctttcccttctctgaaaaaaacaaaacactgctcttcacacaaccggaagtcaagaccagagatttggagcaattgtctactaatttggcacaaagatcgtttctttagaaaagtggcattggcttttgaatatgaaatcttctcatagctgcctaaaaaagactagaatgtatatggatatcagaaacctttaataatacataatttatgcaaagataagataaagcaacataacactaattataaaactatttttaaatccccatttttaatgaaaaatatacatttgtatttaatttcctttgaataaaacaattgtaaagtaaatatttgaaatatttctttttgtttatacatgcattttttttgaataatgagataggtgttcttatacagaattgttgagtgttttgctggatacaaacagaaaagcagtgagaccagaaggtctctgggggaggtgacaacccaacagaggaggtggaacatcacagacactggatggcaccatctacaagggcacgtggaaaaacaagtccacatcgtgtcctatggactttggaataaaatacgaataacctatcgcctggcggttcagatgacgtggcatgtggagagacgtgagaacttcttacaggcatggatgaaatacagggagagaagaatcgagactcatccctgaaacatggcaccttccatgtggctactctactccttggggcccgcttctgttatggaccgcatcttaaaaagctccacaggggtagatctgatggctctcataccctcatactttaagttccagataatcacagaagccccagccctaaattatttccactttatttttactatcagtggggagagaaacaaattactgcttggtctgtcagttggaaacaacctcaatgcgatctgctttctgccatcctactatttctgaagaatcttgattgaactcttgcttttcctgtgggggtgactgtatattccttaggagaatcacagtgaaaaggagacgtttctgtgtctccgtctttctccccacccaccactggcaccctgctctgtggtggcatcttaggaggagaggggaaagagtggctttcttggttctgccgtagtaggggttcagcctgcatgcgatgctgattccatcatcaaatgagcacagcagcataatttgctttggcagatgtgaggatgttgttgggggaatggagggtcatttgaatgaaacatggacctgattgttgcaccactttccttaataagccactcggtaactgtaatacagtttctctcagttgcctgctctgacctaccttccacagcggccagcctttattcacagaacaagaggtagagcaatctgtagtcatttgttcagcaatgggggaaaaaaagtcctaataaatgct

SEQ ID NO: 425288 - DNA, 4922 bp, Homo sapiens
  misc_feature (86)..(86): n is a, c, g, or t
  misc_feature (271)..(271): n is a, c, g, or t
tttctttgattgccccttcgtcttccccaccccaccccacccctcacattttcttgatcagtgcaaggtttgctgagtcgatcatnaagcagggtctggcatggagggttcgcctttgttttctggaaggctggattttagaagttggcacatggtcctggaagagctgaggaagactggtctgacggcaacttctagaataactgagaatgtgaagctgaggagttgttctaggacctggagtggggtacatcttagtacaggggatatnctggcatggaacaagaaaaggaagcatagaaagaaaggagggtcagcatgtgaaattcactccggatcagcccgtctaggagagatcaaggaaaactggccattattaaaacttttggtcctgtccaaagtaagttaatagtgtctaagatttgtttcaaatagggagggtggagacaaaagaagggtgaccgtaattaatgattatcataggtgagttatgggctcatgcggtcttgcagtgagctgttctcttttgtgtgggtgtttgaaattttccaaagttaaaaataaattatttgccaggcacagtggctcacgcctataatcccagcactttgggaggccgaggcaggcagatcacctgaggtcaggagtttgagaccagcctgggcaacatggcaaaaccccgtctctactaaaaatacaaaaattagctgggctgggcatggtggcaggtgcctgtaatcccagctacttgggaggctgaggcagggagaatcgcttgaatccgggaggcagaggttgcaatgagctgagattgcgctattgcactccagcctgagcgacagagtgagtctcaaaaaaataaaataaattatgcatttattactttttctttttttttgaatagagataaggtcttactgtgttgcccaggctggtctcgaactcctaagctcaagtgatcctcccaccgtggcctcccaaaatgctgggattacaggtgtgagccactgtgcccagtcaaaaataaattttttgaaagtgaatcttaagtagatggtgacctgaagatgcgataagagcagagtggttgtggctgacagcctgtggtcccgtgggaattaacctttttcttaatgttattaaatctcagatccaaaaggaaagtcctcggccgtagagattcagatgatgaccactcccgaaaccattctccctctccaaagcaagtggggtcgattcagagaagcatccgaaagagcagcaccagcagtgacaacttcaaagctctgctgctgaaaaagggcagtcgttcagacaccagcgcccgcatgtctgcagcagagatgctcaagaacacagaccctagattccagaggtcgaggtcagagccttccccagatgcccccgagagcccgtcaagctgctccccaagcaagaacagaagggcgcaggaggagtgggccaagaacgaaggcttgatgcctcggagtctgtccttttccggccccaggtacggccgcagccgaacgccgccttctgccgccagcagcaggtacagcatgcggaaccggatccagagcagccccatgaccgtcatctcggagggagaaggggaagccgtggagcctgtggacagcatagcccgcggggctctgggcgctgcggagggatgttccctggacggactggcgagggaggagatggacgagggcggcctgctctgtggggaggggcctgccgcctccctgcagccccaggcccccggccctgtggatgggacagccagtgcagagggcagagagccctccccacagtgtggcggttctctgagcgaggagagttagggccaagaacgtaactctcccaggtgacacggggggagacgagcaatgcagcactctaggaagcctgctaggcgcccttccctggctcacccggggagcccactctgcttctgtgctgtgggccccggggttgccagccctgcagtgtgagtgaacggttatttaggactcacctggcacttgccctgtggcttaagaacaagtagaagcttaaacttctgaaagtgcttcccggggaagattttttttttttttttttttttttgctaaatgctgggtgtgtatgtgtgcattttccacactttttaatttttaaaaaatacacatatacacaaacaacatgtacagaaatagaagaaagcaagccagacttaagcttggtagagtaacggagtcctctggtctaggcggtaattgctttcagagaattacgtttatagaaatcagcgagttttgtaagaaaggagaagatgttacttcaagaaagaggcagtagagttgctggttcttaatgcacagaacacacagatatatgcacacgtgtgctgctgaggtgaggcaggtctggtgagcacggagaggctgggaaggggctaagtgactaattggttcaggtacttttttctgggggaggtagactttgcttcttttttgtagccacatacacacaattgtagcctgatttttagaagtgtgggtaattttttaatgaatttcctccttgagtagcagctgaggtcattgacaactgaagtgatggtgtggacatagagagaggggaagggttggaaaggagtaagtgatacactgctggaatttgtttcctgcctatgaaataaaattatttttcagaattaaatttgaaaacttgcactacagaactatgggtggagcttttccttttacaacagtttttttttttttttttttttaaccagagtttaaacttccattaggcaatttcctgtcacttgaaatgtcaacatttgctaacttttggatatccttttggttacaccaaagaaaaagttatggctatttttttttccttgaactgcctacagtatcatgtcctaattcagaaagatttatcaaaatctattatatattatcttactttgaagaaaatgctgaatagctcttgttagtcaaataaactgataaaaattggtagggcctggctatcaattagccctgggaaatgaatttttagattaaaaaggtttttttgcatcatttggtttgtgcatttttatatttgtttataaataattgagttgctaattacttctaatcttctccaatcagattttcaacaattttagacatgggacacacgtgtgtgaagtctttattttaatgtaataatctcattacccccacccttactcccttaacttccatgtacttagactcctttatttgttaaataaactagagtattgtcttcttcattagaaggacctaggatgacaatgcggagagtcttggtctgaatctagtgcgactaccacctgccagcttttggggggtatggaaatactatctaaaagttggactgcatgggtcaaatcattatgagacttataaactaaaactttagatacccatatagaaatgtctttgaggcaaaaacaaacctaaagaatgaaggctctttcccttctctgaaaaaaacaaaacactgctcttcacacaaccggaagtcaagaccagagatttggagcaattgtctactaatttggcacaaagatcgtttctttagaaaagtggcattggcttttgaatatgaaatcttctcatagctgcctaaaaaagactagaatgtatatggatatcagaaacctttaataatacataatttatgcaaagataagataaagcaacataacactaattataaaactatttttaaatccccatttttaatgaaaaatatacatttgtatttaatttcctttgaataaaacaattgtaaagtaaatatttgaaatatttctttttgtttatacatgcattttttttgaataatgagataggtgttcttatacagaattgttgagtgttttgctggatacaaacagaaaagcagtgagaccagaaggtctctgggggaggtgacaacccaacagaggaggtggaacatcacagacactggatggcaccatctacaagggcacgtggaaaaacaagtccacatcgtgtcctatggactttggaataaaatacgaataacctatcgcctggcggttcagatgacgtggcatgtggagagacgtgagaacttcttacaggcatggatgaaatacagggagagaagaatcgagactcatccctgaaacatggcaccttccatgtggctactctactccttggggcccgcttctgttatggaccgcatcttaaaaagctccacaggggtagatctgatggctctcataccctcatactttaagttccagataatcacagaagccccagccctaaattatttccactttatttttactatcagtggggagagaaacaaattactgcttggtctgtcagttggaaacaacctcaatgcgatctgctttctgccatcctactatttctgaagaatcttgattgaactcttgcttttcctgtgggggtgactgtatattccttaggagaatcacagtgaaaaggagacgtttctgtgtctccgtctttctccccacccaccactggcaccctgctctgtggtggcatcttaggaggagaggggaaagagtggctttcttggttctgccgtagtaggggttcagcctgcatgcgatgctgattccatcatcaaatgagcacagcagcataatttgctttggcagatgtgaggatgttgttgggggaatggagggtcatttgaatgaaacatggacctgattgttgcaccactttccttaataagccactcggtaactgtaatacagtttctctcagttgcctgctctgacctaccttccacagcggccagcctttattcacagaacaagaggtagagcaatctgtagtcatttgttcagcaatgggggaaaaaaagtcctaataaatgct

SEQ ID NO: 425289 - DNA, 2646 bp, Homo sapiens
  misc_feature (2635)..(2636): n is a, c, g, or t
  misc_feature (2639)..(2639): n is a, c, g, or t
  misc_feature (2643)..(2643): n is a, c, g, or t
ccgcccaccccgcctgcggcccagctccttcccgcggctctgcgatgcggcccgcagggtgacccgggcgggagtccggggacccgcgatcagccccggaggacggggtggggtcgccccaaacaggagcgccgggaccgctgggaccccgcactcggcgtccgccgccgccgggtagccgggcagtggaggtcccggatgaggcgacaatttttccggccccccctcccagtcccgccccacttccggggccgccactttcactttctcttccgccgaagccgctccccttgcgaagaactggggcctcccgggaggagagagggctttgccttgaaacccgggacgccaggggcgctcccgcaagtgggggtcctccgggacttggaacgccccggctgggtggtgtccgggcgtcctttccccgcttcttcccacctcggctggtcccgtttcctcctgcgcccagtgcggacctgtctcggcgcccgctgccctctcaccgccccacgcaggatcccggcctggtcaccgggcagtgtgatgcttcccgactgccgcggggacagcgaggcacacacagggcttgggccgcgccggaggccacacggcctggctgagttgctcctggtctcccgcctctcccaggcgacccggaggtagcatttcccaggaggcacggtcccccccagggggatgggcacagccacgccagatggacgagaagaccaagaaagcagaggaaatggccctgagcctcacccgagcagtggcgggcggggatgaacaggtggcaatgaagtgtgccatctggctggcagagcaacgggtgcccctgagtgtgcaactgaagcctgaggtctccccaacgcaggacatcaggctgtgggtgagcgtggaggatgctcagatgcacaccgtcaccatctggctcacagtgcgccctgatatgacagtggcgtctctcaaggacatggtttttctggactatggcttcccaccagtcttgcagcagtgggtgattgggcagcggctggcacgagaccaggagaccctgcactcccatggggtgcggcagaatggggacagtgcctacctctatctgctgtcagcccgcaacacctccctcaaccctcaggagctgcagcgggagcggcagctgcggatgctggaagatctgggcttcaaggacctcacgctgcagccgcggggccctctggagccaggccccccaaagcccggggtcccccaggaacccggacgggggcagccagatgcagtgcctgagcccccaccggtgggctggcagtgccccgggtgcaccttcatcaacaagcccacgcggcctggctgtgagatgtgctgccgggcgcgccccgaggcctaccaggtccccgcctcataccagcccgacgaggaggagcgagcgcgcctggcgggcgaggaggaggcgctgcgtcagtaccagcagggagtgcctgcagggcaccatccgcaacagccaggaggcggaggtctcctgccccttcattgacaacacctactcgtgctcgggcaagctgctggagagggagatcaaggcgctcctgacccctgaggattaccagcgatttctagacctgggcatctccattgctgaaaaccgcagtgccttcagctaccattgcaagaccccagattgcaagggatggtgcttctttgaggatgatgtcaatgagttcacctgccctgtgtgtttccacgtcaactgcctgctctgcaaggccatccatgagcagatgaactgcaaggagtatcaggaggacctggccctgcgggctcagaacgatgtggctgcccggcagacgacagagatgctgaaggtgatgctgcagcagggcgaggccatgcgctgcccccagtgccagatcgtggtacagaagaaggacggctgcgactggatccgctgcaccgtctgccacaccgagatctgctgggtcaccaagggcccacgctggggccctgggggcccaggagacaccagcgggggctgccgctgcagggtaaatgggattccttgccacccaagctgtcagaactgccactgagctaaagatggtggggccacatgctgacccagccccacatccacattctgttagaatgtagctcagggagcttcgtggacggccttgcttgctgtagcgttgtaggggccctgcctgcactgcggttgtccacggtcacatctgccccagtgcctttgtccttcccttggggcttgccggccagacttctctcccctgcggctcccacctctgcctgaccccagccttaaacatagcccctggccagaggccttgctgggtggagcctctgtgtgactccatactcctcccaccacaacactcatctgtcaaacaccaagcactctcagcctccccgccttcagctgtcagctttctggggctaacttctctgcctttgtggttggaggcctgaggcctcttggaactcttgctaacctgttcagagccaggaaggagactgcacagttttgaaagcacagcccgtcaggtccggctctgcgtctccctctctgcagcctgtgtaagctattataattaaaatggttttccgggaaaaaaaaaaactnntgncctngag

SEQ ID NO: 425290 - DNA, 547 bp, Homo sapiens
ccgcccaccccgcctgcggcccagctccttcccgcggctctgcgatgcggcccgcagggtgacccgggcgggagtccggggacccgcgatcagccccggaggacggggtggggtcgccccaaacaggagcgccgggaccgctgggaccccgcactcggcgtccgccgccgccgggtagccgggcagtggaggtcccggatgaggcgacaatttttccggccccccctcccagtcccgccccacttccggggccgccactttcactttctcttccgcactcttctaaagagcatagctcaaaaattgtatacacttcttccgttaattcctgtggaccagaactgattcccacagctacagttcagcttgaggggagactgtatagccaagatattcagctagaattcaggggttcgcttggtaagggaagggaagagaatggatactgtcggtctgtgctccaggagacttaaactcaatgctgaaacactttgcacaatgcctggcgtgttatgcactcaataataaacattagtgtctatcgtta

SEQ ID NO: 425291 - DNA, 2933 bp, Homo sapiens
  misc_feature (2922)..(2923): n is a, c, g, or t
  misc_feature (2926)..(2926): n is a, c, g, or t
  misc_feature (2930)..(2930): n is a, c, g, or t
ccgcccaccccgcctgcggcccagctccttcccgcggctctgcgatgcggcccgcagggtgacccgggcgggagtccggggacccgcgatcagccccggaggacggggtggggtcgccccaaacaggagcgccgggaccgctgggaccccgcactcggcgtccgccgccgccgggtagccgggcagtggaggtcccggatgaggcgacaatttttccggccccccctcccagtcccgccccacttccggggccgccactttcactttctcttccgccgaagccgctccccttgcgaagaactggggcctcccgggaggagagagggctttgccttgaaacccgggacgccaggggcgctcccgcaagtgggggtcctccgggacttggaacgccccggctgggtggtgtccgggcgtcctttccccgcttcttcccacctcggctggtcccgtttcctcctgcgcccagtgcggacctgtctcggcgcccgctgccctctcaccgccccacgcaggatcccggcctggtcaccgggcagtgtgatgcttcccgactgccgcggggacagcgaggcacacacagggcttgggccgcgccggaggccacacggcctggctgagttgctcctggtctcccgcctctcccaggcgacccggaggtagcatttcccaggaggcacggtcccccccagggggatgggcacagccacgccagatggacgagaagaccaagaaagcagaggaaatggccctgagcctcacccgagcagtggcgggcggggatgaacaggtggcaatgaagtgtgccatctggctggcagagcaacgggtgcccctgagtgtgcaactgaagcctgaggtctccccaacgcaggacatcaggctgtgggtgagcgtggaggatgctcagatgcacaccgtcaccatctggctcacagtgcgccctgatatgacagtggcgtctctcaaggacatggtttttctggactatggcttcccaccagtcttgcagcagtgggtgattgggcagcggctggcacgagaccaggagaccctgcactcccatggggtgcggcagaatggggacagtgcctacctctatctgctgtcagcccgcaacacctccctcaaccctcaggagctgcagcgggagcggcagctgcggatgctggaagatctgggcttcaaggacctcacgctgcagccgcggggccctctggagccaggccccccaaagcccggggtcccccaggaacccggacgggggcagccagatgcagtgcctgagcccccaccggtgggctggcagtgccccgggtgcaccttcatcaacaagcccacgcggcctggctgtgagatgtgctgccgggcgcgccccgaggcctaccaggtccccgcctcataccagcccgacgaggaggagcgagcgcgcctggcgggcgaggaggaggcgctgcgtcagtaccagcagcggaagcagcagcagcaggaggggaactacctgcagcacgtccagctggaccagaggagcctggtgctgaacacggagcccgccgagtgccccgtgtgctactcggtgctggcgcccggcgaggccgtggtgctgcgtgagtgtctgcacaccttctgcagggagtgcctgcagggcaccatccgcaacagccaggaggcggaggtctcctgccccttcattgacaacacctactcgtgctcgggcaagctgctggagagggagatcaaggcgctcctgacccctgaggattaccagcgatttctagacctgggcatctccattgctgaaaaccgcagtgccttcagctaccattgcaagaccccagattgcaagggatggtgcttctttgaggatgatgtcaatgagttcacctgccctgtgtgtttccacgtcaactgcctgctctgcaaggccatccatgagcagatgaactgcaaggagtatcaggaggacctggccctgcgggctcagaacgatgtggctgcccggcagacgacagagatgctgaaggtgatgctgcagcagggcgaggccatgcgctgcccccagtgccagatcgtggtacagaagaaggacggctgcgactggatccgctgcaccgtctgccacaccgagatctgctgggtcaccaagggcccacgctggggccctgggggtgagtctttgctcgtggtggtgtggagagggtgcccttgtgggctttgccttagaggagggctgggaaaactacagcccatgggccatatccaacccagcacctgaatttgtacagctcccgagggcccaggagacaccagcgggggctgccgctgcagggtaaatgggattccttgccacccaagctgtcagaactgccactgagctaaagatggtggggccacatgctgacccagccccacatccacattctgttagaatgtagctcagggagcttcgtggacggccttgcttgctgtagcgttgtaggggccctgcctgcactgcggttgtccacggtcacatctgccccagtgcctttgtccttcccttggggcttgccggccagacttctctcccctgcggctcccacctctgcctgaccccagccttaaacatagcccctggccagaggccttgctgggtggagcctctgtgtgactccatactcctcccaccacaacactcatctgtcaaacaccaagcactctcagcctccccgccttcagctgtcagctttctggggctaacttctctgcctttgtggttggaggcctgaggcctcttggaactcttgctaacctgttcagagccaggaaggagactgcacagttttgaaagcacagcccgtcaggtccggctctgcgtctccctctctgcagcctgtgtaagctattataattaaaatggttttccgggaaaaaaaaaaactnntgncctngag

SEQ ID NO: 425292 - DNA, 2930 bp, Homo sapiens
  misc_feature (2919)..(2920): n is a, c, g, or t
  misc_feature (2923)..(2923): n is a, c, g, or t
  misc_feature (2927)..(2927): n is a, c, g, or t
ccgcccaccccgcctgcggcccagctccttcccgcggctctgcgatgcggcccgcagggtgacccgggcgggagtccggggacccgcgatcagccccggaggacggggtggggtcgccccaaacaggagcgccgggaccgctgggaccccgcactcggcgtccgccgccgccgggtagccgggcagtggaggtcccggatgaggcgacaatttttccggccccccctcccagtcccgccccacttccggggccgccactttcactttctcttccgccgaagccgctccccttgcgaagaactggggcctcccgggaggagagagggctttgccttgaaacccgggacgccaggggcgctcccgcaagtgggggtcctccgggacttggaacgccccggctgggtggtgtccgggcgtcctttccccgcttcttcccacctcggctggtcccgtttcctcctgcgcccagtgcggacctgtctcggcgcccgctgccctctcaccgccccacgcaggatcccggcctggtcaccgggcagtgtgatgcttcccgactgccgcggggacagcgaggcacacacagggcttgggccgcgccggaggccacacggcctggctgagttgctcctggtctcccgcctctcccaggcgacccggaggtagcatttcccaggaggcacggtcccccccagggggatgggcacagccacgccagatggacgagaagaccaagaaagcagaggaaatggccctgagcctcacccgagcagtggcgggcggggatgaacaggtggcaatgaagtgtgccatctggctggcagagcaacgggtgcccctgagtgtgcaactgaagcctgaggtctccccaacgcaggacatcaggagcaggggagagaagacagaagaggttggagaggtcagggaggtgccagatcatggaggccctcgtgtgctgccacgagttgattctaagagtagcgtggagccattggaggggcctaactggctgtgggtgagcgtggaggatgctcagatgcacaccgtcaccatctggctcacagtgcgccctgatatgacagtggcgtctctcaaggacatggtttttctggactatggcttcccaccagtcttgcagcagtgggtgattgggcagcggctggcacgagaccaggagaccctgcactcccatggggtgcggcagaatggggacagtgcctacctctatctgctgtcagcccgcaacacctccctcaaccctcaggagctgcagcgggagcggcagctgcggatgctggaagatctgggcttcaaggacctcacgctgcagccgcggggccctctggagccaggccccccaaagcccggggtcccccaggaacccggacgggggcagccagatgcagtgcctgagcccccaccggtgggctggcagtgccccgggtgcaccttcatcaacaagcccacgcggcctggctgtgagatgtgctgccgggcgcgccccgaggcctaccaggtccccgcctcataccagcccgacgaggaggagcgagcgcgcctggcgggcgaggaggaggcgctgcgtcagtaccagcagcggaagcagcagcagcaggaggggaactacctgcagcacgtccagctggaccagaggagcctggtgctgaacacggagcccgccgagtgccccgtgtgctactcggtgctggcgcccggcgaggccgtggtgctgcgtgagtgtctgcacaccttctgcagggagtgcctgcagggcaccatccgcaacagccaggaggcggaggtctcctgccccttcattgacaacacctactcgtgctcgggcaagctgctggagagggagatcaaggcgctcctgacccctgaggattaccagcgatttctagacctgggcatctccattgctgaaaaccgcagtgccttcagctaccattgcaagaccccagattgcaagggatggtgcttctttgaggatgatgtcaatgagttcacctgccctgtgtgtttccacgtcaactgcctgctctgcaaggccatccatgagcagatgaactgcaaggagtatcaggaggacctggccctgcgggctcagaacgatgtggctgcccggcagacgacagagatgctgaaggtgatgctgcagcagggcgaggccatgcgctgcccccagtgccagatcgtggtacagaagaaggacggctgcgactggatccgctgcaccgtctgccacaccgagatctgctgggtcaccaagggcccacgctggggccctgggggcccaggagacaccagcgggggctgccgctgcagggtaaatgggattccttgccacccaagctgtcagaactgccactgagctaaagatggtggggccacatgctgacccagccccacatccacattctgttagaatgtagctcagggagcttcgtggacggccttgcttgctgtagcgttgtaggggccctgcctgcactgcggttgtccacggtcacatctgccccagtgcctttgtccttcccttggggcttgccggccagacttctctcccctgcggctcccacctctgcctgaccccagccttaaacatagcccctggccagaggccttgctgggtggagcctctgtgtgactccatactcctcccaccacaacactcatctgtcaaacaccaagcactctcagcctccccgccttcagctgtcagctttctggggctaacttctctgcctttgtggttggaggcctgaggcctcttggaactcttgctaacctgttcagagccaggaaggagactgcacagttttgaaagcacagcccgtcaggtccggctctgcgtctccctctctgcagcctgtgtaagctattataattaaaatggttttccgggaaaaaaaaaaactnntgncctngag

SEQ ID NO: 425293 - DNA, 2998 bp, Homo sapiens
ccgcccaccccgcctgcggcccagctccttcccgcggctctgcgatgcggcccgcagggtgacccgggcgggagtccggggacccgcgatcagccccggaggacggggtggggtcgccccaaacaggagcgccgggaccgctgggaccccgcactcggcgtccgccgccgccgggtagccgggcagtggaggtcccggatgaggcgacaatttttccggccccccctcccagtcccgccccacttccggggccgccactttcactttctcttccgccgaagccgctccccttgcgaagaactggggcctcccgggaggagagagggctttgccttgaaacccgggacgccaggggcgctcccgcaagtgggggtcctccgggacttggaacgccccggctgggtggtgtccgggcgtcctttccccgcttcttcccacctcggctggtcccgtttcctcctgcgcccagtgcggacctgtctcggcgcccgctgccctctcaccgccccacgcaggatcccggcctggtcaccgggcagtgtgatgcttcccgactgccgcggggacagcgaggcacacacagggcttgggccgcgccggaggccacacggcctggctgagttgctcctggtctcccgcctctcccaggcgacccggaggtagcatttcccaggaggcacggtcccccccagggggatgggcacagccacgccagatggacgagaagaccaagaaagcagaggaaatggccctgagcctcacccgagcagtggcgggcggggatgaacaggtggcaatgaagtgtgccatctggctggcagagcaacgggtgcccctgagtgtgcaactgaagcctgaggtctccccaacgcaggacatcaggctgtgggtgagcgtggaggatgctcagatgcacaccgtcaccatctggctcacagtgcgccctgatatgacagtggcgtctctcaaggacatggtttttctggactatggcttcccaccagtcttgcagcagtgggtgattgggcagcggctggcacgagaccaggagaccctgcactcccatggggtgcggcagaatggggacagtgcctacctctatctgctgtcagcccgcaacacctccctcaaccctcaggagctgcagcgggagcggcagctgcggatgctggaagatctgggcttcaaggacctcacgctgcagccgcggggccctctggagccaggccccccaaagcccggggtcccccaggaacccggacgggggcagccagatgcagtgcctgagcccccaccggtgggctggcagtgccccgggtgcaccttcatcaacaagcccacgcggcctggctgtgagatgtgctgccgggcgcgccccgaggcctaccaggtccccgcctcataccagcccgacgaggaggagcgagcgcgcctggcgggcgaggaggaggcgctgcgtcagtaccagcagcggaagcagcagcagcaggaggggaactacctgcagcacgtccagctggaccagaggagcctggtgctgaacacggagcccgccgagtgccccgtgtgctactcggtgctggcgcccggcgaggccgtggtgctgcgtgagtgtctgcacaccttctgcagggagtgcctgcagggcaccatccgcaacagccaggaggcggaggtctcctgccccttcattgacaacacctactcgtgctcgggcaagctgctggagagggagatcaaggcgctcctgacccctgaggattaccagcgatttctagacctgggcatctccattgctgaaaaccgcagtgccttcagctaccattgcaagaccccagattgcaagggatggtgcttctttgaggatgatgtcaatgagttcacctgccctgtgtgtttccacgtcaactgcctgctctgcaaggccatccatgagcagatgaactgcaaggagtatcaggaggacctggccctgcgggctcagaacgatgtggctgcccggcagacgacagagatgctgaaggtgatgctgcagcagggcgaggccatgcgctgcccccagtgccagatcgtggtacagaagaaggacggctgcgactggatccgctgcaccgtctgccacaccgagatctgctgggtcaccaagggcccacgctggggccctgggggtgagtctttgctcgtggtggtgtggagagggtgcccttgtgggctttgccttagaggagggctgggaaaactacagcccatgggccatatccaacccagcacctgaatttgtacagctcccgagggcccaggagacaccagcgggggctgccgctgcagggtaaatgggattccttgccacccaagctgtcagaactgccactgagctaaagatggtggggccacatgctgacccagccccacatccacattctgttagaatgtagctcagggagcttcgtggacggccttgcttgctgtagcgttgtaggggccctgcctgcactgcggttgtccacggtcacatctgccccagtgcctttgtccttcccttggggcttgccggccagacttctctcccctgcggctcccacctctgcctgaccccagccttaaacatagcccctggccagaggccttgctgggtggagcctctgtgtgactccatactcctcccaccacaacactcatctgtcaaacaccaagcactctcagcctccccgccttcagctgtcagctttctggggctaacttctctgcctttgtggttggaggcctgaggcctcttggaactcttgctaacctgttcagagccaggaaggagactgcacagttttgaaagcacagcccgtcaggtccggctctgcgtctccctctctgcagcctgtgtaagctattataatttggttttccgggggaatcgagggggggcccggtcccaattcgccctataggagtgtatacaattactggcccgcgttacaacgtgggactgggaaccctgcgttcc

SEQ ID NO: 425294 - DNA, 2982 bp, Homo sapiens
  misc_feature (2971)..(2972): n is a, c, g, or t
  misc_feature (2975)..(2975): n is a, c, g, or t
  misc_feature (2979)..(2979): n is a, c, g, or t
ccgcccaccccgcctgcggcccagctccttcccgcggctctgcgatgcggcccgcagggtgacccgggcgggagtccggggacccgcgatcagccccggaggacggggtggggtcgccccaaacaggagcgccgggaccgctgggaccccgcactcggcgtccgccgccgccgggtagccgggcagtggaggtcccggatgaggcgacaatttttccggccccccctcccagtcccgccccacttccggggccgccactttcactttctcttccgccgaagccgctccccttgcgaagaactggggcctcccgggaggagagagggctttgccttgaaacccgggacgccaggggcgctcccgcaagtgggggtcctccgggacttggaacgccccggctgggtggtgtccgggcgtcctttccccgcttcttcccacctcggctggtcccgtttcctcctgcgcccagtgcggacctgtctcggcgcccgctgccctctcaccgccccacgcaggatcccggcctggtcaccgggcagtgtgatgcttcccgactgccgcggggacagcgaggcacacacagggcttgggccgcgccggaggccacacggcctggctgagttgctcctggtctcccgcctctcccaggcgacccggaggtagcatttcccaggaggcacggtcccccccagggggatgggcacagccacgccagatggacgagaagaccaagaaagcagaggaaatggccctgagcctcacccgagcagtggcgggcggggatgaacaggtggcaatgaagtgtgccatctggctggcagagcaacgggtgcccctgagtgtgcaactgaagcctgaggtctccccaacgcaggacatcaggctgtgggtgagcgtggaggatgctcagatgcacaccgtcaccatctggctcacagtgcgccctgatatgacagtggcgtctctcaaggacatggtttttctggactatggcttcccaccagtcttgcagcagtgggtgattgggcagcggctggcacgagaccaggagaccctgcactcccatggggtgcggcagaatggggacagtgcctacctctatctgctgtcagtgggctggcagtgccccgggtgcaccttcatcaacaagcccacgcggcctggctgtgagatgtgctgccgggcgcgccccgaggcctaccaggtccccgcctcataccagcccgacgaggaggagcgagcgcgcctggcgggcgaggaggaggcgctgcgtcagtaccagcagcggaagcagcagcagcaggaggggaactacctgcagcacgtccagctggaccagaggagcctggtgctgaacacggagcccgccgagtgccccgtgtgctactcggtgctggcgcccggcgaggccgtggtgctgcgtgagtgtctgcacaccttctgcagggagtgcctgcagggcaccatccgcaacagccaggaggcggaggtctcctgccccttcattgacaacacctactcgtgctcgggcaagctgctggagagggagatcaaggcgctcctgacccctgaggattaccagcgatttctagacctgggcatctccattgctgaaaaccgcagtgccttcagctaccattgcaagaccccagattgcaagggatggtgcttctttgaggatgatgtcaatgagttcacctgccctgtgtgtttccacgtcaactgcctgctctgcaaggccatccatgagcagatgaactgcaaggagtatcaggaggacctggccctgcgggctcagaacgatgtggctgcccggcagacgacagagatgctgaaggtgaggctgggacagggccgaggcctagggattttaagttctgggatccaggtgggggctgggggcttcccagtaagggctgtgctcacacatccctggaggctctgacctcccttctggctgtcactcccatccggaggtgggacttaggccgaatggtcatgtcaggaagagcgtctgggtggagggtggagaccacaggaatgaagagggggttgctggatggagcctggcctggcagagccacacaggagagactccacagctctagagggtcaccaccttctccctgccatggggaggggccaggctgggtgactgccccagccccgccccagggccagcacctgccccactccaggtgatgctgcagcagggcgaggccatgcgctgcccccagtgccagatcgtggtacagaagaaggacggctgcgactggatccgctgcaccgtctgccacaccgagatctgctgggtcaccaagggcccacgctggggccctgggggcccaggagacaccagcgggggctgccgctgcagggtaaatgggattccttgccacccaagctgtcagaactgccactgagctaaagatggtggggccacatgctgacccagccccacatccacattctgttagaatgtagctcagggagcttcgtggacggccttgcttgctgtagcgttgtaggggccctgcctgcactgcggttgtccacggtcacatctgccccagtgcctttgtccttcccttggggcttgccggccagacttctctcccctgcggctcccacctctgcctgaccccagccttaaacatagcccctggccagaggccttgctgggtggagcctctgtgtgactccatactcctcccaccacaacactcatctgtcaaacaccaagcactctcagcctccccgccttcagctgtcagctttctggggctaacttctctgcctttgtggttggaggcctgaggcctcttggaactcttgctaacctgttcagagccaggaaggagactgcacagttttgaaagcacagcccgtcaggtccggctctgcgtctccctctctgcagcctgtgtaagctattataattaaaatggttttccgggaaaaaaaaaaactnntgncctngag

SEQ ID NO: 425295 - DNA, 2858 bp, Homo sapiens
  misc_feature (2847)..(2848): n is a, c, g, or t
  misc_feature (2851)..(2851): n is a, c, g, or t
  misc_feature (2855)..(2855): n is a, c, g, or t
ccgcccaccccgcctgcggcccagctccttcccgcggctctgcgatgcggcccgcagggtgacccgggcgggagtccggggacccgcgatcagccccggaggacggggtggggtcgccccaaacaggagcgccgggaccgctgggaccccgcactcggcgtccgccgccgccgggtagccgggcagtggaggtcccggatgaggcgacaatttttccggccccccctcccagtcccgccccacttccggggccgccactttcactttctcttccgccgaagccgctccccttgcgaagaactggggcctcccgggaggagagagggctttgccttgaaacccgggacgccaggggcgctcccgcaagtgggggtcctccgggacttggaacgccccggctgggtggtgtccgggcgtcctttccccgcttcttcccacctcggctggtcccgtttcctcctgcgcccagtgcggacctgtctcggcgcccgctgccctctcaccgccccacgcaggatcccggcctggtcaccgggcagtgtgatgcttcccgactgccgcggggacagcgaggcacacacagggcttgggccgcgccggaggccacacggcctggctgagttgctcctggtctcccgcctctcccaggcgacccggaggtagcatttcccaggaggcacggtcccccccagggggatgggcacagccacgccagatggacgagaagaccaagaaagctcctgaaaataaaccctgtgctaactggctcctgctgtactggctttcagcagaggaaatggccctgagcctcacccgagcagtggcgggcggggatgaacaggtggcaatgaagtgtgccatctggctggcagagcaacgggtgcccctgagtgtgcaactgaagcctgaggtctccccaacgcaggacatcaggctgtgggtgagcgtggaggatgctcagatgcacaccgtcaccatctggctcacagtgcgccctgatatgacagtggcgtctctcaaggacatggtttttctggactatggcttcccaccagtcttgcagcagtgggtgattgggcagcggctggcacgagaccaggagaccctgcactcccatggggtgcggcagaatggggacagtgcctacctctatctgctgtcagcccgcaacacctccctcaaccctcaggagctgcagcgggagcggcagctgcggatgctggaagatctgggcttcaaggacctcacgctgcagccgcggggccctctggagccaggccccccaaagcccggggtcccccaggaacccggacgggggcagccagatgcagtgcctgagcccccaccggtgggctggcagtgccccgggtgcaccttcatcaacaagcccacgcggcctggctgtgagatgtgctgccgggcgcgccccgaggcctaccaggtccccgcctcataccagcccgacgaggaggagcgagcgcgcctggcgggcgaggaggaggcgctgcgtcagtaccagcagcggaagcagcagcagcaggaggggaactacctgcagcacgtccagctggaccagaggagcctggtgctgaacacggagcccgccgagtgccccgtgtgctactcggtgctggcgcccggcgaggccgtggtgctgcgtgagtgtctgcacaccttctgcagggagtgcctgcagggcaccatccgcaacagccaggaggcggaggtctcctgccccttcattgacaacacctactcgtgctcgggcaagctgctggagagggagatcaaggcgctcctgacccctgaggattaccagcgatttctagacctgggcatctccattgctgaaaaccgcagtgccttcagctaccattgcaagaccccagattgcaagggatggtgcttctttgaggatgatgtcaatgagttcacctgccctgtgtgtttccacgtcaactgcctgctctgcaaggccatccatgagcagatgaactgcaaggagtatcaggaggacctggccctgcgggctcagaacgatgtggctgcccggcagacgacagagatgctgaaggtgatgctgcagcagggcgaggccatgcgctgcccccagtgccagatcgtggtacagaagaaggacggctgcgactggatccgctgcaccgtctgccacaccgagatctgctgggtcaccaagggcccacgctggggccctgggggcccaggagacaccagcgggggctgccgctgcagggtaaatgggattccttgccacccaagctgtcagaactgccactgagctaaagatggtggggccacatgctgacccagccccacatccacattctgttagaatgtagctcagggagcttcgtggacggccttgcttgctgtagcgttgtaggggccctgcctgcactgcggttgtccacggtcacatctgccccagtgcctttgtccttcccttggggcttgccggccagacttctctcccctgcggctcccacctctgcctgaccccagccttaaacatagcccctggccagaggccttgctgggtggagcctctgtgtgactccatactcctcccaccacaacactcatctgtcaaacaccaagcactctcagcctccccgccttcagctgtcagctttctggggctaacttctctgcctttgtggttggaggcctgaggcctcttggaactcttgctaacctgttcagagccaggaaggagactgcacagttttgaaagcacagcccgtcaggtccggctctgcgtctccctctctgcagcctgtgtaagctattataattaaaatggttttccgggaaaaaaaaaaactnntgncctngag

SEQ ID NO: 425296 - DNA, 2646 bp, Homo sapiens
  misc_feature (2635)..(2636): n is a, c, g, or t
  misc_feature (2639)..(2639): n is a, c, g, or t
  misc_feature (2643)..(2643): n is a, c, g, or t
attttaacaggactctccggcagctaggtggaaatggacggtagggggcaaaaagagaagcaaggaggcccaggaggaggctggttcaagacccctgagatgatggagcactgatggagctggagcgggatggggccggaggaggtgagggatgagattctgcaagtggagcccgcaggatctgctgatcgatgggacgaggaacgggagaaaaattaaagcggcgcatgaggcagacgaatgcaaacttcaccaatagctcaacgaaaagacagacggtgaccgctgagaggcagcgtcggatctggtgcggacctgtctcggcgcccgctgccctctcaccgccccacgcaggatcccggcctggtcaccgggcagtgtgatgcttcccgactgccgcggggacagcgaggcacacacagggcttgggccgcgccggaggccacacggcctggctgagttgctcctggtctcccgcctctcccaggcgacccggaggtagcatttcccaggaggcacggtcccccccagggggatgggcacagccacgccagatggacgagaagaccaagaaagcagaggaaatggccctgagcctcacccgagcagtggcgggcggggatgaacaggtggcaatgaagtgtgccatctggctggcagagcaacgggtgcccctgagtgtgcaactgaagcctgaggtctccccaacgcaggacatcaggctgtgggtgagcgtggaggatgctcagatgcacaccgtcaccatctggctcacagtgcgccctgatatgacagtggcgtctctcaaggacatggtttttctggactatggcttcccaccagtcttgcagcagtgggtgattgggcagcggctggcacgagaccaggagaccctgcactcccatggggtgcggcagaatggggacagtgcctacctctatctgctgtcagcccgcaacacctccctcaaccctcaggagctgcagcgggagcggcagctgcggatgctggaagatctgggcttcaaggacctcacgctgcagccgcggggccctctggagccaggccccccaaagcccggggtcccccaggaacccggacgggggcagccagatgcagtgcctgagcccccaccggtgggctggcagtgccccgggtgcaccttcatcaacaagcccacgcggcctggctgtgagatgtgctgccgggcgcgccccgaggcctaccaggtccccgcctcataccagcccgacgaggaggagcgagcgcgcctggcgggcgaggaggaggcgctgcgtcagtaccagcagcggaagcagcagcagcaggaggggaactacctgcagcacgtccagctggaccagaggagcctggtgctgaacacggagcccgccgagtgccccgtgtgctactcggtgctggcgcccggcgaggccgtggtgctgcgtgagtgtctgcacaccttctgcagggagtgcctgcagggcaccatccgcaacagccaggaggcggaggtctcctgccccttcattgacaacacctactcgtgctcgggcaagctgctggagagggagatcaaggcgctcctgacccctgaggattaccagcgatttctagacctgggcatctccattgctgaaaaccgcagtgccttcagctaccattgcaagaccccagattgcaagggatggtgcttctttgaggatgatgtcaatgagttcacctgccctgtgtgtttccacgtcaactgcctgctctgcaaggccatccatgagcagatgaactgcaaggagtatcaggaggacctggccctgcgggctcagaacgatgtggctgcccggcagacgacagagatgctgaaggtgatgctgcagcagggcgaggccatgcgctgcccccagtgccagatcgtggtacagaagaaggacggctgcgactggatccgctgcaccgtctgccacaccgagatctgctgggtcaccaagggcccacgctggggccctgggggcccaggagacaccagcgggggctgccgctgcagggtaaatgggattccttgccacccaagctgtcagaactgccactgagctaaagatggtggggccacatgctgacccagccccacatccacattctgttagaatgtagctcagggagcttcgtggacggccttgcttgctgtagcgttgtaggggccctgcctgcactgcggttgtccacggtcacatctgccccagtgcctttgtccttcccttggggcttgccggccagacttctctcccctgcggctcccacctctgcctgaccccagccttaaacatagcccctggccagaggccttgctgggtggagcctctgtgtgactccatactcctcccaccacaacactcatctgtcaaacaccaagcactctcagcctccccgccttcagctgtcagctttctggggctaacttctctgcctttgtggttggaggcctgaggcctcttggaactcttgctaacctgttcagagccaggaaggagactgcacagttttgaaagcacagcccgtcaggtccggctctgcgtctccctctctgcagcctgtgtaagctattataattaaaatggttttccgggaaaaaaaaaaactnntgncctngag

SEQ ID NO: 425297 - DNA, 1996 bp, Homo sapiens
ccgcccaccccgcctgcggcccagctccttcccgcggctctgcgatgcggcccgcagggtgacccgggcgggagtccggggacccgcgatcagccccggaggacggggtggggtcgccccaaacaggagcgccgggaccgctgggaccccgcactcggcgtccgccgccgccgggtagccgggcagtggaggtcccggatgaggcgacaatttttccggccccccctcccagtcccgccccacttccggggccgccactttcactttctcttccgccgaagccgctccccttgcgaagaactggggcctcccgggaggagagagggctttgccttgaaacccgggacgccaggggcgctcccgcaagtgggggtcctccgggacttggaacgccccggctgggtggtgtccgggcgtcctttccccgcttcttcccacctcggctggtcccgtttcctcctgcgcccagtgcggacctgtctcggcgcccgctgccctctcaccgccccacgcaggatcccggcctggtcaccgggcagtgtgatgcttcccgactgccgcggggacagcgaggcacacacagggcttgggccgcgccggaggccacacggcctggctgagttgctcctggtctcccgcctctcccaggcgacccggaggtagcatttcccaggaggcacggtcccccccagggggatgggcacagccacgccagatggacgagaagaccaagaaagcagaggaaatggccctgagcctcacccgagcagtggcgggcggggatgaacaggtggcaatgaagtgtgccatctggctggcagagcaacgggtgcccctgagtgtgcaactgaagcctgaggtctccccaacgcaggacatcaggctgtgggtgagcgtggaggatgctcagatgcacaccgtcaccatctggctcacagtgcgccctgatatgacagtggcgtctctcaaggacatggtttttctggactatggcttcccaccagtcttgcagcagtgggtgattgggcagcggctggcacgagaccaggagaccctgcactcccatggggtgcggcagaatggggacagtgcctacctctatctgctgtcagcccgcaacacctccctcaaccctcaggagctgcagcgggagcggcagctgcggatgctggaagatctgggcttcaaggacctcacgctgcagccgcggggccctctggagccaggccccccaaagcccggggtcccccaggaacccggacgggggcagccagatgcagtgcctgagcccccaccggtgggctggcagtgccccgggtgcaccttcatcaacaagcccacgcggcctggctgtgagatgtgctgccgggcgcgccccgaggcctaccaggtccccgcctcataccagcccgacgaggaggagcgagcgcgcctggcgggcgaggaggaggcgctgcgtcagtaccagcaggtgggcgggaaagtccctggacagacacctgcagaccgcacgggggaggtgtaggccaggaagggagacacctgcgcactgccgcgcctctccgttactgccttgcccctcccaaccatgctgctggcagtgaccctgcacctggctgtgacctgccctctctcaaaggtcaccctgtggctgagacccgctccctggctgtggcgcacatccaggttcacatgccccactcccacgtgggctgtggctccatccccagctttgacacaccacacgagtatggctggccatgaccccagcaccctagccatgaccccagcaccctagccatgaccacacctcagctcggacctcacccccacccgtctgtgacctaagcctgctccacctcgccgtgacctcaccctggactctcctactcctgacctcttccctctcgggctgggcccacccctgacttcctgagagcctggcctggaccctcgctgcgccctagggggatgacccccgaccccggtcctacgc

SEQ ID NO: 425298 - DNA, 2467 bp, Homo sapiens
  misc_feature (2456)..(2457): n is a, c, g, or t
  misc_feature (2460)..(2460): n is a, c, g, or t
  misc_feature (2464)..(2464): n is a, c, g, or t
attttaacaggactctccggcagctaggtggaaatggacggtagggggcaaaaagagaagcaaggaggcccaggaggaggctggttcaagacccctgagatgatggagcactgatggagctggagcgggatggggccggaggaggtgagggatgagattctgcaagtggagcccgcaggatctgctgatcgatgggacgaggaacgggagaaaaattaaagcggcgcatgaggcagacgaatgcaaacttcaccaatagctcaacgaaaagacagacggtgaccgctgagaggcagcgtcggatctgggcgacccggaggtagcatttcccaggaggcacggtcccccccagggggatgggcacagccacgccagatggacgagaagaccaagaaagcagaggaaatggccctgagcctcacccgagcagtggcgggcggggatgaacaggtggcaatgaagtgtgccatctggctggcagagcaacgggtgcccctgagtgtgcaactgaagcctgaggtctccccaacgcaggacatcaggctgtgggtgagcgtggaggatgctcagatgcacaccgtcaccatctggctcacagtgcgccctgatatgacagtggcgtctctcaaggacatggtttttctggactatggcttcccaccagtcttgcagcagtgggtgattgggcagcggctggcacgagaccaggagaccctgcactcccatggggtgcggcagaatggggacagtgcctacctctatctgctgtcagcccgcaacacctccctcaaccctcaggagctgcagcgggagcggcagctgcggatgctggaagatctgggcttcaaggacctcacgctgcagccgcggggccctctggagccaggccccccaaagcccggggtcccccaggaacccggacgggggcagccagatgcagtgcctgagcccccaccggtgggctggcagtgccccgggtgcaccttcatcaacaagcccacgcggcctggctgtgagatgtgctgccgggcgcgccccgaggcctaccaggtccccgcctcataccagcccgacgaggaggagcgagcgcgcctggcgggcgaggaggaggcgctgcgtcagtaccagcagcggaagcagcagcagcaggaggggaactacctgcagcacgtccagctggaccagaggagcctggtgctgaacacggagcccgccgagtgccccgtgtgctactcggtgctggcgcccggcgaggccgtggtgctgcgtgagtgtctgcacaccttctgcagggagtgcctgcagggcaccatccgcaacagccaggaggcggaggtctcctgccccttcattgacaacacctactcgtgctcgggcaagctgctggagagggagatcaaggcgctcctgacccctgaggattaccagcgatttctagacctgggcatctccattgctgaaaaccgcagtgccttcagctaccattgcaagaccccagattgcaagggatggtgcttctttgaggatgatgtcaatgagttcacctgccctgtgtgtttccacgtcaactgcctgctctgcaaggccatccatgagcagatgaactgcaaggagtatcaggaggacctggccctgcgggctcagaacgatgtggctgcccggcagacgacagagatgctgaaggtgatgctgcagcagggcgaggccatgcgctgcccccagtgccagatcgtggtacagaagaaggacggctgcgactggatccgctgcaccgtctgccacaccgagatctgctgggtcaccaagggcccacgctggggccctgggggcccaggagacaccagcgggggctgccgctgcagggtaaatgggattccttgccacccaagctgtcagaactgccactgagctaaagatggtggggccacatgctgacccagccccacatccacattctgttagaatgtagctcagggagcttcgtggacggccttgcttgctgtagcgttgtaggggccctgcctgcactgcggttgtccacggtcacatctgccccagtgcctttgtccttcccttggggcttgccggccagacttctctcccctgcggctcccacctctgcctgaccccagccttaaacatagcccctggccagaggccttgctgggtggagcctctgtgtgactccatactcctcccaccacaacactcatctgtcaaacaccaagcactctcagcctccccgccttcagctgtcagctttctggggctaacttctctgcctttgtggttggaggcctgaggcctcttggaactcttgctaacctgttcagagccaggaaggagactgcacagttttgaaagcacagcccgtcaggtccggctctgcgtctccctctctgcagcctgtgtaagctattataattaaaatggttttccgggaaaaaaaaaaactnntgncctngag

SEQ ID NO: 425299 - DNA, 1828 bp, Homo sapiens
ccgcccaccccgcctgcggcccagctccttcccgcggctctgcgatgcggcccgcagggtgacccgggcgggagtccggggacccgcgatcagccccggaggacggggtggggtcgccccaaacaggagcgccgggaccgctgggaccccgcactcggcgtccgccgccgccgggtagccgggcagtggaggtcccggatgaggcgacaatttttccggccccccctcccagtcccgccccacttccggggccgccactttcactttctcttccgccgaagccgctccccttgcgaagaactggggcctcccgggaggagagagggctttgccttgaaacccgggacgccaggggcgctcccgcaagtgggggtcctccgggacttggaacgccccggctgggtggtgtccgggcgtcctttccccgcttcttcccacctcggctggtcccgtttcctcctgcgcccagtgcggacctgtctcggcgcccgctgccctctcaccgccccacgcaggatcccggcctggtcaccgggcagtgtgatgcttcccgactgccgcggggacagcgaggcacacacagggcttgggccgcgccggaggccacacggcctggctgagttgctcctggtctcccgcctctcccaggcgacccggaggtagcatttcccaggaggcacggtcccccccagggggatgggcacagccacgccagatggacgagaagaccaagaaagcagaggaaatggccctgagcctcacccgagcagtggcgggcggggatgaacaggtggcaatgaagtgtgccatctggctggcagagcaacgggtgcccctgagtgtgcaactgaagcctgaggtctccccaacgcaggacatcaggctgtgggtgagcgtggaggatgctcagatgcacaccgtcaccatctggctcacagtgcgccctgatatgacagtggcgtctctcaaggacatggtttttctggactatggcttcccaccagtcttgcagcagtgggtgattgggcagcggctggcacgagaccaggagaccctgcactcccatggggtgcggcagaatggggacagtgcctacctctatctgctgtcagcccgcaacacctccctcaaccctcaggagctgcagcgggagcggcagctgcggatgctggaagatctgggcttcaaggacctcacgctgcagccgcggggccctctggagccaggccccccaaagcccggggtcccccaggaacccggacgggggcagccagatgcagtgcctgagcccccaccggtgggctggcagtgccccgggtgcaccttcatcaacaagcccacgcggcctggctgtgagatgtgctgccgggcgcgccccgaggcctaccaggtccccgcctcataccagcccgacgaggaggagcgagcgcgcctggcgggcgaggaggaggcgctgcgtcagtaccagcaggtcaccctgtggctgagacccgctccctggctgtggcgcacatccaggttcacatgccccactcccacgtgggctgtggctccatccccagctttgacacaccacacgagtatggctggccatgaccccagcaccctagccatgaccccagcaccctagccatgaccacacctcagctcggacctcacccccacccgtctgtgacctaagcctgctccacctcgccgtgacctcaccctggactctcctactcctgacctcttccctctcgggctgggcccacccctgacttcctgagagcctggcctggaccctcgctgcgccctagggggatgacccccgaccccggtcctacgc

SEQ ID NO: 425300 - DNA, 1948 bp, Homo sapiens
  misc_feature (1937)..(1938): n is a, c, g, or t
  misc_feature (1941)..(1941): n is a, c, g, or t
  misc_feature (1945)..(1945): n is a, c, g, or t
tgagcccctgctgttctctgcaggctgtgggtgagcgtggaggatgctcagatgcacaccgtcaccatctggctcacagtgcgccctgatatgacagtggcgtctctcaaggacatggtttttctggactatggcttcccaccagtcttgcagcagtgggtgattgggcagcggctggcacgagaccaggagaccctgcactcccatggggtgcggcagaatggggacagtgcctacctctatctgctgtcagcccgcaacacctccctcaaccctcaggagctgcagcgggagcggcagctgcggatgctggaagatctgggcttcaaggacctcacgctgcagccgcggggccctctggagccaggccccccaaagcccggggtcccccaggaacccggacgggggcagccagatgcagtgcctgagcccccaccggtgggctggcagtgccccgggtgcaccttcatcaacaagcccacgcggcctggctgtgagatgtgctgccgggcgcgccccgaggcctaccaggtccccgcctcataccagcccgacgaggaggagcgagcgcgcctggcgggcgaggaggaggcgctgcgtcagtaccagcagcggaagcagcagcagcaggaggggaactacctgcagcacgtccagctggaccagaggagcctggtgctgaacacggagcccgccgagtgccccgtgtgctactcggtgctggcgcccggcgaggccgtggtgctgcgtgagtgtctgcacaccttctgcagggagtgcctgcagggcaccatccgcaacagccaggaggcggaggtctcctgccccttcattgacaacacctactcgtgctcgggcaagctgctggagagggagatcaaggcgctcctgacccctgaggattaccagcgatttctagacctgggcatctccattgctgaaaaccgcagtgccttcagctaccattgcaagaccccagattgcaagggatggtgcttctttgaggatgatgtcaatgagttcacctgccctgtgtgtttccacgtcaactgcctgctctgcaaggccatccatgagcagatgaactgcaaggagtatcaggaggacctggccctgcgggctcagaacgatgtggctgcccggcagacgacagagatgctgaaggtgatgctgcagcagggcgaggccatgcgctgcccccagtgccagatcgtggtacagaagaaggacggctgcgactggatccgctgcaccgtctgccacaccgagatctgctgggtcaccaagggcccacgctggggccctgggggcccaggagacaccagcgggggctgccgctgcagggtaaatgggattccttgccacccaagctgtcagaactgccactgagctaaagatggtggggccacatgctgacccagccccacatccacattctgttagaatgtagctcagggagcttcgtggacggccttgcttgctgtagcgttgtaggggccctgcctgcactgcggttgtccacggtcacatctgccccagtgcctttgtccttcccttggggcttgccggccagacttctctcccctgcggctcccacctctgcctgaccccagccttaaacatagcccctggccagaggccttgctgggtggagcctctgtgtgactccatactcctcccaccacaacactcatctgtcaaacaccaagcactctcagcctccccgccttcagctgtcagctttctggggctaacttctctgcctttgtggttggaggcctgaggcctcttggaactcttgctaacctgttcagagccaggaaggagactgcacagttttgaaagcacagcccgtcaggtccggctctgcgtctccctctctgcagcctgtgtaagctattataattaaaatggttttccgggaaaaaaaaaaactnntgncctngag

SEQ ID NO: 425301 - DNA, 2301 bp, Homo sapiens
  misc_feature (2290)..(2291): n is a, c, g, or t
  misc_feature (2294)..(2294): n is a, c, g, or t
  misc_feature (2298)..(2298): n is a, c, g, or t
atcccagaatcggcttgactgaatcacgccgctggctttgaaattggagaaaacggcttatgggctaaggagttcagggcactctaactggaacagaacgaggaaatggattcagtcttagagcctccagaaggaatgcagccctgctgacatcttcattttagttcaatgaaacccattttggatttctgatctccagaactgtaaagtaatatatttgtgccattttcagcactgagtttgtgataatttgttacggcagcaacaggaaactagtacactaaggaaaaagcctctgacatgaagagcaaagttttatgctgaggagacaagatctgaaagtcagcacctgttggaggtagaggcctgcagaggcctaatgaacattcgaggttcttggttgaaagacttggggggctacaattaagaaacaagggggccaggcacagtggcgtctctctaaggacatggtttttctggactatggcttcccaccagtcttgcagcagtgggtgattgggcagcggctggcacgagaccaggagaccctgcactcccatggggtgcggcagaatggggacagtgcctacctctatctgctgtcagcccgcaacacctccctcaaccctcaggagctgcagcgggagcggcagctgcggatgctggaagatctgggcttcaaggacctcacgctgcagccgcggggccctctggagccaggccccccaaagcccggggtcccccaggaacccggacgggggcagccagatgcagtgcctgagcccccaccggtgggctggcagtgccccgggtgcaccttcatcaacaagcccacgcggcctggctgtgagatgtgctgccgggcgcgccccgaggcctaccaggtccccgcctcataccagcccgacgaggaggagcgagcgcgcctggcgggcgaggaggaggcgctgcgtcagtaccagcagcggaagcagcagcagcaggaggggaactacctgcagcacgtccagctggaccagaggagcctggtgctgaacacggagcccgccgagtgccccgtgtgctactcggtgctggcgcccggcgaggccgtggtgctgcgtgagtgtctgcacaccttctgcagggagtgcctgcagggcaccatccgcaacagccaggaggcggaggtctcctgccccttcattgacaacacctactcgtgctcgggcaagctgctggagagggagatcaaggcgctcctgacccctgaggattaccagcgatttctagacctgggcatctccattgctgaaaaccgcagtgccttcagctaccattgcaagaccccagattgcaagggatggtgcttctttgaggatgatgtcaatgagttcacctgccctgtgtgtttccacgtcaactgcctgctctgcaaggccatccatgagcagatgaactgcaaggagtatcaggaggacctggccctgcgggctcagaacgatgtggctgcccggcagacgacagagatgctgaaggtgatgctgcagcagggcgaggccatgcgctgcccccagtgccagatcgtggtacagaagaaggacggctgcgactggatccgctgcaccgtctgccacaccgagatctgctgggtcaccaagggcccacgctggggccctgggggcccaggagacaccagcgggggctgccgctgcagggtaaatgggattccttgccacccaagctgtcagaactgccactgagctaaagatggtggggccacatgctgacccagccccacatccacattctgttagaatgtagctcagggagcttcgtggacggccttgcttgctgtagcgttgtaggggccctgcctgcactgcggttgtccacggtcacatctgccccagtgcctttgtccttcccttggggcttgccggccagacttctctcccctgcggctcccacctctgcctgaccccagccttaaacatagcccctggccagaggccttgctgggtggagcctctgtgtgactccatactcctcccaccacaacactcatctgtcaaacaccaagcactctcagcctccccgccttcagctgtcagctttctggggctaacttctctgcctttgtggttggaggcctgaggcctcttggaactcttgctaacctgttcagagccaggaaggagactgcacagttttgaaagcacagcccgtcaggtccggctctgcgtctccctctctgcagcctgtgtaagctattataattaaaatggttttccgggaaaaaaaaaaactnntgncctngag

SEQ ID NO: 425302 - DNA, 1296 bp, Homo sapiens
ccgcccaccccgcctgcggcccagctccttcccgcggctctgcgatgcggcccgcagggtgacccgggcgggagtccggggacccgcgatcagccccggaggacggggtggggtcgccccaaacaggagcgccgggaccgctgggaccccgcactcggcgtccgccgccgccgggtagccgggcagtggaggtcccggatgaggcgacaatttttccggccccccctcccagtcccgccccacttccggggccgccactttcactttctcttccgccgaagccgctccccttgcgaagaactggggcctcccgggaggagagagggctttgccttgaaacccgggacgccaggggcgctcccgcaagtgggggtcctccgggacttggaacgccccggctgggtggtgtccgggcgtcctttccccgcttcttcccacctcggctggtcccgtttcctcctgcgcccagtgcggacctgtctcggcgcccgctgccctctcaccgccccacgcaggatcccggcctggtcaccgggcagtgtgatgcttcccgactgccgcggggacagcgaggcacacacagggcttgggccgcgccggaggccacacggcctggctgagttgctcctggtctcccgcctctcccaggcgacccggaggtagcatttcccaggaggcacggtcccccccagggggatgggcacagccacgccagatggacgagaagaccaagaaagcagaggaaatggccctgagcctcacccgagcagtggcgggcggggatgaacaggtggcaatgaagtgtgccatctggctggcagagcaacgggtgcccctgagtgtgcaactgaagcctgaggtctccccaacgcaggacatcagattcctcatggtgcaaaatggccattccagctccatccagccatcacatcacaggaggaagggaagaaagacacccctccacactcttctaaagagcatagctcaaaaattgtatacacttcttccgttaattcctgtggaccagaactgattcccacagctacagttcagcttgaggggagactgtatagccaagatattcagctagaattcaggggttcgcttggtaagggaagggaagagaatggatactgtcggtctgtgctccaggagacttaaactcaatgtttgccacgctgggtgtttgcctcataaacttgtgctttcgttacacaaaaacaaccccggttcttgtggacacggaaaggcaggccagtcacccttgaagggaaccgccaaggtaaagaaaaaaaa

SEQ ID NO: 425303 - DNA, 1286 bp, Homo sapiens
ccgcccaccccgcctgcggcccagctccttcccgcggctctgcgatgcggcccgcagggtgacccgggcgggagtccggggacccgcgatcagccccggaggacggggtggggtcgccccaaacaggagcgccgggaccgctgggaccccgcactcggcgtccgccgccgccgggtagccgggcagtggaggtcccggatgaggcgacaatttttccggccccccctcccagtcccgccccacttccggggccgccactttcactttctcttccgccgaagccgctccccttgcgaagaactggggcctcccgggaggagagagggctttgccttgaaacccgggacgccaggggcgctcccgcaagtgggggtcctccgggacttggaacgccccggctgggtggtgtccgggcgtcctttccccgcttcttcccacctcggctggtcccgtttcctcctgcgcccagtgcggacctgtctcggcgcccgctgccctctcaccgccccacgcaggatcccggcctggtcaccgggcagtgtgatgcttcccgactgccgcggggacagcgaggcacacacagggcttgggccgcgccggaggccacacggcctggctgagttgctcctggtctcccgcctctcccaggcgacccggaggtagcatttcccaggaggcacggtcccccccagggggatgggcacagccacgccagatggacgagaagaccaagaaagctcctgaaaataaaccctgtgctaactggctcctgctgtactggctttcagcagaggaaatggccctgagcctcacccgagcagtggcgggcggggatgaacaggtggcaatgaagtgtgccatctggctggcagagcaacgggtgcccctgagtgtgcaactgaagcctgaggtctccccaacgcaggacatcagattcctcatggtgcaaaatggccattccagctccatccagccatcacatcacaggaggaagggaagaaagacacccctccacactcttctaaagagcatagctcaaaaattgtatacacttcttccgttaattcctgtggaccagaactgattcccacagctacagttcagcttgaggggagactgtatagccaagatattcagctagaattcaggggttcgcttggtaagggaagggaagagaatggatactgtcggtctgtgctccaggagacttaaactcaatgctgaaacactttgcacaatgcctggcgtgttatgcactcaataataaacattagtgtctatcgtta

SEQ ID NO: 425304 - DNA, 1090 bp, Homo sapiens
ccgcccaccccgcctgcggcccagctccttcccgcggctctgcgatgcggcccgcagggtgacccgggcgggagtccggggacccgcgatcagccccggaggacggggtggggtcgccccaaacaggagcgccgggaccgctgggaccccgcactcggcgtccgccgccgccgggtagccgggcagtggaggtcccggatgaggcgacaatttttccggccccccctcccagtcccgccccacttccggggccgccactttcactttctcttccgccgaagccgctccccttgcgaagaactggggcctcccgggaggagagagggctttgccttgaaacccgggacgccaggggcgctcccgcaagtgggggtcctccgggacttggaacgccccggctgggtggtgtccgggcgtcctttccccgcttcttcccacctcggctggtcccgtttcctcctgcgcccagtgcggacctgtctcggcgcccgctgccctctcaccgccccacgcaggatcccggcctggtcaccgggcagtgtgatgcttcccgactgccgcggggacagcgaggcacacacagggcttgggccgcgccggaggccacacggcctggctgagttgctcctggtctcccgcctctcccaggcgacccggaggtagcatttcccaggaggcacggtcccccccagggggatgggcacagccacgccagatggacgagaagaccaagaaagattcctcatggtgcaaaatggccattccagctccatccagccatcacatcacaggaggaagggaagaaagacacccctccacactcttctaaagagcatagctcaaaaattgtatacacttcttccgttaattcctgtggaccagaactgattcccacagctacagttcagcttgaggggagactgtatagccaagatattcagctagaattcaggggttcgcttggtaagggaagggaagagaatggatactgtcggtctgtgctccaggagacttaaactcaatgctgaaacactttgcacaatgcctggcgtgttatgcactcaataataaacattagtgtctatcgtta

SEQ ID NO: 425305 - DNA, 1237 bp, Homo sapiens
ccgcccaccccgcctgcggcccagctccttcccgcggctctgcgatgcggcccgcagggtgacccgggcgggagtccggggacccgcgatcagccccggaggacggggtggggtcgccccaaacaggagcgccgggaccgctgggaccccgcactcggcgtccgccgccgccgggtagccgggcagtggaggtcccggatgaggcgacaatttttccggccccccctcccagtcccgccccacttccggggccgccactttcactttctcttccgccgaagccgctccccttgcgaagaactggggcctcccgggaggagagagggctttgccttgaaacccgggacgccaggggcgctcccgcaagtgggggtcctccgggacttggaacgccccggctgggtggtgtccgggcgtcctttccccgcttcttcccacctcggctggtcccgtttcctcctgcgcccagtgcggacctgtctcggcgcccgctgccctctcaccgccccacgcaggatcccggcctggtcaccgggcagtgtgatgcttcccgactgccgcggggacagcgaggcacacacagggcttgggccgcgccggaggccacacggcctggctgagttgctcctggtctcccgcctctcccaggcgacccggaggtagcatttcccaggaggcacggtcccccccagggggatgggcacagccacgccagatggacgagaagaccaagaaagattcctcatggtgcaaaatggccattccagctccatccagccatcacatcacaggaggaagggaagaaagacacccctccacactcttctaaagagcatagctcaaaaattgtatacacttcttccgttaattcctgtggaccagaactgattcccacagctacagttcagcttgaggggagactgtatagccaagatattcagctagaattcaggggttcgcttggtaagggaagggaagagaatggatactgtcggtctgtgctccaggagacttaaactcaatgctgaaacactttgcacaatgcctggcgtgttatgcactcaataataaacattagtgtctatcgttaaaaaaaaaaaaagggggggtaaaattccggggcaagtacggttccggtttgcaagggcaagggggtttagaggggggggtaagggggggaagtggtttgggacttggtggtgggcccgtagcggaatagggggggttgcggttgtac

SEQ ID NO: 425306 - DNA, 440 bp, Homo sapiens
  misc_feature (429)..(430): n is a, c, g, or t
  misc_feature (433)..(433): n is a, c, g, or t
  misc_feature (437)..(437): n is a, c, g, or t
ctgagatagactctaggggccagatggatgcagggagcccagcgaggaggctcctggagtcacccaggtgggggatgtggggcctggaccagagaatcagagcggcagtatggaggcagggtggaggccttggtgatgggttggtgagagggatgggaaggaaggagatattgaggagaagtccacctggggtgactgagtgaggcccctggggtcaggccttgccatgtgagggatggagtccccagtgaagggggttcctatgatcctaactcttttcccctcccctcccctagggagtgcctgcagggcaccatccgcaacagccaggaggcggaggtctcctgccccttcattgacaacacctactctctgcagcctgtgtaagctattataattaaaatggttttccgggaaaaaaaaaaactnntgncctngag

SEQ ID NO: 425307 - DNA, 172 bp, Homo sapiens
agtgcatggctggcctgaacccaagggacagcaggacaggatattcttgcctgtagaacagttcttcctaatggcacgttctggcttcaggaggcctggcttctaaccctagttatgtcattaatcaactgtgaaatacagagcaggtcacttcacctctcagtgtgtcctc

SEQ ID NO: 425308 - DNA, 2662 bp, Homo sapiens
  misc_feature (2651)..(2652): n is a, c, g, or t
  misc_feature (2655)..(2655): n is a, c, g, or t
  misc_feature (2659)..(2659): n is a, c, g, or t
ccgcccaccccgcctgcggcccagctccttcccgcggctctgcgatgcggcccgcagggtgacccgggcgggagtccggggacccgcgatcagccccggaggacggggtggggtcgccccaaacaggagcgccgggaccgctgggaccccgcactcggcgtccgccgccgccgggtagccgggcagtggaggtcccggatgaggcgacaatttttccggccccccctcccagtcccgccccacttccggggccgccactttcactttctcttccgccgaagccgctccccttgcgaagaactggggcctcccgggaggagagagggctttgccttgaaacccgggacgccaggggcgctcccgcaagtgggggtcctccgggacttggaacgccccggctgggtggtgtccgggcgtcctttccccgcttcttcccacctcggctggtcccgtttcctcctgcgcccagtgcggacctgtctcggcgcccgctgccctctcaccgccccacgcaggatcccggcctggtcaccgggcagtgtgatgcttcccgactgccgcggggacagcgaggcacacacagggcttgggccgcgccggaggccacacggcctggctgagttgctcctggtctcccgcctctcccaggcgacccggaggtagcatttcccaggaggcacggtcccccccagggggatgggcacagccacgccagatggacgagaagaccaagaaaggctgtgggtgagcgtggaggatgctcagatgcacaccgtcaccatctggctcacagtgcgccctgatatgacagtggcgtctctcaaggacatggtttttctggactatggcttcccaccagtcttgcagcagtgggtgattgggcagcggctggcacgagaccaggagaccctgcactcccatggggtgcggcagaatggggacagtgcctacctctatctgctgtcagcccgcaacacctccctcaaccctcaggagctgcagcgggagcggcagctgcggatgctggaagatctgggcttcaaggacctcacgctgcagccgcggggccctctggagccaggccccccaaagcccggggtcccccaggaacccggacgggggcagccagatgcagtgcctgagcccccaccggtgggctggcagtgccccgggtgcaccttcatcaacaagcccacgcggcctggctgtgagatgtgctgccgggcgcgccccgaggcctaccaggtccccgcctcataccagcccgacgaggaggagcgagcgcgcctggcgggcgaggaggaggcgctgcgtcagtaccagcagcggaagcagcagcagcaggaggggaactacctgcagcacgtccagctggaccagaggagcctggtgctgaacacggagcccgccgagtgccccgtgtgctactcggtgctggcgcccggcgaggccgtggtgctgcgtgagtgtctgcacaccttctgcagggagtgcctgcagggcaccatccgcaacagccaggaggcggaggtctcctgccccttcattgacaacacctactcgtgctcgggcaagctgctggagagggagatcaaggcgctcctgacccctgaggattaccagcgatttctagacctgggcatctccattgctgaaaaccgcagtgccttcagctaccattgcaagaccccagattgcaagggatggtgcttctttgaggatgatgtcaatgagttcacctgccctgtgtgtttccacgtcaactgcctgctctgcaaggccatccatgagcagatgaactgcaaggagtatcaggaggacctggccctgcgggctcagaacgatgtggctgcccggcagacgacagagatgctgaaggtgatgctgcagcagggcgaggccatgcgctgcccccagtgccagatcgtggtacagaagaaggacggctgcgactggatccgctgcaccgtctgccacaccgagatctgctgggtcaccaagggcccacgctggggccctgggggcccaggagacaccagcgggggctgccgctgcagggtaaatgggattccttgccacccaagctgtcagaactgccactgagctaaagatggtggggccacatgctgacccagccccacatccacattctgttagaatgtagctcagggagcttcgtggacggccttgcttgctgtagcgttgtaggggccctgcctgcactgcggttgtccacggtcacatctgccccagtgcctttgtccttcccttggggcttgccggccagacttctctcccctgcggctcccacctctgcctgaccccagccttaaacatagcccctggccagaggccttgctgggtggagcctctgtgtgactccatactcctcccaccacaacactcatctgtcaaacaccaagcactctcagcctccccgccttcagctgtcagctttctggggctaacttctctgcctttgtggttggaggcctgaggcctcttggaactcttgctaacctgttcagagccaggaaggagactgcacagttttgaaagcacagcccgtcaggtccggctctgcgtctccctctctgcagcctgtgtaagctattataattaaaatggttttccgggaaaaaaaaaaactnntgncctngag

SEQ ID NO: 425309 - DNA, 2807 bp, Homo sapiens
  misc_feature (2796)..(2797): n is a, c, g, or t
  misc_feature (2800)..(2800): n is a, c, g, or t
  misc_feature (2804)..(2804): n is a, c, g, or t
ccgcccaccccgcctgcggcccagctccttcccgcggctctgcgatgcggcccgcagggtgacccgggcgggagtccggggacccgcgatcagccccggaggacggggtggggtcgccccaaacaggagcgccgggaccgctgggaccccgcactcggcgtccgccgccgccgggtagccgggcagtggaggtcccggatgaggcgacaatttttccggccccccctcccagtcccgccccacttccggggccgccactttcactttctcttccgccgaagccgctccccttgcgaagaactggggcctcccgggaggagagagggctttgccttgaaacccgggacgccaggggcgctcccgcaagtgggggtcctccgggacttggaacgccccggctgggtggtgtccgggcgtcctttccccgcttcttcccacctcggctggtcccgtttcctcctgcgcccagtgcggacctgtctcggcgcccgctgccctctcaccgccccacgcaggatcccggcctggtcaccgggcagtgtgatgcttcccgactgccgcggggacagcgaggcacacacagggcttgggccgcgccggaggccacacggcctggctgagttgctcctggtctcccgcctctcccaggcgacccggaggtagcatttcccaggaggcacggtcccccccagggggatgggcacagccacgccagatggacgagaagaccaagaaagcagaggaaatggccctgagcctcacccgagcagtggcgggcggggatgaacaggtggcaatgaagtgtgccatctggctggcagagcaacgggtgcccctgagtgtgcaactgaagcctgaggtctccccaacgcaggacatcaggctgtgggtgagcgtggaggatgctcagatgcacaccgtcaccatctggctcacagtgcgccctgatatgacagtggcgtctctcaaggacatggtttttctggactatggcttcccaccagtcttgcagcagtgggtgattgggcagcggctggcacgagaccaggagaccctgcactcccatggggtgcggcagaatggggacagtgcctacctctatctgctgtcagcccgcaacacctccctcaaccctcaggagctgcagcgggagcggcagctgcggatgctggaagatctgggcttcaaggacctcacgctgcagccgcggggccctctggagccaggccccccaaagcccggggtcccccaggaacccggacgggggcagccagatgcagtgcctgagcccccaccggtgggctggcagtgccccgggtgcaccttcatcaacaagcccacgcggcctggctgtgagatgtgctgccgggcgcgccccgaggcctaccaggtccccgcctcataccagcccgacgaggaggagcgagcgcgcctggcgggcgaggaggaggcgctgcgtcagtaccagcagcggaagcagcagcagcaggaggggaactacctgcagcacgtccagctggaccagaggagcctggtgctgaacacggagcccgccgagtgccccgtgtgctactcggtgctggcgcccggcgaggccgtggtgctgcgtgagtgtctgcacaccttctgcagggagtgcctgcagggcaccatccgcaacagccaggaggcggaggtctcctgccccttcattgacaacacctactcgtgctcgggcaagctgctggagagggagatcaaggcgctcctgacccctgaggattaccagcgatttctagacctgggcatctccattgctgaaaaccgcagtgccttcagctaccattgcaagaccccagattgcaagggatggtgcttctttgaggatgatgtcaatgagttcacctgccctgtgtgtttccacgtcaactgcctgctctgcaaggccatccatgagcagatgaactgcaaggagtatcaggaggacctggccctgcgggctcagaacgatgtggctgcccggcagacgacagagatgctgaaggtgatgctgcagcagggcgaggccatgcgctgcccccagtgccagatcgtggtacagaagaaggacggctgcgactggatccgctgcaccgtctgccacaccgagatctgctgggtcaccaagggcccacgctggggccctgggggcccaggagacaccagcgggggctgccgctgcagggtaaatgggattccttgccacccaagctgtcagaactgccactgagctaaagatggtggggccacatgctgacccagccccacatccacattctgttagaatgtagctcagggagcttcgtggacggccttgcttgctgtagcgttgtaggggccctgcctgcactgcggttgtccacggtcacatctgccccagtgcctttgtccttcccttggggcttgccggccagacttctctcccctgcggctcccacctctgcctgaccccagccttaaacatagcccctggccagaggccttgctgggtggagcctctgtgtgactccatactcctcccaccacaacactcatctgtcaaacaccaagcactctcagcctccccgccttcagctgtcagctttctggggctaacttctctgcctttgtggttggaggcctgaggcctcttggaactcttgctaacctgttcagagccaggaaggagactgcacagttttgaaagcacagcccgtcaggtccggctctgcgtctccctctctgcagcctgtgtaagctattataattaaaatggttttccgggaaaaaaaaaaactnntgncctngag

SEQ ID NO: 425310 - DNA, 3168 bp, Homo sapiens
  misc_feature (3157)..(3158): n is a, c, g, or t
  misc_feature (3161)..(3161): n is a, c, g, or t
  misc_feature (3165)..(3165): n is a, c, g, or t
ccgcccaccccgcctgcggcccagctccttcccgcggctctgcgatgcggcccgcagggtgacccgggcgggagtccggggacccgcgatcagccccggaggacggggtggggtcgccccaaacaggagcgccgggaccgctgggaccccgcactcggcgtccgccgccgccgggtagccgggcagtggaggtcccggatgaggcgacaatttttccggccccccctcccagtcccgccccacttccggggccgccactttcactttctcttccgccgaagccgctccccttgcgaagaactggggcctcccgggaggagagagggctttgccttgaaacccgggacgccaggggcgctcccgcaagtgggggtcctccgggacttggaacgccccggctgggtggtgtccgggcgtcctttccccgcttcttcccacctcggctggtcccgtttcctcctgcgcccagtgcggacctgtctcggcgcccgctgccctctcaccgccccacgcaggatcccggcctggtcaccgggcagtgtgatgcttcccgactgccgcggggacagcgaggcacacacagggcttgggccgcgccggaggccacacggcctggctgagttgctcctggtctcccgcctctcccaggcgacccggaggtagcatttcccaggaggcacggtcccccccagggggatgggcacagccacgccagatggacgagaagaccaagaaagcagaggaaatggccctgagcctcacccgagcagtggcgggcggggatgaacaggtggcaatgaagtgtgccatctggctggcagagcaacgggtgcccctgagtgtgcaactgaagcctgaggtctccccaacgcaggacatcaggctgtgggtgagcgtggaggatgctcagatgcacaccgtcaccatctggctcacagtgcgccctgatatgacagtggcgtctctcaaggacatggtttttctggactatggcttcccaccagtcttgcagcagtgggtgattgggcagcggctggcacgagaccaggagaccctgcactcccatggggtgcggcagaatggggacagtgcctacctctatctgctgtcagcccgcaacacctccctcaaccctcaggagctgcagcgggagcggcagctgcggatgctggaagatctgggcttcaaggacctcacgctgcagccgcggggccctctggagccaggccccccaaagcccggggtcccccaggaacccggacgggggcagccagatgcagtgcctgagcccccaccggtgggctggcagtgccccgggtgcaccttcatcaacaagcccacgcggcctggctgtgagatgtgctgccgggcgcgccccgaggcctaccaggtccccgcctcataccagcccgacgaggaggagcgagcgcgcctggcgggcgaggaggaggcgctgcgtcagtaccagcagcggaagcagcagcagcaggaggggaactacctgcagcacgtccagctggaccagaggagcctggtgctgaacacggagcccgccgagtgccccgtgtgctactcggtgctggcgcccggcgaggccgtggtgctgcgtgagtgtctgcacaccttctgcagggagtgcctgcagggcaccatccgcaacagccaggaggcggaggtctcctgccccttcattgacaacacctactcgtgctcgggcaagctgctggagagggagatcaaggcgctcctgacccctgaggattaccagcgatttctagacctgggcatctccattgctgaaaaccgcagtgccttcagctaccattgcaagaccccagattgcaagggatggtgcttctttgaggatgatgtcaatgagttcacctgccctgtgtgtttccacgtcaactgcctgctctgcaaggccatccatgagcagatgaactgcaaggagtatcaggaggacctggccctgcgggctcagaacgatgtggctgcccggcagacgacagagatgctgaaggtgaggctgggacagggccgaggcctagggattttaagttctgggatccaggtgggggctgggggcttcccagtaagggctgtgctcacacatccctggaggctctgacctcccttctggctgtcactcccatccggaggtgggacttaggccgaatggtcatgtcaggaagagcgtctgggtggagggtggagaccacaggaatgaagagggggttgctggatggagcctggcctggcagagccacacaggagagactccacagctctagagggtcaccaccttctccctgccatggggaggggccaggctgggtgactgccccagccccgccccagggccagcacctgccccactccaggtgatgctgcagcagggcgaggccatgcgctgcccccagtgccagatcgtggtacagaagaaggacggctgcgactggatccgctgcaccgtctgccacaccgagatctgctgggtcaccaagggcccacgctggggccctgggggcccaggagacaccagcgggggctgccgctgcagggtaaatgggattccttgccacccaagctgtcagaactgccactgagctaaagatggtggggccacatgctgacccagccccacatccacattctgttagaatgtagctcagggagcttcgtggacggccttgcttgctgtagcgttgtaggggccctgcctgcactgcggttgtccacggtcacatctgccccagtgcctttgtccttcccttggggcttgccggccagacttctctcccctgcggctcccacctctgcctgaccccagccttaaacatagcccctggccagaggccttgctgggtggagcctctgtgtgactccatactcctcccaccacaacactcatctgtcaaacaccaagcactctcagcctccccgccttcagctgtcagctttctggggctaacttctctgcctttgtggttggaggcctgaggcctcttggaactcttgctaacctgttcagagccaggaaggagactgcacagttttgaaagcacagcccgtcaggtccggctctgcgtctccctctctgcagcctgtgtaagctattataattaaaatggttttccgggaaaaaaaaaaactnntgncctngag

SEQ ID NO: 425311 - DNA, 2501 bp, Homo sapiens
  misc_feature (2490)..(2491): n is a, c, g, or t
  misc_feature (2494)..(2494): n is a, c, g, or t
  misc_feature (2498)..(2498): n is a, c, g, or t
ccgcccaccccgcctgcggcccagctccttcccgcggctctgcgatgcggcccgcagggtgacccgggcgggagtccggggacccgcgatcagccccggaggacggggtggggtcgccccaaacaggagcgccgggaccgctgggaccccgcactcggcgtccgccgccgccgggtagccgggcagtggaggtcccggatgaggcgacaatttttccggccccccctcccagtcccgccccacttccggggccgccactttcactttctcttccgccgaagccgctccccttgcgaagaactggggcctcccgggaggagagagggctttgccttgaaacccgggacgccaggggcgctcccgcaagtgggggtcctccgggacttggaacgccccggctgggtggtgtccgggcgtcctttccccgcttcttcccacctcggctggtcccgtttcctcctgcgcccagtgcggacctgtctcggcgcccgctgccctctcaccgccccacgcaggatcccggcctggtcaccgggcagtgtgatgcttcccgactgccgcggggacagcgaggcacacacagggcttgggccgcgccggaggccacacggcctggctgagttgctcctggtctcccgcctctcccaggcgacccggaggtagcatttcccaggaggcacggtcccccccagggggatgggcacagccacgccagatggacgagaagaccaagaaaggctgtgggtgagcgtggaggatgctcagatgcacaccgtcaccatctggctcacagtgcgccctgatatgacagtggcgtctctcaaggacatggtttttctggactatggcttcccaccagtcttgcagcagtgggtgattgggcagcggctggcacgagaccaggagaccctgcactcccatggggtgcggcagaatggggacagtgcctacctctatctgctgtcagcccgcaacacctccctcaaccctcaggagctgcagcgggagcggcagctgcggatgctggaagatctgggcttcaaggacctcacgctgcagccgcggggccctctggagccaggccccccaaagcccggggtcccccaggaacccggacgggggcagccagatgcagtgcctgagcccccaccggtgggctggcagtgccccgggtgcaccttcatcaacaagcccacgcggcctggctgtgagatgtgctgccgggcgcgccccgaggcctaccaggtccccgcctcataccagcccgacgaggaggagcgagcgcgcctggcgggcgaggaggaggcgctgcgtcagtaccagcagggagtgcctgcagggcaccatccgcaacagccaggaggcggaggtctcctgccccttcattgacaacacctactcgtgctcgggcaagctgctggagagggagatcaaggcgctcctgacccctgaggattaccagcgatttctagacctgggcatctccattgctgaaaaccgcagtgccttcagctaccattgcaagaccccagattgcaagggatggtgcttctttgaggatgatgtcaatgagttcacctgccctgtgtgtttccacgtcaactgcctgctctgcaaggccatccatgagcagatgaactgcaaggagtatcaggaggacctggccctgcgggctcagaacgatgtggctgcccggcagacgacagagatgctgaaggtgatgctgcagcagggcgaggccatgcgctgcccccagtgccagatcgtggtacagaagaaggacggctgcgactggatccgctgcaccgtctgccacaccgagatctgctgggtcaccaagggcccacgctggggccctgggggcccaggagacaccagcgggggctgccgctgcagggtaaatgggattccttgccacccaagctgtcagaactgccactgagctaaagatggtggggccacatgctgacccagccccacatccacattctgttagaatgtagctcagggagcttcgtggacggccttgcttgctgtagcgttgtaggggccctgcctgcactgcggttgtccacggtcacatctgccccagtgcctttgtccttcccttggggcttgccggccagacttctctcccctgcggctcccacctctgcctgaccccagccttaaacatagcccctggccagaggccttgctgggtggagcctctgtgtgactccatactcctcccaccacaacactcatctgtcaaacaccaagcactctcagcctccccgccttcagctgtcagctttctggggctaacttctctgcctttgtggttggaggcctgaggcctcttggaactcttgctaacctgttcagagccaggaaggagactgcacagttttgaaagcacagcccgtcaggtccggctctgcgtctccctctctgcagcctgtgtaagctattataattaaaatggttttccgggaaaaaaaaaaactnntgncctngag

SEQ ID NO: 425312 - DNA, 2563 bp, Homo sapiens
ccgcccaccccgcctgcggcccagctccttcccgcggctctgcgatgcggcccgcagggtgacccgggcgggagtccggggacccgcgatcagccccggaggacggggtggggtcgccccaaacaggagcgccgggaccgctgggaccccgcactcggcgtccgccgccgccgggtagccgggcagtggaggtcccggatgaggcgacaatttttccggccccccctcccagtcccgccccacttccggggccgccactttcactttctcttccgccgaagccgctccccttgcgaagaactggggcctcccgggaggagagagggctttgccttgaaacccgggacgccaggggcgctcccgcaagtgggggtcctccgggacttggaacgccccggctgggtggtgtccgggcgtcctttccccgcttcttcccacctcggctggtcccgtttcctcctgcgcccagtgcggacctgtctcggcgcccgctgccctctcaccgccccacgcaggatcccggcctggtcaccgggcagtgtgatgcttcccgactgccgcggggacagcgaggcacacacagggcttgggccgcgccggaggccacacggcctggctgagttgctcctggtctcccgcctctcccaggcgacccggaggtagcatttcccaggaggcacggtcccccccagggggatgggcacagccacgccagatggacgagaagaccaagaaagcagaggaaatggccctgagcctcacccgagcagtggcgggcggggatgaacaggtggcaatgaagtgtgccatctggctggcagagcaacgggtgcccctgagtgtgcaactgaagcctgaggtctccccaacgcaggacatcaggctgtgggtgagcgtggaggatgctcagatgcacaccgtcaccatctggctcacagtgcgccctgatatgacagtggcgtctctcaaggacatggtttttctggactatggcttcccaccagtcttgcagcagtgggtgattgggcagcggctggcacgagaccaggagaccctgcactcccatggggtgcggcagaatggggacagtgcctacctctatctgctgtcagcccgcaacacctccctcaaccctcaggagctgcagcgggagcggcagctgcggatgctggaagatctgggcttcaaggacctcacgctgcagccgcggggccctctggagccaggccccccaaagcccggggtcccccaggaacccggacgggggcagccagatgcagtgcctgagcccccaccggtgggctggcagtgccccgggtgcaccttcatcaacaagcccacgcggcctggctgtgagatgtgctgccgggcgcgccccgaggcctaccaggtccccgcctcataccagcccgacgaggaggagcgagcgcgcctggcgggcgaggaggaggcgctgcgtcagtaccagcagcggaagcagcagcagcaggaggggaactacctgcagcacgtccagctggaccagaggagcctggtgctgaacacggagcccgccgagtgccccgtgtgctactcggtgctggcgcccggcgaggccgtggtgctgcgtgagtgtctgcacaccttctgcagggagtgcctgcagggcaccatccgcaacagccaggaggcggaggtctcctgccccttcattgacaacacctactcgtgctcgggcaagctgctggagagggagatcaaggcgctcctgacccctgaggattaccagcgatttctagacctgggcatctccattgctgaaaaccgcagtgccttcagctaccattgcaagaccccagattgcaagggatggtgcttctttgaggatgatgtcaatgagttcacctgccctgtgtgtttccacgtcaactgcctgctctgcaaggccatccatgagcagatgaactgcaaggagtatcaggaggacctggccctgcgggctcagaacgatgtggctgcccggcagacgacagagatgctgaaggtgatgctgcagcagggcgaggccatgcgctgcccccagtgccagatcgtggtacagaagaaggacggctgcgactggatccgctgcaccgtctgccacaccgagatctgctgggtcaccaagggcccacgctggggccctgggggcccaggagacaccagcgggggctgccgctgcagggtaaatgggattccttgccacccaagctgtcagaactgccactgagctaaagatggtggggccacatgctgacccagccccacatccacattctgttagaatgtagctcagggagcttcgtggacggccttgcttgctgtagcgttgtaggggccctgcctgcactgcggttgtccacggtcacatctgccccagtgcctttgtccttcccttggggcttgggtggcaaggaatcccatttaccctgcagcggcagcccccgttggtgtctcctgggcccccagggccccagcgtgggcccttggtgacccagcagatctcggtgtggcagacgtgcagcggacccagaccagccttcga

SEQ ID NO: 425313 - DNA, 1235 bp, Homo sapiens
ccgcccaccccgcctgcggcccagctccttcccgcggctctgcgatgcggcccgcagggtgacccgggcgggagtccggggacccgcgatcagccccggaggacggggtggggtcgccccaaacaggagcgccgggaccgctgggaccccgcactcggcgtccgccgccgccgggtagccgggcagtggaggtcccggatgaggcgacaatttttccggccccccctcccagtcccgccccacttccggggccgccactttcactttctcttccgccgaagccgctccccttgcgaagaactggggcctcccgggaggagagagggctttgccttgaaacccgggacgccaggggcgctcccgcaagtgggggtcctccgggacttggaacgccccggctgggtggtgtccgggcgtcctttccccgcttcttcccacctcggctggtcccgtttcctcctgcgcccagtgcggacctgtctcggcgcccgctgccctctcaccgccccacgcaggatcccggcctggtcaccgggcagtgtgatgcttcccgactgccgcggggacagcgaggcacacacagggcttgggccgcgccggaggccacacggcctggctgagttgctcctggtctcccgcctctcccaggcgacccggaggtagcatttcccaggaggcacggtcccccccagggggatgggcacagccacgccagatggacgagaagaccaagaaagcagaggaaatggccctgagcctcacccgagcagtggcgggcggggatgaacaggtggcaatgaagtgtgccatctggctggcagagcaacgggtgcccctgagtgtgcaactgaagcctgaggtctccccaacgcaggacatcagattcctcatggtgcaaaatggccattccagctccatccagccatcacatcacaggaggaagggaagaaagacacccctccacactcttctaaagagcatagctcaaaaattgtatacacttcttccgttaattcctgtggaccagaactgattcccacagctacagttcagcttgaggggagactgtatagccaagatattcagctagaattcaggggttcgcttggtaagggaagggaagagaatggatactgtcggtctgtgctccaggagacttaaactcaatgctgaaacactttgcacaatgcctggcgtgttatgcactcaataataaacattagtgtctatcgtta

SEQ ID NO: 425314 - DNA, 2516 bp, Homo sapiens
ccgcccaccccgcctgcggcccagctccttcccgcggctctgcgatgcggcccgcagggtgacccgggcgggagtccggggacccgcgatcagccccggaggacggggtggggtcgccccaaacaggagcgccgggaccgctgggaccccgcactcggcgtccgccgccgccgggtagccgggcagtggaggtcccggatgaggcgacaatttttccggccccccctcccagtcccgccccacttccggggccgccactttcactttctcttccgccgaagccgctccccttgcgaagaactggggcctcccgggaggagagagggctttgccttgaaacccgggacgccaggggcgctcccgcaagtgggggtcctccgggacttggaacgccccggctgggtggtgtccgggcgtcctttccccgcttcttcccacctcggctggtcccgtttcctcctgcgcccagtgcggacctgtctcggcgcccgctgccctctcaccgccccacgcaggatcccggcctggtcaccgggcagtgtgatgcttcccgactgccgcggggacagcgaggcacacacagggcttgggccgcgccggaggccacacggcctggctgagttgctcctggtctcccgcctctcccaggcgacccggaggtagcatttcccaggaggcacggtcccccccagggggatgggcacagccacgccagatggacgagaagaccaagaaagcagaggaaatggccctgagcctcacccgagcagtggcgggcggggatgaacaggtggcaatgaagtgtgccatctggctggcagagcaacgggtgcccctgagtgtgcaactgaagcctgaggtctccccaacgcaggacatcaggctgtgggtgagcgtggaggatgctcagatgcacaccgtcaccatctggctcacagtgcgccctgatatgacagtggcgtctctcaaggacatggtttttctggactatggcttcccaccagtcttgcagcagtgggtgattgggcagcggctggcacgagaccaggagaccctgcactcccatggggtgcggcagaatggggacagtgcctacctctatctgctgtcagcccgcaacacctccctcaaccctcaggagctgcagcgggagcggcagctgcggatgctggaagatctgggcttcaaggacctcacgctgcagccgcggggccctctggagccaggccccccaaagcccggggtcccccaggaacccggacgggggcagccagatgcagtgcctgagcccccaccggtgggctggcagtgccccgggtgcaccttcatcaacaagcccacgcggcctggctgtgagatgtgctgccgggcgcgccccgaggcctaccaggtccccgcctcataccagcccgacgaggaggagcgagcgcgcctggcgggcgaggaggaggcgctgcgtcagtaccagcagcggaagcagcagcagcaggaggggaactacctgcagcacgtccagctggaccagaggagcctggtgctgaacacggagcccgccgagtgccccgtgtgctactcggtgctggcgcccggcgaggccgtggtgctgcgtgagtgtctgcacaccttctgcaggtgcggcccccagtcccacccccggcaatgcagcttaatcaaagccgccaattacgcagggctggacgtgggtggggccctgtgctctgatacctcattggacgcccgcgaaaacctacgaggtaggctccgtctccccatgttgcggacgaggaacctgagggaaagagaggcccagcgccttaccccaggcccacggctcatgagagaagcagcctagacgtgagcgcaggcgtggggggagactcccttcccctctacctttcgccgcccgggctcctgcagccacgctgctctcagcctcgctgtgggcatctgccagtttctgagtctcctgtcatggcccccccacccctgaatgtggggaacacagacccgctcaccacagcggacccttgtggagccgcccctgggtgacaggctccgtgcctgcctcctgcagcttacattccagcagagaggctgatgagaatcggataatcgctggttgatgtctttgtgaattgtgtcaaatgctacatacagtacattaagagacaacaggagtccttcccagagagggtggtctggaagcttccaaggaggtagccccagagcagggaccggaaggcctgctgtaggtgtggggtgtgggcctggcctgttggaggagactgaggaggtctcttggtggctggagcagagggatgaagggggtaatcagagcaggatagagaggtgttgggtacgtgagcagcagtgaggagttgggatttgttctgggtaggatgggagtcactggggagacatggctgttgcgacgcgggctctggagcttgtcaccattggacagtctccctgatggaccctcagtcttctcatgaataaattccttcaacgccaaa

SEQ ID NO: 425315 - DNA, 2141 bp, Homo sapiens
ccgcccaccccgcctgcggcccagctccttcccgcggctctgcgatgcggcccgcagggtgacccgggcgggagtccggggacccgcgatcagccccggaggacggggtggggtcgccccaaacaggagcgccgggaccgctgggaccccgcactcggcgtccgccgccgccgggtagccgggcagtggaggtcccggatgaggcgacaatttttccggccccccctcccagtcccgccccacttccggggccgccactttcactttctcttccgccgaagccgctccccttgcgaagaactggggcctcccgggaggagagagggctttgccttgaaacccgggacgccaggggcgctcccgcaagtgggggtcctccgggacttggaacgccccggctgggtggtgtccgggcgtcctttccccgcttcttcccacctcggctggtcccgtttcctcctgcgcccagtgcggacctgtctcggcgcccgctgccctctcaccgccccacgcaggatcccggcctggtcaccgggcagtgtgatgcttcccgactgccgcggggacagcgaggcacacacagggcttgggccgcgccggaggccacacggcctggctgagttgctcctggtctcccgcctctcccaggcgacccggaggtagcatttcccaggaggcacggtcccccccagggggatgggcacagccacgccagatggacgagaagaccaagaaagcagaggaaatggccctgagcctcacccgagcagtggcgggcggggatgaacaggtggcaatgaagtgtgccatctggctggcagagcaacgggtgcccctgagtgtgcaactgaagcctgaggtctccccaacgcaggacatcaggctgtgggtgagcgtggaggatgctcagatgcacaccgtcaccatctggctcacagtgcgccctgatatgacagtggcgtctctcaaggacatggtttttctggactatggcttcccaccagtcttgcagcagtgggtgattgggcagcggctggcacgagaccaggagaccctgcactcccatggggtgcggcagaatggggacagtgcctacctctatctgctgtcagcccgcaacacctccctcaaccctcaggagctgcagcgggagcggcagctgcggatgctggaagatctgggcttcaaggacctcacgctgcagccgcggggccctctggagccaggccccccaaagcccggggtcccccaggaacccggacgggggcagccagatgcagtgcctgagcccccaccggtgggctggcagtgccccgggtgcaccttcatcaacaagcccacgcggcctggctgtgagatgtgctgccgggcgcgccccgaggcctaccaggtccccgcctcataccagcccgacgaggaggagcgagcgcgcctggcgggcgaggaggaggcgctgcgtcagtaccagcaggtgggcgggaaagtccctggacagacacctgcagaccgcacgggggaggtgtaggccaggaagggagacacctgcgcactgccgcgcctctccgttactgccttgcccctcccaaccatgctgctggcagtgaccctgcacctggctgtgacctgccctctctcaaaggtcaccctgtggctgagacccgctccctggctgtggcgcacatccaggttcacatgccccactcccacgtgggctgtggctccatccccagctttgacacaccacacgagtatggctggccatgaccccagcaccctagccatgaccccagcaccctagccatgaccacacctcagctcggacctcacccccacccgtctgtgacctaagcctgctccacctcgccgtgacctcaccctggactctcctactcctggcctgttggaggagactgaggaggtctcttggtggctggagcagagggatgaagggggtaatcagagcaggatagagaggtgttgggtacgtgagcagcagtgaggagttgggatttgttctgggtaggatgggagtcactggggagacatggctgttgcgacgcgggctctggagcttgtcaccattggacagtctccctgatggaccctcagtcttctcatgaataaattccttcaacgccaaa

SEQ ID NO: 425316 - DNA, 2014 bp, Homo sapiens
ccgcccaccccgcctgcggcccagctccttcccgcggctctgcgatgcggcccgcagggtgacccgggcgggagtccggggacccgcgatcagccccggaggacggggtggggtcgccccaaacaggagcgccgggaccgctgggaccccgcactcggcgtccgccgccgccgggtagccgggcagtggaggtcccggatgaggcgacaatttttccggccccccctcccagtcccgccccacttccggggccgccactttcactttctcttccgccgaagccgctccccttgcgaagaactggggcctcccgggaggagagagggctttgccttgaaacccgggacgccaggggcgctcccgcaagtgggggtcctccgggacttggaacgccccggctgggtggtgtccgggcgtcctttccccgcttcttcccacctcggctggtcccgtttcctcctgcgcccagtgcggacctgtctcggcgcccgctgccctctcaccgccccacgcaggatcccggcctggtcaccgggcagtgtgatgcttcccgactgccgcggggacagcgaggcacacacagggcttgggccgcgccggaggccacacggcctggctgagttgctcctggtctcccgcctctcccaggcgacccggaggtagcatttcccaggaggcacggtcccccccagggggatgggcacagccacgccagatggacgagaagaccaagaaagcagaggaaatggccctgagcctcacccgagcagtggcgggcggggatgaacaggtggcaatgaagtgtgccatctggctggcagagcaacgggtgcccctgagtgtgcaactgaagcctgaggtctccccaacgcaggacatcaggctgtgggtgagcgtggaggatgctcagatgcacaccgtcaccatctggctcacagtgcgccctgatatgacagtggcgtctctcaaggacatggtttttctggactatggcttcccaccagtcttgcagcagtgggtgattgggcagcggctggcacgagaccaggagaccctgcactcccatggggtgcggcagaatggggacagtgcctacctctatctgctgtcagcccgcaacacctccctcaaccctcaggagctgcagcgggagcggcagctgcggatgctggaagatctgggcttcaaggacctcacgctgcagccgcggggccctctggagccaggccccccaaagcccggggtcccccaggaacccggacgggggcagccagatgcagtgcctgagcccccaccggtgggctggcagtgccccgggtgcaccttcatcaacaagcccacgcggcctggctgtgagatgtgctgccgggcgcgccccgaggcctaccaggtccccgcctcataccagcccgacgaggaggagcgagcgcgcctggcgggcgaggaggaggcgctgcgtcagtaccagcaggtgggcgggaaagtccctggacagacacctgcagaccgcacgggggaggtgtaggccaggaagggagacacctgcgcactgccgcgcctctccgttactgccttgcccctcccaaccatgctgctggcagtgaccctgcacctggctgtgaccctgcacctggctgtgacctgccctctctcaaaggtcaccctgtggctgagacccgctccctggctgtggcgcacatccaggttcacatgccccactcccacgtgggctgtggctccatccccagctttgacacaccacacgagtatggctggccatgaccccagcaccctagccatgaccccagcaccctagccatgaccacacctcagctcggacctcacccccacccgtctgtgacctaagcctgctccacctcgccgtgacctcaccctggactctcctactcctgacctcttccctctcgggctgggcccacccctgacttcctgagagcctggcctggaccctcgctgcgccctagggggatgacccccgaccccggtcctacgc

SEQ ID NO: 425317 - DNA, 2060 bp, Homo sapiens
  misc_feature (2049)..(2050): n is a, c, g, or t
  misc_feature (2053)..(2053): n is a, c, g, or t
  misc_feature (2057)..(2057): n is a, c, g, or t
gccagatctcacgaggactcactatggcgagaagtcactacagtgagcgcagcaccaggctgtgagggagctgcccctatgacccaaacacctcccaccaggcctcaccttcaacactgaggattacagttcaaggctgtgggtgagcgtggaggatgctcagatgcacaccgtcaccatctggctcacagtgcgccctgatatgacagtggcgtctctcaaggacatggtttttctggactatggcttcccaccagtcttgcagcagtgggtgattgggcagcggctggcacgagaccaggagaccctgcactcccatggggtgcggcagaatggggacagtgcctacctctatctgctgtcagcccgcaacacctccctcaaccctcaggagctgcagcgggagcggcagctgcggatgctggaagatctgggcttcaaggacctcacgctgcagccgcggggccctctggagccaggccccccaaagcccggggtcccccaggaacccggacgggggcagccagatgcagtgcctgagcccccaccggtgggctggcagtgccccgggtgcaccttcatcaacaagcccacgcggcctggctgtgagatgtgctgccgggcgcgccccgaggcctaccaggtccccgcctcataccagcccgacgaggaggagcgagcgcgcctggcgggcgaggaggaggcgctgcgtcagtaccagcagcggaagcagcagcagcaggaggggaactacctgcagcacgtccagctggaccagaggagcctggtgctgaacacggagcccgccgagtgccccgtgtgctactcggtgctggcgcccggcgaggccgtggtgctgcgtgagtgtctgcacaccttctgcagggagtgcctgcagggcaccatccgcaacagccaggaggcggaggtctcctgccccttcattgacaacacctactcgtgctcgggcaagctgctggagagggagatcaaggcgctcctgacccctgaggattaccagcgatttctagacctgggcatctccattgctgaaaaccgcagtgccttcagctaccattgcaagaccccagattgcaagggatggtgcttctttgaggatgatgtcaatgagttcacctgccctgtgtgtttccacgtcaactgcctgctctgcaaggccatccatgagcagatgaactgcaaggagtatcaggaggacctggccctgcgggctcagaacgatgtggctgcccggcagacgacagagatgctgaaggtgatgctgcagcagggcgaggccatgcgctgcccccagtgccagatcgtggtacagaagaaggacggctgcgactggatccgctgcaccgtctgccacaccgagatctgctgggtcaccaagggcccacgctggggccctgggggcccaggagacaccagcgggggctgccgctgcagggtaaatgggattccttgccacccaagctgtcagaactgccactgagctaaagatggtggggccacatgctgacccagccccacatccacattctgttagaatgtagctcagggagcttcgtggacggccttgcttgctgtagcgttgtaggggccctgcctgcactgcggttgtccacggtcacatctgccccagtgcctttgtccttcccttggggcttgccggccagacttctctcccctgcggctcccacctctgcctgaccccagccttaaacatagcccctggccagaggccttgctgggtggagcctctgtgtgactccatactcctcccaccacaacactcatctgtcaaacaccaagcactctcagcctccccgccttcagctgtcagctttctggggctaacttctctgcctttgtggttggaggcctgaggcctcttggaactcttgctaacctgttcagagccaggaaggagactgcacagttttgaaagcacagcccgtcaggtccggctctgcgtctccctctctgcagcctgtgtaagctattataattaaaatggttttccgggaaaaaaaaaaactnntgncctngag

SEQ ID NO: 425318 - DNA, 1347 bp, Homo sapiens
  misc_feature (12)..(12): n is a, c, g, or t
  misc_feature (1336)..(1337): n is a, c, g, or t
  misc_feature (1340)..(1340): n is a, c, g, or t
  misc_feature (1344)..(1344): n is a, c, g, or t
tggggtttctgnattattcaacctagttgcccttcgcactgactccgactcttgaggatacccggacgagcctggtgctgaacacggagcccgccgagtgccccgtgtgctactcggtgctggcgcccggcgaggccgtggtgctgcgtgagtgtctgcacaccttctgcagggagtgcctgcagggcaccatccgcaacagccaggaggcggaggtctcctgccccttcattgacaacacctactcgtgctcgggcaagctgctggagagggagatcaaggcgctcctgacccctgaggattaccagcgatttctagacctgggcatctccattgctgaaaaccgcagtgccttcagctaccattgcaagaccccagattgcaagggatggtgcttctttgaggatgatgtcaatgagttcacctgccctgtgtgtttccacgtcaactgcctgctctgcaaggccatccatgagcagatgaactgcaaggagtatcaggaggacctggccctgcgggctcagaacgatgtggctgcccggcagacgacagagatgctgaaggtgatgctgcagcagggcgaggccatgcgctgcccccagtgccagatcgtggtacagaagaaggacggctgcgactggatccgctgcaccgtctgccacaccgagatctgctgggtcaccaagggcccacgctggggccctgggggcccaggagacaccagcgggggctgccgctgcagggtaaatgggattccttgccacccaagctgtcagaactgccactgagctaaagatggtggggccacatgctgacccagccccacatccacattctgttagaatgtagctcagggagcttcgtggacggccttgcttgctgtagcgttgtaggggccctgcctgcactgcggttgtccacggtcacatctgccccagtgcctttgtccttcccttggggcttgccggccagacttctctcccctgcggctcccacctctgcctgaccccagccttaaacatagcccctggccagaggccttgctgggtggagcctctgtgtgactccatactcctcccaccacaacactcatctgtcaaacaccaagcactctcagcctccccgccttcagctgtcagctttctggggctaacttctctgcctttgtggttggaggcctgaggcctcttggaactcttgctaacctgttcagagccaggaaggagactgcacagttttgaaagcacagcccgtcaggtccggctctgcgtctccctctctgcagcctgtgtaagctattataattaaaatggttttccgggaaaaaaaaaaactnntgncctngag

SEQ ID NO: 425319 - DNA, 1471 bp, Homo sapiens
  misc_feature (1460)..(1461): n is a, c, g, or t
  misc_feature (1464)..(1464): n is a, c, g, or t
  misc_feature (1468)..(1468): n is a, c, g, or t
ctgagatagactctaggggccagatggatgcagggagcccagcgaggaggctcctggagtcacccaggtgggggatgtggggcctggaccagagaatcagagcggcagtatggaggcagggtggaggccttggtgatgggttggtgagagggatgggaaggaaggagatattgaggagaagtccacctggggtgactgagtgaggcccctggggtcaggccttgccatgtgagggatggagtccccagtgaagggggttcctatgatcctaactcttttcccctcccctcccctagggagtgcctgcagggcaccatccgcaacagccaggaggcggaggtctcctgccccttcattgacaacacctactcgtgctcgggcaagctgctggagagggagatcaaggcgctcctgacccctgaggattaccagcgatttctagacctgggcatctccattgctgaaaaccgcagtgccttcagctaccattgcaagaccccagattgcaagggatggtgcttctttgaggatgatgtcaatgagttcacctgccctgtgtgtttccacgtcaactgcctgctctgcaaggccatccatgagcagatgaactgcaaggagtatcaggaggacctggccctgcgggctcagaacgatgtggctgcccggcagacgacagagatgctgaaggtgatgctgcagcagggcgaggccatgcgctgcccccagtgccagatcgtggtacagaagaaggacggctgcgactggatccgctgcaccgtctgccacaccgagatctgctgggtcaccaagggcccacgctggggccctgggggcccaggagacaccagcgggggctgccgctgcagggtaaatgggattccttgccacccaagctgtcagaactgccactgagctaaagatggtggggccacatgctgacccagccccacatccacattctgttagaatgtagctcagggagcttcgtggacggccttgcttgctgtagcgttgtaggggccctgcctgcactgcggttgtccacggtcacatctgccccagtgcctttgtccttcccttggggcttgccggccagacttctctcccctgcggctcccacctctgcctgaccccagccttaaacatagcccctggccagaggccttgctgggtggagcctctgtgtgactccatactcctcccaccacaacactcatctgtcaaacaccaagcactctcagcctccccgccttcagctgtcagctttctggggctaacttctctgcctttgtggttggaggcctgaggcctcttggaactcttgctaacctgttcagagccaggaaggagactgcacagttttgaaagcacagcccgtcaggtccggctctgcgtctccctctctgcagcctgtgtaagctattataattaaaatggttttccgggaaaaaaaaaaactnntgncctngag

SEQ ID NO: 425320 - DNA, 1554 bp, Homo sapiens
ccgcccaccccgcctgcggcccagctccttcccgcggctctgcgatgcggcccgcagggtgacccgggcgggagtccggggacccgcgatcagccccggaggacggggtggggtcgccccaaacaggagcgccgggaccgctgggaccccgcactcggcgtccgccgccgccgggtagccgggcagtggaggtcccggatgaggcgacaatttttccggccccccctcccagtcccgccccacttccggggccgccactttcactttctcttccgccgaagccgctccccttgcgaagaactggggcctcccgggaggagagagggctttgccttgaaacccgggacgccaggggcgctcccgcaagtgggggtcctccgggacttggaacgccccggctgggtggtgtccgggcgtcctttccccgcttcttcccacctcggctggtcccgtttcctcctgcgcccagtgcggacctgtctcggcgcccgctgccctctcaccgccccacgcaggatcccggcctggtcaccgggcagtgtgatgcttcccgactgccgcggggacagcgaggcacacacagggcttgggccgcgccggaggccacacggcctggctgagttgctcctggtctcccgcctctcccaggcgacccggaggtagcatttcccaggaggcacggtcccccccagggggatgggcacagccacgccagatggacgagaagaccaagaaagcagaggaaatggccctgagcctcacccgagcagtggcgggcggggatgaacaggtggcaatgaagtgtgccatctggctggcagagcaacgggtgcccctgagtgtgcaactgaagcctgaggtctccccaacgcaggacatcaggtgaggagtgcatggctggcctgaacccaagggacagcaggacaggatattcttgcctgtagaacagttcttcctaatggcacgttctggttcacctctcagtgtgtcctcattttaaaaatcagaccgtaacagtagctatctcatagggttgttaggaggtgtactgtattaggatgttaggccttatacaacagaagaaaacggaacagtgacgtaaacaaatttgatggcagggagtccagatagggaggttctgctcccgacagtcctcagaggctcatattgtttctctcaccattctgccattcattcccagattcctcatggtgcaaaatggccattccagctccatccagccatcacatcacaggaggaagggaagaaagacacccctccacactcttctaaagagcatagctcaaaaattgtatacacttcttccgttaattcctgtggaccagaactgattcccacagctacagttcagcttgaggggagactgtatagccaagatattcagctagaattcaggggttcgcttggtaagggaagggaagagaatggatactgtcggtctgtgctccaggagacttaaactcaatgctgaaacactttgcacaatgcctggcgtgttatgcactcaataataaacattagtgtctatcgtta

SEQ ID NO: 425321 - DNA, 1099 bp, Homo sapiens
agtggaaggccgggcagcccagctgaaggcaataagctgggctcaccgctgcagcagagttctgtgctagccgggcataggggcgagagaaggcccagaggcgacgtcagagagaagcaactgcgccccggtgaagagaagctcgcccatcaccggctgggagccagctttcagtgaagatggcagggccagaactgttgcttgactccaacatctgcctctgggtggtcctacccatcgttatcactcttcgtagacatgatccgccactacgtgtccatcctgctggagagcgacaagaagctcacccaggaacaagtatctgacaggggacgaggcacccacagtccctctcccataagcctgccaagaagattgatgtggcccgtgtaacctttgacctgtacaagctgaacccacaggacttcattggctgcctgaacatgaaggcgactttttatgatacgtactccctttcctatgatctgcactgctgtggggccaaacgcatcatgaaggaagctctccactgggcccttttcagcatgcaagccacgggccacgtgctgcttcacctcctgttacctgcagcagctcctcgatgccacagaggacgggcatccccccaagggcaaggcctcatccctcatcccgacctgtctgaagatactgcagtgaaagcccaagccctagctttccccagtgaaggactagactaggggccccacgctcaactggtagtggccacaagcctggcagctgtagagccgctaacctcccgacacctccctcaccacacaggaccctgagtgaggaggaggggctggaaacctggggtgggttggccaaaggagaacctcaggctcctggcctggcccagctccttcctgcccaaggtagcttagcccatccagactggtcctgaagtctgtccctccattggcatgaagtctgcccctcagcagtccggcctcacaggctgtactttcatggtgctctctaccttctggcccccatcccagaacattcgtgagtgaattcgcaagcatactagcatgtgatattagggagtttgcaataaattattgatgctgatgta

SEQ ID NO: 425322 - DNA, 1130 bp, Homo sapiens
agtggaaggccgggcagcccagctgaaggcaataagctgggctcaccgctgcagcagagttctgtgctagccgggcataggggcgagagaaggcccagaggcgacgtcagagagaagcaactgcgccccggtgaagagaagctcgcccatcaccggctgggagccagctttcagtgaagatggcagggccagaactgttgcttgactccaacatctgcctctgggtggtcctacccatcgttatcactcttcgtagacatgatccgccactacgtgtccatcctgctggagagcgacaagaagctcacccaggaacaagtatctgacaggggacgaggcacccacagtccctctcccataagcctgccaagaagattgatgtggcccgtgtaacctttgacctgtacaagctgaacccacaggacttcattggctgcctgaacatgaaggcgactttttatgatacgtactccctttcctatgatctgcactgctgtggggccaaacgcatcatgaagtgagcaaattggggtttcctggggacaaggtgggtacgggcaatgggagagcccctgtctgttcacatggactcagccttctcagcacctgggtctggctttggtgctgacaaagcatagcctgtatcagacaacacggagcctgatgggctctcgaagtgctgtggacaacactggcgtgtgcccaggggtgcacatgttcctcctggtggaacctggatgcattttatttttatgactactttccactctagcaactacattttttcattgaaataggaagttttcctaagtagtcttctagtcagttttttaaaaatgaacatgtgttggccaggcatagtggctcacgcctctaatcccagcactttgggaggccaaggtgggtggatcacttgaggtcaggagtttgagaccagcctggccaacatggcaaaacccaatctctacaaaaattagctggacatggcagtgcatgcctgtaatcccaactactcaggagcctgaggcaggagaatcgtttgaacccaggaggtggaggtgacagtgaggcgagattgtgtcactgcactccagcctgggcaaaacagcaagtgtcttaccaaaaaaaaa

SEQ ID NO: 425323 - DNA, 1817 bp, Homo sapiens
agtggaaggccgggcagcccagctgaaggcaataagctgggctcaccgctgcagcagagttctgtgctagccgggcataggggcgagagaaggcccagaggcgacgtcagagagaagcaactgcgccccggtgaagagaagctcgcccatcaccggctgggagccagctttcagtgaagatggcagggccagaactgttgcttgactccaacatctgcctctgggtggtcctacccatcgttatcactcttcgtagacatgatccgccactacgtgtccatcctgctggagagcgacaagaagctcacccaggaacaagtatctgacaggggacgaggcacccacagtccctctcccataagcctgccaagaagattgatgtggcccgtgtaacctttgacctgtacaagctgaacccacaggacttcattggctgcctgaacatgaaggcgactttttatgatacgtactccctttcctatgatctgcactgctgtggggccaaacgcatcatgaagtgagcaaattggggtttcctggggacaaggagctcgaggctaatggagtcaaagcagctgtggtcagtgaacaggaaaaggcagcctttgatgaggctggggggctggggagggaagattccaaacagcaaaggagcttgagcctcagtagggcctggcgatcctagtgggagaatggcctttcctggagacccccccgcacagccaggagcagctgtcgtcaaggtgggctgtgtcccagcccctccagctcagccttttcatctgttcaggctggtgctcacgagtgcacaggacgcctttcagaaggaggattctaaatcccgggggtctgtaatggcacagccacatgtctgagcccaaaacaagagaaccacatgtgtttttgccacacttcttgccagtgctgtccatatttgtgtacataattttttgtttcttttctttgagacagagtctcactcttgtcacccaggctggagtgcagtggcacgatctcagctcactgcaacctctgcctgctgggttcaagcaattcttctgcctcagcctcccaagtagctgggattacaggcacccaccaccacgcccaggtaatttttatatttttcatagagatggggtttcgccatattggccaggctggtctcaaactcctgacctcaggtgatccacctgcctcagcctccgaaagtgctgggattacaggcgtgagacaccacacccggctcttgtgcacgtaattctattttatttgagatggagtcttgctctgttgcccaggctggagtgcagtggcatgatctcggctcactgcaacctccgcctctcaggctcaagagattcttgtgcctcagccttccaggtagctgggactgtgcaccaccatgctgggctaatgtttgtatttttagtagagttggggtttcacttagccaggctggtctcgaacttctggcctcaaaagatctgcccgcctcggcttctcaaagtgccttggattcccaaagtgctgggattacaggtgtgaaccatcatgcctggcctgtgcacatcatttcaataactgatattttgaaaacattgtttattgacataatttatgtacaataaaatgtattatttacaagtatgtctttcaataagttttggcaaatttatacagttatgtaaccaccatttctggcaaaccagaaagctgccatctgtccctttatagtcatgtaaatagacttttctaaaatgtcatgtaaatagaatgatatatcttaaaaatttttatttctatttttgtaaatt

SEQ ID NO: 425324 - DNA, 1001 bp, Homo sapiens
tcggagaatgttcttttggccactgtgaagcctcaggaaggggctcggattgctcaaggacccatgggagagaggaggctttgactgggctgcctgcctgtgaggtctctggactagaggtccaacgcagtccagctgacaaggatggaatacgccatgaagtcccttagccttctctaccccaagtccctctccaggcatgtgtcagtgcgtacctctgtggtgacccagcagctgctgtcggagcccagccccaaggcccccagggcccggccctgccgcgtaagcacggcggatcgaagcgtgaggaagggcatcatggcttacagtcttgaggacctcctcctcaaggtccgggacactctgatgctggcagacaagcccttcttcctggtgctggaggaagatggcacaactgtagagacagaagagtacttccaagccctggcaggggatacagtgttcatggtcctccagaaggggcagaaatggcagcccccatcagaacaggggacaaggcacccactgtccctctcccataagcctgccaagaagattgatgtggcccgtgtaacgtttgatctgtacaagctgaacccacaggacttcattggctgcctgaacgtgaaggcgactttttatgatacatactccctttcctatgatctgcactgctgtggggccaagcgcatcatgaaggaagctttccgctgggccctcttcagcatgcaggccacaggccacgtactgcttggcacctcctgttacctgcagcagctcctcgatgctacggaggaagggcagccccccaagggcaaggcctcatcccttatcccgacctgtctgaagatactgcagtgaaagcccaagtccttggaagctttccccagtgaaggactgactgggggcctcacgcttaactggtagtgcccacaagcctggcagctgtagagccgcgaacctccccacacctccctcaccgcgcaggaccctgagtgagg

SEQ ID NO: 425325 - DNA, 1177 bp, Homo sapiens
agtggaaggccgggcagcccagctgaaggcaataagctgggctcaccgctgcagcagagttctgtgctagccgggcataggggcgagagaaggcccagaggcgacgtcagagagaagcaactgcgccccggtgaagagaagctcgcccatcaccggctgggagccagctttcagtgaagatggcagggccagaactgttgcttgactccaacatctagccacaggagtaggaccaagccagacagagaacacacaaacagaagacaaagaaaccagccgacgaagcaaagaccagagccgaggcaaaagtgaacaaggagagaagatgcttcagctccaagatacaggcgaagaagacgaagatcaagttgcattgcaccgcccacgcccaagcgccaaactcaagcgcgtcagcatccttccaaaaagtcgaagaagcatgataaaagcgaaaccggaaaagaattggcatgaaaaaccccgaaatttgcaccagaacggcgacccctcccaaacaaaatcggagaaagagcgaccgaataaccctcgtgagaacccggacggattgaggggagagaccgagcgagtgtagaaacccgactgagggaatatggcacaagggtggacaaaaacgagaccgattggatccgggccctccgactttgaagttaccatgaataagtctggaaattttttcggggctggagggaggggacaaaaattgggatctaagtgggggcctttcccccaaataattccgtgaaattaatatcggaaaatagaggctcatacatagcagcttatgcattcctcacttgggccaagatcataataggtttaaaaataatggcattgggaatcggttttatgtaaaacacctcctatgaggaaagattgaaaacaacaccactctgcggaatttctctcccaaacaaatggaaagtggttatagatatctcgctagaacaagaaatttcccaaataagttcgccaagtttcgcctccatcgcgcccctagaagactctgagtagactgaaaacatctccgtgaatggtcctaaatatattggctattgtcggtcgagatactcttataagtgggcgttgacagagtaagtagattgcgcagcggagcccaattcagtctgctcgggagaaagtgcattgagtaaccgac

SEQ ID NO: 425326 - DNA, 847 bp, Homo sapiens
tcggagaatgttcttttggccactgtgaagcctcaggaaggggctcggattgctcaaggacccatgggagagaggaggctttgactgggctgcctgcctgtgaggtctctggactagaggtccaacgcagtccagctgacaaggatggaatacgccatgaagtcccttagccttctctaccccaagtccctctccaggtccgggacactctgatgctggcagacaagcccttcttcctggtgctggaggaagatggcacaactgtagagacagaagagtacttccaagccctggcaggggatacagtgttcatggtcctccagaaggggcagaaatggcagcccccatcagaacaggggacaaggcacccactgtccctctcccataagcctgccaagaagattgatgtggcccgtgtaacgtttgatctgtacaagctgaacccacaggacttcattggctgcctgaacgtgaaggcgactttttatgatacatactccctttcctatgatctgcactgctgtggggccaagcgcatcatgaaggaagctttccgctgggccctcttcagcatgcaggccacaggccacgtactgcttggcacctcctgttacctgcagcagctcctcgatgctacggaggaagggcagccccccaagggcaaggcctcatcccttatcccgacctgtctgaagatactgcagtgaaagcccaagtccttggaagctttccccagtgaaggactgactgggggcctcacgcttaactggtagtgcccacaagcctggcagctgtagagccgcgaacctccccacacctccctcaccgcgcaggaccctgagtgagg

SEQ ID NO: 425327 - DNA, 664 bp, Homo sapiens
ggcagtatttccaggaggctgtgagggggaggtccaacgcagtccagctgacaaggatggaatacgccatgaagtcccttagccttctctaccccaagtccctctccaggtgaggaaagtcatgggcagaatggaaagagagccacctatgagctgtaagccagaacttctcaaactttaatgggtatacaggtcacaggggaccttgttcaagtgcagattctgattcaggaggtctggagtgggacccgagattttgcactgccaagaagtccctgggtgatattaatgctgctgcttacaccaccaccacaccatgcataaaaaggagtagacactatgcttggtgcttttactcctgatctcatgtaagcctcacaacaactttgggaagtgggggttattataccaaattaataggtgagagaactgaggcacatagtgggtgctctcaatcacccagcaaatccatgagggagccaagattctaaattgggactgcctgactgtaaaatccaggtcctttcctttcctttggttctaaattgagtgcttcagttaaaaaaataccttacattgacttcaggcttcccccacttcatccaactttacaggtgaggagagtgaggccaagacaggtggtaaatggggaatgtggggtggg

SEQ ID NO: 425328 - DNA, 1129 bp, Homo sapiens
agtggaaggccgggcagcccagctgaaggcaataagctgggctcaccgctgcagcagagttctgtgctagccgggcataggggcgagagaaggcccagaggcgacgtcagagagaagcaactgcgccccggtgaagagaagctcgcccatcaccggctgggagccagctttcagtgaagatggcagggccagaactgttgcttgactccaacatctgcctctgggtggtcctacccatcgttatcactcttcgtagacatgatccgccactacgtgtccatcctgctggagagcgacaagaagctcacccaggaacaagtatctgacaggggacgaggcacccacagtccctctcccataagcctgccaagaagattgatgtggcccgtgtaacctttgacctgtacaagctgaacccacaggacttcattggctgcctgaacatgaaggcgactttttatgatacgtactccctttcctatgatctgcactgctgtggggccaaacgcatcatgaagtgagcaaattggggtttcctggggacaagggaagctctccactgggcccttttcagcatgcaagccacgggccacgtgctgcttcacctcctgttacctgcagcagctcctcgatgccacagaggacgggcatccccccaagggcaaggcctcatccctcatcccgacctgtctgaagatactgcagtgaaagcccaagccctagctttccccagtgaaggactagactaggggccccacgctcaactggtagtggccacaagcctggcagctgtagagccgctaacctcccgacacctccctcaccacacaggaccctgagtgaggaggaggggctggaaacctggggtgggttggccaaaggagaacctcaggctcctggcctggcccagctccttcctgcccaaggtagcttagcccatccagactggtcctgaagtctgtccctccattggcatgaagtctgcccctcagcagtccggcctcacaggctgtactttcatggtgctctctaccttctggcccccatcccagaacattcgtgagtgaattcgcaagcatactagcatgtgatattagggagtttgcaataaattattgatgctgatgta

SEQ ID NO: 425329 - DNA, 980 bp, Homo sapiens
agtggaaggccgggcagcccagctgaaggcaataagctgggctcaccgctgcagcagagttctgtgctagccgggcataggggcgagagaaggcccagaggcgacgtcagagagaagcaactgcgccccggtgaagagaagctcgcccatcaccggctgggagccagctttcagtgaagatggcagggccagaactgttgcttgactccaacatctgcctctgggtggtcctacccatcgttatcactcttcgtagacatgatccgccactacgtgtccatcctgctggagagcgacaagaagctcacccaggaacaagtatctgacaggggacgaggcacccacagtccctctcccataagcctgccaagaagattgatgtggcccgtgtaacctttgacctgtacaagctgaacccacaggacttcattggctgcctgaacatgaaggcgactttttatgatacgtactccctttcctatgatctgcactgctgtggggccaaacgcatcatgaaggaagctctccactgggcccttttcagcatgcaagccacgggccacgtgctgcttcacctcctgttacctgcagcagctcctcgatgccacagaggacgggcatccccccaagggcaaggcctcatccctcatcccgacctgtctgaagatactgcagtgaaagcccaagccctagctttccccagtgaaggactagactaggggccccacgctcaactggtagtggccacaagcctggcccagctccttcctgcccaaggtagcttagcccatccagactggtcctgaagtctgtccctccattggcatgaagtctgcccctcagcagtccggcctcacaggctgtactttcatggtgctctctaccttctggcccccatcccagaacattcgtgagtgaattcgcaagcatactagcatgtgatattagggagtttgcaataaattattgatgctgatgta

SEQ ID NO: 425330 - DNA, 917 bp, Homo sapiens
cagtgtgaccagagccaggggatgagaaacatggagtccaacgcagtccagctgacaaggatggaatacgccatgaagtcccttagccttctctaccccaagtccctctccaggcatgtgtcagtgcgtacctctgtggtgacccagcagctgctgtcggagcccagccccaaggcccccagggcccggccctgccgcgtaagcacggcggatcgaagcgtgaggaagggcatcatggcttacagtcttgaggacctcctcctcaaggtccgggacactctgatgctggcagacaagcccttcttcctggtgctggaggaagatggcacaactgtagagacagaagagtacttccaagccctggcaggggatacagtgttcatggtcctccagaaggggcagaaatggcagcccccatcagaacaggggacaaggcacccactgtccctctcccataagcctgccaagaagattgatgtggcccgtgtaacgtttgatctgtacaagctgaacccacaggacttcattggctgcctgaacgtgaaggcgactttttatgatacatactccctttcctatgatctgcactgctgtggggccaagcgcatcatgaaggaagctttccgctgggccctcttcagcatgcaggccacaggccacgtactgcttggcacctcctgttacctgcagcagctcctcgatgctacggaggaagggcagccccccaagggcaaggcctcatcccttatcccgacctgtctgaagatactgcagtgaaagcccaagtccttggaagctttccccagtgaaggactgactgggggcctcacgcttaactggtagtgcccacaagcctggcagctgtagagccgcgaacctccccacacctccctcaccgcgcaggaccctgagtgagg

SEQ ID NO: 425331 - DNA, 607 bp, Homo sapiens
tttagggggagaagttaaggtataaactttgtcaatgaagtcctattaaaaacaacaaaaaagtgaagcttaggatgcattttataaactctgaccagaacacctgtgtttctctgtttctaggtttatgaactgacgttacatcatacacagcaccaagaccacaatgttgtgaccggagccctggagctgttgcagcagctcttcagaacgcctccacccgagcttctgcaaaccctgaccgcagtcgggggcattgggcagctcaccgctgctaaggaggagtctggtggccgaagccgtagtgggagtattgtggaacttataggcaagttattagcaaggtctactcttacaattaactttgcagtaatactagttacactctattgattatgggcctgccctgtgctaagcagtctgcattccatcttccttgccaaaacttataatacaaatttcatctttattttataaataggggagttgggctgggtgtggtggctcacgcctgtaatttcagcactttggaaggatcgcttcagcccaggagtttgagacaacctggccaagtgagaccctgtctctacaaaagaaaaaaaaaaaa

SEQ ID NO: 425332 - DNA, 279 bp, Homo sapiens
ggtggtgatctagaggatcctcagaggacaaggaggaggaagtgatccaaacacacagaatcctaagtatatcactgcagcctgtgagatggtggcagaaatggtggagtctctgcagtcggtgttggccttgggtcataaaaggaatagcggcaggaatggtctaggagggcgtagtgctggctgcggaagagggcctcaaagggatacggctgtggctactccggcatccacctcaagaccggcctctgactgtcattcccctcatccagtctctcc

SEQ ID NO: 425333 - DNA, 13177 bp, Homo sapiens
ctgtgtcttcaaactcttctgttatagctggaaaatcctttttaagtgaaatctgcccaaattataagacagatgaaggtagagttgtgttggatataggattagggtgaaagtagtgggggtgtcctggagcctctcttctggtggcagcctagctcttgtgcctttgaggaaattaccctggggacggctctgtggaacatatttgcaaaccactgatttggaagatagagatggcttttgttaagatctgaattcacctttttggcattttatttgatttctcaaggtaaagaacttattttgtaataaagtttcctattatttagtagataggccaagttgctgtgttaattccatgtagattttgggtttcctttgctcattttttcactcttaatctcacatcattgtaagtttatggaagttatcatacttctgactttttctttgaagagcagaaattagaaattcccaataattattttgatagtgtcatttaatgacactcacatgtgatgtagccacaaagatttaatgagttcagttttaaatcatattaagactgttggtttcatttgttctcattaatgtaattctgaagatgaacaataaaatgtatttttagaactttcaaatgaaatattatttcatccttccagatcatataatgcttaagttctgattgttaatcataaagtctagaaaattaaaagataataaaatgaaagtgacttttaggtattagagttttattataaattctggtgtgtcattggagctatgacatgaatatttcaaaggccaatagcattggatctttacagttataacttaccatttttaagtttaagtagtaatatagattatttaataatcaaaatcaataaatattaattattaaaatgttttgtggtatagtttgagaatcattgcttttaactttttccatataggtttattgactttaatagcattctaaacataacatctctacattctttgtgtttaatactgtggaggtataaaaatacttatatatgatgataaactatattagagtaaattaaatattcttatgagtttcattttagagtgcatttacttaattttgaagtccttatttttagcaaactaaaaggaatgttggtacattatttactaggcaaagtgctcttaggagaagaagaagccttggaggatgactctgaatcgagatcggatgtcagcagctctgccttaacagcctcagtgaaggatgagatcagtggagagctggctgcttcttcaggggtttccactccagggtcagcaggtcatgacatcatcacagaacagccacggtcacagcacacactgcaggcggactcagtggatctggccagctgtgacttgacaagctctgccactgatggggatgaggaggatatcttgagccacagctccagccaggtcagcgccgtcccatctgaccctgccatggacctgaatgatgggacccaggcctcgtcgcccatcagcgacagctcccagaccaccaccgaagggcctgattcagctgttaccccttcagacagttctgaaattgtgttagacggtaccgacaaccagtatttgggcctgcagattggacagccccaggatgaagatgaggaagccacaggtattcttcctgatgaagcctcggaggccttcaggaactcttccatggcccttcaacaggcacatttattgaaaaacatgagtcactgcaggcagccttctgacagcagtgttgataaatttgtgttgagagatgaagctactgaaccgggtgatcaagaaaacaagccttgccgcatcaaaggtgacattggacagtccactgatgatgactctgcacctcttgtccattgtgtccgccttttatctgcttcgtttttgctaacagggggaaaaaatgtgctggttccggacagggatgtgagggtcagcgtgaaggccctggccctcagctgtgtgggagcagctgtggccctccacccggaatctttcttcagcaaactctataaagttcctcttgacaccacggaataccctgaggaacagtatgtctcagacatcttgaactacatcgatcatggagacccacaggttcgaggagccactgccattctctgtgggaccctcatctgctccatcctcagcaggtcccgcttccacgtgggagattggatgggcaccattagaaccctcacaggaaatacattttctttggcggattgcattcctttgctgcggaaaacactgaaggatgagtcttctgttacttgcaagttagcttgtacagctgtgaggaactgtgtcatgagtctctgcagcagcagctacagtgagttaggactgcagctgatcatcgatgtgctgactctgaggaacagttcctattggctggtgaggacagagcttctggaaacccttgcagagattgacttcaggctggtgagctttttggaggcaaaagcagaaaacttacacagaggggctcatcattatacagggcttttaaaactgcaagaacgagtgctcaataatgttgtcatccatttgcttggagatgaagaccccagggtgcgacatgttgccgcagcatcactaattaggcttgtcccaaagctgttttataaatgtgaccaaggacaagctgatccagtagtggccgtggcaagagatcaaagcagtgtttacctgaaacttctcatgcatgagacgcagcctccatctcatttctccgtcagcacaataaccagaatatatagaggctataacctactaccaagcataacagacgtcactatggaaaataacctttcaagagttattgcagcagtttctcatgaactaatcacatcaaccaccagagcactcacatttggatgctgtgaagctttgtgtcttctttccactgccttcccagtttgcatttggagtttaggttggcactgtggagtgcctccactgagtgcctcagatgagtctaggaagagctgtaccgttgggatggccacaatgattctgaccctgctctcgtcagcttggttcccattggatctctcagcccatcaagatgctttgattttggccggaaacttgcttgcagccagtgctcccaaatctctgagaagttcatgggcctctgaagaagaagccaacccagcagccaccaagcaagaggaggtctggccagccctgggggaccgggccctggtgcccatggtggagcagctcttctctcacctgctgaaggtgattaacatttgtgcccacgtcctggatgacgtggctcctggacccgcaataaaggcagccttgccttctctaacaaaccccccttctctaagtcccatccgacgaaaggggaaggagaaagaaccaggagaacaagcatctgtaccgttgagtcccaagaaaggcagtgaggccagtgcagcttctagacaatctgatacctcaggtcctgttacaacaagtaaatcctcatcactggggagtttctatcatcttccttcatacctcaaactgcatgatgtcctgaaagctacacacgctaactacaaggtcacgctggatcttcagaacagcacggaaaagtttggagggtttctccgctcagccttggatgttctttctcagatactagagctggccacactgcaggacattgggaagtgtgttgaagagatcctaggatacctgaaatcctgctttagtcgagaaccaatgatggcaactgtttgtgttcaacaattgttgaagactctctttggcacaaacttggcctcccagtttgatggcttatcttccaaccccagcaagtcacaaggccgagcacagcgccttggctcctccagtgtgaggccaggcttgtaccactactgcttcatggccccgtacacccacttcacccaggccctcgctgacgccagcctgaggaacatggtgcaggcggagcaggagaacgacacctcgggatggtttgatgtcctccagaaagtgtctacccagttgaagacaaacctcacgagtgtcacaaagaaccgtgcagataagaatgctattcataatcacattcgtttgtttgaacctcttgttataaaagctttaaaacagtacacgactacaacatgtgtgcagttacagaagcaggttttagatttgctggcgcagctggttcagttacgggttaattactgtcttctggattcagatcaggtgtttattggctttgtattgaaacagtttgaatacattgaagtgggccagttcagggaatcagaggcaatcattccaaacatctttttcttcttggtattactatcttatgaacgctatcattcaaaacagatcattggaattcctaaaatcattcagctctgtgatggcatcatggccagtggaaggaaggctgtgacacatgccataccggctctgcagcccatagtccacgacctctttgtattaagaggaacaaataaagctgatgcaggaaaagagcttgaaacccaaaaagaggtggtggtgtcaatgttactgagactcatccagtaccatcaggtgttggagatgttcattcttgtcctgcagcagtgccacaaggagaatgaagacaagtggaagcgactgtctcgacagatagctgacatcatcctcccaatgttagccaaacagcagatgcacattgactctcatgaagcccttggagtgttaaatacattatttgagattttggccccttcctccctccgtccggtagacatgcttttacggagtatgttcgtcactccaaacacaatggcgtccgtgagcactgttcaactgtggatatcgggaattctggccattttgagggttctgatttcccagtcaactgaagatattgttctttctcgtattcaggagctctccttctctccgtatttaatctcctgtacagtaattaataggttaagagatggggacagtacttcaacgctagaagaacacagtgaagggaaacaaataaagaatttgccagaagaaacattttcaaggtttctattacaactggttggtattcttttagaagacattgttacaaaacagctgaaggtggaaatgagtgagcagcaacatactttctattgccaggaactaggcacactgctaatgtgtctgatccacatcttcaagtctggaatgttccggagaatcacagcagctgccactaggctgttccgcagtgatggctgtggcggcagtttctacaccctggacagcttgaacttgcgggctcgttccatgatcaccacccacccggccctggtgctgctctggtgtcagatactgctgcttgtcaaccacaccgactaccgctggtgggcagaagtgcagcagaccccgaaaagacacagtctgtccagcacaaagttacttagtccccagatgtctggagaagaggaggattctgacttggcagccaaacttggaatgtgcaatagagaaatagtacgaagaggggctctcattctcttctgtgattatgtctgtcagaacctccatgactccgagcacttaacgtggctcattgtaaatcacattcaagatctgatcagcctttcccacgagcctccagtacaggacttcatcagtgccgttcatcggaactctgctgccagcggcctgttcatccaggcaattcagtctcgttgtgaaaacctttcaactccaaccatgctgaagaaaactcttcagtgcttggaggggatccatctcagccagtcgggagctgtgctcacgctgtatgtggacaggcttctgtgcacccctttccgtgtgctggctcgcatggtcgacatccttgcttgtcgccgggtagaaatgcttctggctgcaaatttacagagcagcatggcccagttgccaatggaagaactcaacagaatccaggaataccttcagagcagcgggctcgctcagagacaccaaaggctctattccctgctggacaggtttcgtctctccaccatgcaagactcacttagtccctctcctccagtctcttcccacccgctggacggggatgggcacgtgtcactggaaacagtgagtccggacaaagactggtacgttcatcttgtcaaatcccagtgttggaccaggtcagattctgcactgctggaaggtgcagagctggtgaatcggattcctgctgaagatatgaatgccttcatgatgaactcggagttcaacctaagcctgctagctccatgcttaagcctagggatgagtgaaatttctggtggccagaagagtgccctttttgaagcagcccgtgaggtgactctggcccgtgtgagcggcaccgtgcagcagctccctgctgtccatcatgtcttccagcccgagctgcctgcagagccggcggcctactggagcaagttgaatgatctgtttggggatgctgcactgtatcagtccctgcccactctggcccgggccctggcacagtacctggtggtggtctccaaactgcccagtcatttgcaccttcctcctgagaaagagaaggacattgtgaaattcgtggtggcaacccttgaggccctgtcctggcatttgatccatgagcagatcccgctgagtctggatctccaggcagggctggactgctgctgcctggccctgcagctgcctggcctctggagcgtggtctcctccacagagtttgtgacccacgcctgctccctcatctactgtgtgcacttcatcctggaggccgttgcagtgcagcctggagagcagcttcttagtccagaaagaaggacaaataccccaaaagccatcagcgaggaggaggaggaagtagatccaaacacacagaatcctaagtatatcactgcagcctgtgagatggtggcagaaatggtggagtctctgcagtcggtgttggccttgggtcataaaaggaatagcggcgtgccggcgtttctcacgccattgctcaggaacatcatcatcagcctggcccgcctgccccttgtcaacagctacacacgtgtgcccccactggtgtggaagcttggatggtcacccaaaccgggaggggattttggcacagcattccctgagatccccgtggagttcctccaggaaaaggaagtctttaaggagttcatctaccgcatcaacacactaggctggaccagtcgtactcagtttgaagaaacttgggccaccctccttggtgtcctggtgacgcagcccctcgtgatggagcaggaggagagcccaccagaagaagacacagagaggacccagatcaacgtcctggccgtgcaggccatcacctcactggtgctcagtgcaatgactgtgcctgtggccggcaacccagctgtaagctgcttggagcagcagccccggaacaagcctctgaaagctctcgacaccaggtttgggaggaagctgagcattatcagagggattgtggagcaagagattcaagcaatggtttcaaagagagagaatattgccacccatcatttatatcaggcatgggatcctgtcccttctctgtctccggctactacaggtgccctcatcagccacgagaagctgctgctacagatcaaccccgagcgggagctggggagcatgagctacaaactcggccaggtgtccatacactccgtgtggctggggaacagcatcacacccctgagggaggaggaatgggacgaggaagaggaggaggaggccgacgcccctgcaccttcgtcaccacccacgtctccagtcaactccaggaaacaccgggctggagttgacatccactcctgttcgcagtttttgcttgagttgtacagccgctggatcctgccgtccagctcagccaggaggaccccggccatcctgatcagtgaggtggtcagatcccttctagtggtctcagacttgttcaccgagcgcaaccagtttgagctgatgtatgtgacgctgacagaactgcgaagggtgcacccttcagaagacgagatcctcgctcagtacctggtgcctgccacctgcaaggcagctgccgtccttgggatggacaaggccgtggcggagcctgtcagccgcctgctggagagcacgctcaggagcagccacctgcccagcagggttggagccctgcacggcgtcctctatgtgctggagtgcgacctgctggacgacactgccaagcagctcatcccggtcatcagcgactatctcctctccaacctgaaagggatcgcccactgcgtgaacattcacagccagcagcacgtactggtcatgtgtgccactgcgttttacctcattgagaactatcctctggacgtagggccggaattttcagcatcaataatacagatgtgtggggtgatgctgtctggaagtgaggagtccaccccctccatcatttaccactgtgccctcagaggcctggagcgcctcctgctctctgagcagctctcccgcctggatgcagaatcgctggtcaagctgagtgtggacagagtgaacgtgcacagcccgcaccgggccatggcggctctgggcctgatgctcacctgcatgtacacaggaaaggagaaagtcagtccgggtagaacttcagaccctaatcctgcagcccccgacagcgagtcagtgattgttgctatggagcgggtatctgttctttttgataggatcaggaaaggctttccttgtgaagccagagtggtggccaggatcctgccccagtttctagacgacttcttcccaccccaggacatcatgaacaaagtcatcggagagtttctgtccaaccagcagccatacccccagttcatggccaccgtggtgtataaggtgtttcagactctgcacagcaccgggcagtcgtccatggtccgggactgggtcatgctgtccctctccaacttcacgcagagggccccggtcgccatggccacgtggagcctctcctgcttctttgtcagcgcgtccaccagcccgtgggtcgcggcgatcctcccacatgtcatcagcaggatgggcaagctggagcaggtggacgtgaaccttttctgcctggtcgccacagacttctacagacaccagatagaggaggagctcgaccgcagggccttccagtctgtgcttgaggtggttgcagccccaggaagcccatatcaccggctgctgacttgtttacgaaatgtccacaaggtcaccacctgctgagcgccatggtgggagagactgtgaggcggcagctggggccggagcctttggaagtctgcgcccttgtgccctgcctccaccgagccagcttggtccctatgggcttccgcacatgccgcgggcggccaggcaacgtgcgtgtctctgccatgtggcagaagtgctctttgtggcagtggccaggcagggagtgtctgcagtcctggtggggctgagcctgaggccttccagaaagcaggagcagctgtgctgcaccccatgtgggtgaccaggtcctttctcctgatagtcacctgctggttgttgccaggttgcagctgctcttgcatctgggccagaagtcctccctcctgcaggctggctgttggcccctctgctgtcctgcagtagaaggtgccgtgagcaggctttgggaacactggcctgggtctccctggtggggtgtgcatgccacgccccgtgtctggatgcacagatgccatggcctgtgctgggccagtggctgggggtgctagacacccggcaccattctcccttctctcttttcttctcaggatttaaaatttaattatatcagtaaagagattaattttaacgtaactctttctatgcccgtgtaaagtatgtgaatcgcaaggcctgtgctgcatgcgacagcgtccggggtggtggacagggcccccggccacgctccctctcctgtagccactggcatagccctcctgagcacccgctgacatttccgttgtacatgttcctgtttatgcattcacaaggtgactgggatgtagagaggcgttagtgggcaggtggccacagcaggactgaggacaggcccccattatcctaggggtgcgctcacctgcagcccctcctcctcgggcacagacgactgtcgttctccacccaccagtcagggacagcagcctccctgtcactcagctgagaaggccagccctccctggctgtgagcagcctccactgtgtccagagacatgggcctcccactcctgttccttgctagccctggggtggcgtctgcctaggagctggctggcaggtgttgggacctgctgctccatggatgcatgccctaagagtgtcactgagctgtgttttgtctgagcctctctcggtcaacagcaaagcttggtgtcttggcactgttagtgacagagcccagcatcccttctgcccccgttccagctgacatcttgcacggtgaccccttttagtcaggagagtgcagatctgtgctcatcggagactgccccacggccctgtcagagccgccactcctatccccaggccaggtccctggaccagcctcctgtttgcaggcccagaggagccaagtcattaaaatggaagtggattctggatggccgggctgctgctgatgtaggagctggatttgggagctctgcttgccgactggctgtgagacgaggcaggggctctgcttcctcagccctagaggcgagccaggcaaggttggcgactgtcatgtggcttggtttggtcatgcccgtcgatgttttgggtattgaatgtggtaagtggaggaaatgttggaactctgtgcaggtgctgccttgagacccccaagcttccacctgtccctctcctatgtggcagctggggagcagctgagatgtggacttgtatgctgcccacatacgtgagggggagctgaaagggagcccctcctctgagcagcctctgccaggcctgtatgaggcttttcccaccagctcccaacagaggcctcccccagccaggaccacctcgtcctcgtggcggggcagcaggagcggtagaaaggggtccgatgtttgaggaggcccttaagggaagctactgaattataacacgtaagaaaatcaccattcttccgtattggttgggggctcctgtttctcatcctagctttttcctggaaagcccgctagaaggtttgggaacgaggggaaagttctcagaactgttggctgctccccacccgcctcccgcctcccccgcaggttatgtcagcagctctgagacagcagtatcacaggccagatgttgttcctggctagatgtttacatttgtaagaaataacactgtgaatgtaaaacagagccattcccttggaatgcatatcgctgggctcaacatagagtttgtcttcctcttgtttacgacgtgatctaaaccagtccttagcaaggggctcagaacaccccgctctggcagtaggtgtcccccacccccaaagacctgcctgtgtgctccggagatgaatatgagctcattagtaaaaatgacttcacccacgcatatacataaagtatccatgcatgtgcatatagacacatctataattttacacacacacctctcaagacggagatgcatggcctctaagagtgcccgtgtcggttcttcctggaagttgactttccttagacccgccaggtcaagttagccgcgtgacggacatccaggcgtgggacgtggtcagggcagggctcattcattgcccactaggatcccactggcgaagatggtctccatatcagctctctgcagaagggaggaagactttatcatgttcctaaaaatctgtggcaagcacccatcgtattatccaaattttgttgcaaatgtgattaatttggttgtcaagttttgggggtgggctgtggggagattgcttttgttttcctgctggtaatatcgggaaagattttaatgaaaccagggtagaattgtttggcaatgcactgaagcgtgtttctttcccaaaatgtgcctcccttccgctgcgggcccagctgagtctatgtaggtgatgtttccagctgccaagtgctctttgttactgtccaccctcatttctgccagcgcatgtgtcctttcaaggggaaaatgtgaagctgaaccccctccagacacccagaatgtagcatctgagaaggccctgtgccctaaaggacacccctcgcccccatcttcatggagggggtcatttcagagccctcggagccaatgaacagctcctcctcttggagctgagatgagccccacgtggagctcgggacggatagtagacagcaataactcggtgtgtggccgcctggcaggtggaacttcctcccgttgcggggtggagtgaggttagttctgtgtgtctggtgggtggagtcaggcttctcttgctacctgtgagcatccttcccagcagacatcctcatcgggctttgtccctcccccgcttcctccctctgtggggaggacccgggaccacagctgctggccagggtagacttggagctgtcctccagaggggtcacgtgtaggagtgagaagaaggaagatcttgagagctgctgagggaccttggagagctcaggatggctcagacgaggacactcgcttgccgggcctgggcctcctgggaaggagggagctgctcagaatgccgcatgacaactgaaggcaacctggaaggttcaggggccgctcttcccccatgtgcctgtcacgctctggtgcagtcaaaggaacgccttcccctcagttgtttctaagagcagagtctcccgctgcaatctgggtggtaactgccagccttggaggatcgtggccaacgtggacctgcctacggagggtgggctctgacccaagtggggcctccttgtccaggtctcactgctttgcaccgtggtcagagggactgtcagctgagcttgagctcccctggagccagcagggctgtgatgggcgagtcccggagccccacccagacctgaatgcttctgagagcaaagggaaggactgacgagagatgtatatttaattttttaactgctgcaaacattgtacatccaaattaaaggaaaaaaatggaaaccatca

SEQ ID NO: 425334 - DNA, 11024 bp, Homo sapiens
tgtatttactgagataaagtattcttaatcaatgttcttgagaggtgtgggaaaaatgcaacatcctggttgcagttaaacccagaacattgtgtgttgaagagtgacggttctcaaaccgtcaagacgcgggtactgagtgggactaacctgctgtcctcttgccttggaccttgtgttccagaactgtgtcatgagtctctgcagcagcagctacagtgagttaggactgcagctgatcatcgatgtgctgactctgaggaacagttcctattggctggtgaggacagagcttctggaaacccttgcagagattgacttcaggctggtgagctttttggaggcaaaagcagaaaacttacacagaggggctcatcattatacagggcttttaaaactgcaagaacgagtgctcaataatgttgtcatccatttgcttggagatgaagaccccagggtgcgacatgttgccgcagcatcactaattaggcttgtcccaaagctgttttataaatgtgaccaaggacaagctgatccagtagtggccgtggcaagagatcaaagcagtgtttacctgaaacttctcatgcatgagacgcagcctccatctcatttctccgtcagcacaataaccagaatatatagaggctataacctactaccaagcataacagacgtcactatggaaaataacctttcaagagttattgcagcagtttctcatgaactaatcacatcaaccaccagagcactcacatttggatgctgtgaagctttgtgtcttctttccactgccttcccagtttgcatttggagtttaggttggcactgtggagtgcctccactgagtgcctcagatgagtctaggaagagctgtaccgttgggatggccacaatgattctgaccctgctctcgtcagcttggttcccattggatctctcagcccatcaagatgctttgattttggccggaaacttgcttgcagccagtgctcccaaatctctgagaagttcatgggcctctgaagaagaagccaacccagcagccaccaagcaagaggaggtctggccagccctgggggaccgggccctggtgcccatggtggagcagctcttctctcacctgctgaaggtgattaacatttgtgcccacgtcctggatgacgtggctcctggacccgcaataaaggcagccttgccttctctaacaaaccccccttctctaagtcccatccgacgaaaggggaaggagaaagaaccaggagaacaagcatctgtaccgttgagtcccaagaaaggcagtgaggccagtgcagcttctagacaatctgatacctcaggtcctgttacaacaagtaaatcctcatcactggggagtttctatcatcttccttcatacctcaaactgcatgatgtcctgaaagctacacacgctaactacaaggtcacgctggatcttcagaacagcacggaaaagtttggagggtttctccgctcagccttggatgttctttctcagatactagagctggccacactgcaggacattgggaagtgtgttgaagagatcctaggatacctgaaatcctgctttagtcgagaaccaatgatggcaactgtttgtgttcaacaattgttgaagactctctttggcacaaacttggcctcccagtttgatggcttatcttccaaccccagcaagtcacaaggccgagcacagcgccttggctcctccagtgtgaggccaggcttgtaccactactgcttcatggccccgtacacccacttcacccaggccctcgctgacgccagcctgaggaacatggtgcaggcggagcaggagaacgacacctcgggatggtttgatgtcctccagaaagtgtctacccagttgaagacaaacctcacgagtgtcacaaagaaccgtgcagataagaatgctattcataatcacattcgtttgtttgaacctcttgttataaaagctttaaaacagtacacgactacaacatgtgtgcagttacagaagcaggttttagatttgctggcgcagctggttcagttacgggttaattactgtcttctggattcagatcaggtgtttattggctttgtattgaaacagtttgaatacattgaagtgggccagttcagggaatcagaggcaatcattccaaacatctttttcttcttggtattactatcttatgaacgctatcattcaaaacagatcattggaattcctaaaatcattcagctctgtgatggcatcatggccagtggaaggaaggctgtgacacatgccataccggctctgcagcccatagtccacgacctctttgtattaagaggaacaaataaagctgatgcaggaaaagagcttgaaacccaaaaagaggtggtggtgtcaatgttactgagactcatccagtaccatcaggtgttggagatgttcattcttgtcctgcagcagtgccacaaggagaatgaagacaagtggaagcgactgtctcgacagatagctgacatcatcctcccaatgttagccaaacagcagatgcacattgactctcatgaagcccttggagtgttaaatacattatttgagattttggccccttcctccctccgtccggtagacatgcttttacggagtatgttcgtcactccaaacacaatggcgtccgtgagcactgttcaactgtggatatcgggaattctggccattttgagggttctgatttcccagtcaactgaagatattgttctttctcgtattcaggagctctccttctctccgtatttaatctcctgtacagtaattaataggttaagagatggggacagtacttcaacgctagaagaacacagtgaagggaaacaaataaagaatttgccagaagaaacattttcaaggtttctattacaactggttggtattcttttagaagacattgttacaaaacagctgaaggtggaaatgagtgagcagcaacatactttctattgccaggaactaggcacactgctaatgtgtctgatccacatcttcaagtctggaatgttccggagaatcacagcagctgccactaggctgttccgcagtgatggctgtggcggcagtttctacaccctggacagcttgaacttgcgggctcgttccatgatcaccacccacccggccctggtgctgctctggtgtcagatactgctgcttgtcaaccacaccgactaccgctggtgggcagaagtgcagcagaccccgaaaagacacagtctgtccagcacaaagttacttagtccccagatgtctggagaagaggaggattctgacttggcagccaaacttggaatgtgcaatagagaaatagtacgaagaggggctctcattctcttctgtgattatgtctgtcagaacctccatgactccgagcacttaacgtggctcattgtaaatcacattcaagatctgatcagcctttcccacgagcctccagtacaggacttcatcagtgccgttcatcggaactctgctgccagcggcctgttcatccaggcaattcagtctcgttgtgaaaacctttcaactccaaccatgctgaagaaaactcttcagtgcttggaggggatccatctcagccagtcgggagctgtgctcacgctgtatgtggacaggcttctgtgcacccctttccgtgtgctggctcgcatggtcgacatccttgcttgtcgccgggtagaaatgcttctggctgcaaatttacagagcagcatggcccagttgccaatggaagaactcaacagaatccaggaataccttcagagcagcgggctcgctcagagacaccaaaggctctattccctgctggacaggtttcgtctctccaccatgcaagactcacttagtccctctcctccagtctcttcccacccgctggacggggatgggcacgtgtcactggaaacagtgagtccggacaaagactggtacgttcatcttgtcaaatcccagtgttggaccaggtcagattctgcactgctggaaggtgcagagctggtgaatcggattcctgctgaagatatgaatgccttcatgatgaactcggagttcaacctaagcctgctagctccatgcttaagcctagggatgagtgaaatttctggtggccagaagagtgccctttttgaagcagcccgtgaggtgactctggcccgtgtgagcggcaccgtgcagcagctccctgctgtccatcatgtcttccagcccgagctgcctgcagagccggcggcctactggagcaagttgaatgatctgtttggggatgctgcactgtatcagtccctgcccactctggcccgggccctggcacagtacctggtggtggtctccaaactgcccagtcatttgcaccttcctcctgagaaagagaaggacattgtgaaattcgtggtggcaacccttgaggccctgtcctggcatttgatccatgagcagatcccgctgagtctggatctccaggcagggctggactgctgctgcctggccctgcagctgcctggcctctggagcgtggtctcctccacagagtttgtgacccacgcctgctccctcatctactgtgtgcacttcatcctggaggccgttgcagtgcagcctggagagcagcttcttagtccagaaagaaggacaaataccccaaaagccatcagcgaggaggaggaggaagtagatccaaacacacagaatcctaagtatatcactgcagcctgtgagatggtggcagaaatggtggagtctctgcagtcggtgttggccttgggtcataaaaggaatagcggcgtgccggcgtttctcacgccattgctcaggaacatcatcatcagcctggcccgcctgccccttgtcaacagctacacacgtgtgcccccactggtgtggaagcttggatggtcacccaaaccgggaggggattttggcacagcattccctgagatccccgtggagttcctccaggaaaaggaagtctttaaggagttcatctaccgcatcaacacactaggctggaccagtcgtactcagtttgaagaaacttgggccaccctccttggtgtcctggtgacgcagcccctcgtgatggagcaggaggagagcccaccagaagaagacacagagaggacccagatcaacgtcctggccgtgcaggccatcacctcactggtgctcagtgcaatgactgtgcctgtggccggcaacccagctgtaagctgcttggagcagcagccccggaacaagcctctgaaagctctcgacaccaggtttgggaggaagctgagcattatcagagggattgtggagcaagagattcaagcaatggtttcaaagagagagaatattgccacccatcatttatatcaggcatgggatcctgtcccttctctgtctccggctactacaggtgccctcatcagccacgagaagctgctgctacagatcaaccccgagcgggagctggggagcatgagctacaaactcggccaggtgtccatacactccgtgtggctggggaacagcatcacacccctgagggaggaggaatgggacgaggaagaggaggaggaggccgacgcccctgcaccttcgtcaccacccacgtctccagtcaactccaggaaacaccgggctggagttgacatccactcctgttcgcagtttttgcttgagttgtacagccgctggatcctgccgtccagctcagccaggaggaccccggccatcctgatcagtgaggtggtcagatcccttctagtggtctcagacttgttcaccgagcgcaaccagtttgagctgatgtatgtgacgctgacagaactgcgaagggtgcacccttcagaagacgagatcctcgctcagtacctggtgcctgccacctgcaaggcagctgccgtccttgggatggacaaggccgtggcggagcctgtcagccgcctgctggagagcacgctcaggagcagccacctgcccagcagggttggagccctgcacggcgtcctctatgtgctggagtgcgacctgctggacgacactgccaagcagctcatcccggtcatcagcgactatctcctctccaacctgaaagggatcgcccactgcgtgaacattcacagccagcagcacgtactggtcatgtgtgccactgcgttttacctcattgagaactatcctctggacgtagggccggaattttcagcatcaataatacagatgtgtggggtgatgctgtctggaagtgaggagtccaccccctccatcatttaccactgtgccctcagaggcctggagcgcctcctgctctctgagcagctctcccgcctggatgcagaatcgctggtcaagctgagtgtggacagagtgaacgtgcacagcccgcaccgggccatggcggctctgggcctgatgctcacctgcatgtacacaggaaaggagaaagtcagtccgggtagaacttcagaccctaatcctgcagcccccgacagcgagtcagtgattgttgctatggagcgggtatctgttctttttgataggatcaggaaaggctttccttgtgaagccagagtggtggccaggatcctgccccagtttctagacgacttcttcccaccccaggacatcatgaacaaagtcatcggagagtttctgtccaaccagcagccatacccccagttcatggccaccgtggtgtataaggtgtttcagactctgcacagcaccgggcagtcgtccatggtccgggactgggtcatgctgtccctctccaacttcacgcagagggccccggtcgccatggccacgtggagcctctcctgcttctttgtcagcgcgtccaccagcccgtgggtcgcggcgatcctcccacatgtcatcagcaggatgggcaagctggagcaggtggacgtgaaccttttctgcctggtcgccacagacttctacagacaccagatagaggaggagctcgaccgcagggccttccagtctgtgcttgaggtggttgcagccccaggaagcccatatcaccggctgctgacttgtttacgaaatgtccacaaggtcaccacctgctgagcgccatggtgggagagactgtgaggcggcagctggggccggagcctttggaagtctgcgcccttgtgccctgcctccaccgagccagcttggtccctatgggcttccgcacatgccgcgggcggccaggcaacgtgcgtgtctctgccatgtggcagaagtgctctttgtggcagtggccaggcagggagtgtctgcagtcctggtggggctgagcctgaggccttccagaaagcaggagcagctgtgctgcaccccatgtgggtgaccaggtcctttctcctgatagtcacctgctggttgttgccaggttgcagctgctcttgcatctgggccagaagtcctccctcctgcaggctggctgttggcccctctgctgtcctgcagtagaaggtgccgtgagcaggctttgggaacactggcctgggtctccctggtggggtgtgcatgccacgccccgtgtctggatgcacagatgccatggcctgtgctgggccagtggctgggggtgctagacacccggcaccattctcccttctctcttttcttctcaggatttaaaatttaattatatcagtaaagagattaattttaacgtaactctttctatgcccgtgtaaagtatgtgaatcgcaaggcctgtgctgcatgcgacagcgtccggggtggtggacagggcccccggccacgctccctctcctgtagccactggcatagccctcctgagcacccgctgacatttccgttgtacatgttcctgtttatgcattcacaaggtgactgggatgtagagaggcgttagtgggcaggtggccacagcaggactgaggacaggcccccattatcctaggggtgcgctcacctgcagcccctcctcctcgggcacagacgactgtcgttctccacccaccagtcagggacagcagcctccctgtcactcagctgagaaggccagccctccctggctgtgagcagcctccactgtgtccagagacatgggcctcccactcctgttccttgctagccctggggtggcgtctgcctaggagctggctggcaggtgttgggacctgctgctccatggatgcatgccctaagagtgtcactgagctgtgttttgtctgagcctctctcggtcaacagcaaagcttggtgtcttggcactgttagtgacagagcccagcatcccttctgcccccgttccagctgacatcttgcacggtgaccccttttagtcaggagagtgcagatctgtgctcatcggagactgccccacggccctgtcagagccgccactcctatccccaggccaggtccctggaccagcctcctgtttgcaggcccagaggagccaagtcattaaaatggaagtggattctggatggccgggctgctgctgatgtaggagctggatttgggagctctgcttgccgactggctgtgagacgaggcaggggctctgcttcctcagccctagaggcgagccaggcaaggttggcgactgtcatgtggcttggtttggtcatgcccgtcgatgttttgggtattgaatgtggtaagtggaggaaatgttggaactctgtgcaggtgctgccttgagacccccaagcttccacctgtccctctcctatgtggcagctggggagcagctgagatgtggacttgtatgctgcccacatacgtgagggggagctgaaagggagcccctcctctgagcagcctctgccaggcctgtatgaggcttttcccaccagctcccaacagaggcctcccccagccaggaccacctcgtcctcgtggcggggcagcaggagcggtagaaaggggtccgatgtttgaggaggcccttaagggaagctactgaattataacacgtaagaaaatcaccattcttccgtattggttgggggctcctgtttctcatcctagctttttcctggaaagcccgctagaaggtttgggaacgaggggaaagttctcagaactgttggctgctccccacccgcctcccgcctcccccgcaggttatgtcagcagctctgagacagcagtatcacaggccagatgttgttcctggctagatgtttacatttgtaagaaataacactgtgaatgtaaaacagagccattcccttggaatgcatatcgctgggctcaacatagagtttgtcttcctcttgtttacgacgtgatctaaaccagtccttagcaaggggctcagaacaccccgctctggcagtaggtgtcccccacccccaaagacctgcctgtgtgctccggagatgaatatgagctcattagtaaaaatgacttcacccacgcatatacataaagtatccatgcatgtgcatatagacacatctataattttacacacacacctctcaagacggagatgcatggcctctaagagtgcccgtgtcggttcttcctggaagttgactttccttagacccgccaggtcaagttagccgcgtgacggacatccaggcgtgggacgtggtcagggcagggctcattcattgcccactaggatcccactggcgaagatggtctccatatcagctctctgcagaagggaggaagactttatcatgttcctaaaaatctgtggcaagcacccatcgtattatccaaattttgttgcaaatgtgattaatttggttgtcaagttttgggggtgggctgtggggagattgcttttgttttcctgctggtaatatcgggaaagattttaatgaaaccagggtagaattgtttggcaatgcactgaagcgtgtttctttcccaaaatgtgcctcccttccgctgcgggcccagctgagtctatgtaggtgatgtttccagctgccaagtgctctttgttactgtccaccctcatttctgccagcgcatgtgtcctttcaaggggaaaatgtgaagctgaaccccctccagacacccagaatgtagcatctgagaaggccctgtgccctaaaggacacccctcgcccccatcttcatggagggggtcatttcagagccctcggagccaatgaacagctcctcctcttggagctgagatgagccccacgtggagctcgggacggatagtagacagcaataactcggtgtgtggccgcctggcaggtggaacttcctcccgttgcggggtggagtgaggttagttctgtgtgtctggtgggtggagtcaggcttctcttgctacctgtgagcatccttcccagcagacatcctcatcgggctttgtccctcccccgcttcctccctctgtggggaggacccgggaccacagctgctggccagggtagacttggagctgtcctccagaggggtcacgtgtaggagtgagaagaaggaagatcttgagagctgctgagggaccttggagagctcaggatggctcagacgaggacactcgcttgccgggcctgggcctcctgggaaggagggagctgctcagaatgccgcatgacaactgaaggcaacctggaaggttcaggggccgctcttcccccatgtgcctgtcacgctctggtgcagtcaaaggaacgccttcccctcagttgtttctaagagcagagtctcccgctgcaatctgggtggtaactgccagccttggaggatcgtggccaacgtggacctgcctacggagggtgggctctgacccaagtggggcctccttgtccaggtctcactgctttgcaccgtggtcagagggactgtcagctgagcttgagctcccctggagccagcagggctgtgatgggcgagtcccggagccccacccagacctgaatgcttctgagagcaaagggaaggactgacgagagatgtatatttaattttttaactgctgcaaacattgtacatccaaattaaaggaaaaaaatggaaaccatca

SEQ ID NO: 425335 - DNA, 12730 bp, Homo sapiens
ttgctgtgtgaggcagaacctgcgggggcaggggcgggctggttccctggccagccattggcagagtccgcaggctagggctgtcaatcatgctggccggcgtggccccgcctccgccggcgcggccccgcctccgccggcgcacgtctgggacgcaaggcgccgtgggggctgccgggacgggtccaagatggacggccgctcaggttctgcttttacctgcggcccagagccccattcattgccccggtgctgagcggcgccgcgagtcggcccgaggcctccggggactgccgtgccgggcgggagaccgccatggcgaccctggaaaagctgatgaaggccttcgagtccctcaagtccttccagcagcagcagcagcagcagcagcagcagcagcagcagcagcagcagcagcagcagcagcagcaacagccgccaccgccgccgccgccgccgccgcctcctcagcttcctcagccgccgccgcaggcacagccgctgctgcctcagccgcagccgcccccgccgccgcccccgccgccacccggcccggctgtggctgaggagccgctgcaccgaccaaagaaagaactttcagctaccaagaaagaccgtgtgaatcattgtctgacaatatgtgaaaacatagtggcacagtctgtcagaaattctccagaatttcagaaacttctgggcatcgctatggaactttttctgctgtgcagtgatgacgcagagtcagatgtcaggatggtggctgacgaatgcctcaacaaagttatcaaagctttgatggattctaatcttccaaggttacagctcgagctctataaggaaattaaaaagaatggtgcccctcggagtttgcgtgctgccctgtggaggtttgctgagctggctcacctggttcggcctcagaaatgcaggccttacctggtgaaccttctgccgtgcctgactcgaacaagcaagagacccgaagaatcagtccaggagaccttggctgcagctgttcccaaaattatggcttcttttggcaattttgcaaatgacaatgaaattaaggttttgttaaaggccttcatagcgaacctgaagtcaagctcccccaccattcggcggacagcggctggatcagcagtgagcatctgccagcactcaagaaggacacaatatttctatagttggctactaaatgtgctcttaggcttactcgttcctgtcgaggatgaacactccactctgctgattcttggcgtgctgctcaccctgaggtatttggtgcccttgctgcagcagcaggtcaaggacacaagcctgaaaggcagcttcggagtgacaaggaaagaaatggaagtctctccttctgcagagcagcttgtccaggtttatgaactgacgttacatcatacacagcaccaagaccacaatgttgtgaccggagccctggagctgttgcagcagctcttcagaacgcctccacccgagcttctgcaaaccctgaccgcagtcgggggcattgggcagctcaccgctgctaaggaggagtctggtggccgaagccgtagtgggagtattgtggaacttatagctggagggggttcctcatgcagccctgtcctttcaagaaaacaaaaaggcaaagtgctcttaggagaagaagaagccttggaggatgactctgaatcgagatcggatgtcagcagctctgccttaacagcctcagtgaaggatgagatcagtggagagctggctgcttcttcaggggtttccactccagggtcagcaggtcatgacatcatcacagaacagccacggtcacagcacacactgcaggcggactcagtggatctggccagctgtgacttgacaagctctgccactgatggggatgaggaggatatcttgagccacagctccagccaggtcagcgccgtcccatctgaccctgccatggacctgaatgatgggacccaggcctcgtcgcccatcagcgacagctcccagaccaccaccgaagggcctgattcagctgttaccccttcagacagttctgaaattgtgttagacggtaccgacaaccagtatttgggcctgcagattggacagccccaggatgaagatgaggaagccacaggtattcttcctgatgaagcctcggaggccttcaggaactcttccatggcccttcaacaggcacatttattgaaaaacatgagtcactgcaggcagccttctgacagcagtgttgataaatttgtgttgagagatgaagctactgaaccgggtgatcaagaaaacaagccttgccgcatcaaaggtgacattggacagtccactgatgatgactctgcacctcttgtccattgtgtccgccttttatctgcttcgtttttgctaacagggggaaaaaatgtgctggttccggacagggatgtgagggtcagcgtgaaggccctggccctcagctgtgtgggagcagctgtggccctccacccggaatctttcttcagcaaactctataaagttcctcttgacaccacggaataccctgaggaacagtatgtctcagacatcttgaactacatcgatcatggagacccacaggttcgaggagccactgccattctctgtgggaccctcatctgctccatcctcagcaggtcccgcttccacgtgggagattggatgggcaccattagaaccctcacaggaaatacattttctttggcggattgcattcctttgctgcggaaaacactgaaggatgagtcttctgttacttgcaagttagcttgtacagctgtgaggaactgtgtcatgagtctctgcagcagcagctacagtgagttaggactgcagctgatcatcgatgtgctgactctgaggaacagttcctattggctggtgaggacagagcttctggaaacccttgcagagattgacttcaggctggtgagctttttggaggcaaaagcagaaaacttacacagaggggctcatcattatacagggcttttaaaactgcaagaacgagtgctcaataatgttgtcatccatttgcttggagatgaagaccccagggtgcgacatgttgccgcagcatcactaattaggcttgtcccaaagctgttttataaatgtgaccaaggacaagctgatccagtagtggccgtggcaagagatcaaagcagtgtttacctgaaacttctcatgcatgagacgcagcctccatctcatttctccgtcagcacaataaccagaatatatagaggctataacctactaccaagcataacagacgtcactatggaaaataacctttcaagagttattgcagcagtttctcatgaactaatcacatcaaccaccagagcactcacatttggatgctgtgaagctttgtgtcttctttccactgccttcccagtttgcatttggagtttaggttggcactgtggagtgcctccactgagtgcctcagatgagtctaggaagagctgtaccgttgggatggccacaatgattctgaccctgctctcgtcagcttggttcccattggatctctcagcccatcaagatgctttgattttggccggaaacttgcttgcagccagtgctcccaaatctctgagaagttcatgggcctctgaagaagaagccaacccagcagccaccaagcaagaggaggtctggccagccctgggggaccgggccctggtgcccatggtggagcagctcttctctcacctgctgaaggtgattaacatttgtgcccacgtcctggatgacgtggctcctggacccgcaataaaggcagccttgccttctctaacaaaccccccttctctaagtcccatccgacgaaaggggaaggagaaagaaccaggagaacaagcatctgtaccgttgagtcccaagaaaggcagtgaggccagtgcagcttctagacaatctgatacctcaggtcctgttacaacaagtaaatcctcatcactggggagtttctatcatcttccttcatacctcaaactgcatgatgtcctgaaagctacacacgctaactacaaggtcacgctggatcttcagaacagcacggaaaagtttggagggtttctccgctcagccttggatgttctttctcagatactagagctggccacactgcaggacattgggaagtgtgttgaagagatcctaggatacctgaaatcctgctttagtcgagaaccaatgatggcaactgtttgtgttcaacaattgttgaagactctctttggcacaaacttggcctcccagtttgatggcttatcttccaaccccagcaagtcacaaggccgagcacagcgccttggctcctccagtgtgaggccaggcttgtaccactactgcttcatggccccgtacacccacttcacccaggccctcgctgacgccagcctgaggaacatggtgcaggcggagcaggagaacgacacctcgggatggtttgatgtcctccagaaagtgtctacccagttgaagacaaacctcacgagtgtcacaaagaaccgtgcagataagaatgctattcataatcacattcgtttgtttgaacctcttgttataaaagctttaaaacagtacacgactacaacatgtgtgcagttacagaagcaggttttagatttgctggcgcagctggttcagttacgggttaattactgtcttctggattcagatcaggtgtttattggctttgtattgaaacagtttgaatacattgaagtgggccagttcagggaatcagaggcaatcattccaaacatctttttcttcttggtattactatcttatgaacgctatcattcaaaacagatcattggaattcctaaaatcattcagctctgtgatggcatcatggccagtggaaggaaggctgtgacacatgccataccggctctgcagcccatagtccacgacctctttgtattaagaggaacaaataaagctgatgcaggaaaagagcttgaaacccaaaaagaggtggtggtgtcaatgttactgagactcatccagtaccatcaggtgttggagatgttcattcttgtcctgcagcagtgccacaaggagaatgaagacaagtggaagcgactgtctcgacagatagctgacatcatcctcccaatgttagccaaacagcagatgcacattgactctcatgaagcccttggagtgttaaatacattatttgagattttggccccttcctccctccgtccggtagacatgcttttacggagtatgttcgtcactccaaacacaatggcgtccgtgagcactgttcaactgtggatatcgggaattctggccattttgagggttctgatttcccagtcaactgaagatattgttctttctcgtattcaggagctctccttctctccgtatttaatctcctgtacagtaattaataggttaagagatggggacagtacttcaacgctagaagaacacagtgaagggaaacaaataaagaatttgccagaagaaacattttcaaggtttctattacaactggttggtattcttttagaagacattgttacaaaacagctgaaggtggaaatgagtgagcagcaacatactttctattgccaggaactaggcacactgctaatgtgtctgatccacatcttcaagtctggaatgttccggagaatcacagcagctgccactaggctgttccgcagtgatggctgtggcggcagtttctacaccctggacagcttgaacttgcgggctcgttccatgatcaccacccacccggccctggtgctgctctggtgtcagatactgctgcttgtcaaccacaccgactaccgctggtgggcagaagtgcagcagaccccgaaaagacacagtctgtccagcacaaagttacttagtccccagatgtctggagaagaggaggattctgacttggcagccaaacttggaatgtgcaatagagaaatagtacgaagaggggctctcattctcttctgtgattatgtctgtcagaacctccatgactccgagcacttaacgtggctcattgtaaatcacattcaagatctgatcagcctttcccacgagcctccagtacaggacttcatcagtgccgttcatcggaactctgctgccagcggcctgttcatccaggcaattcagtctcgttgtgaaaacctttcaactccaaccatgctgaagaaaactcttcagtgcttggaggggatccatctcagccagtcgggagctgtgctcacgctgtatgtggacaggcttctgtgcacccctttccgtgtgctggctcgcatggtcgacatccttgcttgtcgccgggtagaaatgcttctggctgcaaatttacagagcagcatggcccagttgccaatggaagaactcaacagaatccaggaataccttcagagcagcgggctcgctcagagacaccaaaggctctattccctgctggacaggtttcgtctctccaccatgcaagactcacttagtccctctcctccagtctcttcccacccgctggacggggatgggcacgtgtcactggaaacagtgagtccggacaaagactggtacgttcatcttgtcaaatcccagtgttggaccaggtcagattctgcactgctggaaggtgcagagctggtgaatcggattcctgctgaagatatgaatgccttcatgatgaactcggagttcaacctaagcctgctagctccatgcttaagcctagggatgagtgaaatttctggtggccagaagagtgccctttttgaagcagcccgtgaggtgactctggcccgtgtgagcggcaccgtgcagcagctccctgctgtccatcatgtcttccagcccgagctgcctgcagagccggcggcctactggagcaagttgaatgatctgtttggggatgctgcactgtatcagtccctgcccactctggcccgggccctggcacagtacctggtggtggtctccaaactgcccagtcatttgcaccttcctcctgagaaagagaaggacattgtgaaattcgtggtggcaacccttgaggccctgtcctggcatttgatccatgagcagatcccgctgagtctggatctccaggcagggctggactgctgctgcctggccctgcagctgcctggcctctggagcgtggtctcctccacagagtttgtgacccacgcctgctccctcatctactgtgtgcacttcatcctggaggccgttgcagtgcagcctggagagcagcttcttagtccagaaagaaggacaaataccccaaaagccatcagcgaggaggaggaggaagtagatccaaacacacagaatcctaagtatatcactgcagcctgtgagatggtggcagaaatggtggagtctctgcagtcggtgttggccttgggtcataaaaggaatagcggcgtgccggcgtttctcacgccattgctcaggaacatcatcatcagcctggcccgcctgccccttgtcaacagctacacacgtgtgcccccactggtgtggaagcttggatggtcacccaaaccgggaggggattttggcacagcattccctgagatccccgtggagttcctccaggaaaaggaagtctttaaggagttcatctaccgcatcaacacactaggctggaccagtcgtactcagtttgaagaaacttgggccaccctccttggtgtcctggtgacgcagcccctcgtgatggagcaggaggagagcccaccagaagaagacacagagaggacccagatcaacgtcctggccgtgcaggccatcacctcactggtgctcagtgcaatgactgtgcctgtggccggcaacccagctgtaagctgcttggagcagcagccccggaacaagcctctgaaagctctcgacaccaggtttgggaggaagctgagcattatcagagggattgtggagcaagagattcaagcaatggtttcaaagagagagaatattgccacccatcatttatatcaggcatgggatcctgtcccttctctgtctccggctactacaggtgccctcatcagccacgagaagctgctgctacagatcaaccccgagcgggagctggggagcatgagctacaaactcggccaggtgtccatacactccgtgtggctggggaacagcatcacacccctgagggaggaggaatgggacgaggaagaggaggaggaggccgacgcccctgcaccttcgtcaccacccacgtctccagtcaactccaggaaacaccgggctggagttgacatccactcctgttcgcagtttttgcttgagttgtacagccgctggatcctgccgtccagctcagccaggaggaccccggccatcctgatcagtgaggtggtcagatcccttctagtggtctcagacttgttcaccgagcgcaaccagtttgagctgatgtatgtgacgctgacagaactgcgaagggtgcacccttcagaagacgagatcctcgctcagtacctggtgcctgccacctgcaaggcagctgccgtccttgggatggacaaggccgtggcggagcctgtcagccgcctgctggagagcacgctcaggagcagccacctgcccagcagggttggagccctgcacggcgtcctctatgtgctggagtgcgacctgctggacgacactgccaagcagctcatcccggtcatcagcgactatctcctctccaacctgaaagggatcgcccactgcgtgaacattcacagccagcagcacgtactggtcatgtgtgccactgcgttttacctcattgagaactatcctctggacgtagggccggaattttcagcatcaataatacagatgtgtggggtgatgctgtctggaagtgaggagtccaccccctccatcatttaccactgtgccctcagaggcctggagcgcctcctgctctctgagcagctctcccgcctggatgcagaatcgctggtcaagctgagtgtggacagagtgaacgtgcacagcccgcaccgggccatggcggctctgggcctgatgctcacctgcatgtacacaggaaaggagaaagtcagtccgggtagaacttcagaccctaatcctgcagcccccgacagcgagtcagtgattgttgctatggagcgggtatctgttctttttgataggatcaggaaaggctttccttgtgaagccagagtggtggccaggatcctgccccagtttctagacgacttcttcccaccccaggacatcatgaacaaagtcatcggagagtttctgtccaaccagcagccatacccccagttcatggccaccgtggtgtataaggtgtttcagactctgcacagcaccgggcagtcgtccatggtccgggactgggtcatgctgtccctctccaacttcacgcagagggccccggtcgccatggccacgtggagcctctcctgcttctttgtcagcgcgtccaccagcccgtgggtcgcggcgatcctcccacatgtcatcagcaggatgggcaagctggagcaggtggacgtgaaccttttctgcctggtcgccacagacttctacagacaccagatagaggaggagctcgaccgcagggccttccagtctgtgcttgaggtggttgcagccccaggaagcccatatcaccggctgctgacttgtttacgaaatgtccacaaggtcaccacctgctgagcgccatggtgggagagactgtgaggcggcagctggggccggagcctttggaagtctgcgcccttgtgccctgcctccaccgagccagcttggtccctatgggcttccgcacatgccgcgggcggccaggcaacgtgcgtgtctctgccatgtggcagaagtgctctttgtggcagtggccaggcagggagtgtctgcagtcctggtggggctgagcctgaggccttccagaaagcaggagcagctgtgctgcaccccatgtgggtgaccaggtcctttctcctgatagtcacctgctggttgttgccaggttgcagctgctcttgcatctgggccagaagtcctccctcctgcaggctggctgttggcccctctgctgtcctgcagtagaaggtgccgtgagcaggctttgggaacactggcctgggtctccctggtggggtgtgcatgccacgccccgtgtctggatgcacagatgccatggcctgtgctgggccagtggctgggggtgctagacacccggcaccattctcccttctctcttttcttctcaggatttaaaatttaattatatcagtaaagagattaattttaacgtaactctttctatgcccgtgtaaagtatgtgaatcgcaaggcctgtgctgcatgcgacagcgtccggggtggtggacagggcccccggccacgctccctctcctgtagccactggcatagccctcctgagcacccgctgacatttccgttgtacatgttcctgtttatgcattcacaaggtgactgggatgtagagaggcgttagtgggcaggtggccacagcaggactgaggacaggcccccattatcctaggggtgcgctcacctgcagcccctcctcctcgggcacagacgactgtcgttctccacccaccagtcagggacagcagcctccctgtcactcagctgagaaggccagccctccctggctgtgagcagcctccactgtgtccagagacatgggcctcccactcctgttccttgctagccctggggtggcgtctgcctaggagctggctggcaggtgttgggacctgctgctccatggatgcatgccctaagagtgtcactgagctgtgttttgtctgagcctctctcggtcaacagcaaagcttggtgtcttggcactgttagtgacagagcccagcatcccttctgcccccgttccagctgacatcttgcacggtgaccccttttagtcaggagagtgcagatctgtgctcatcggagactgccccacggccctgtcagagccgccactcctatccccaggccaggtccctggaccagcctcctgtttgcaggcccagaggagccaagtcattaaaatggaagtggattctggatggccgggctgctgctgatgtaggagctggatttgggagctctgcttgccgactggctgtgagacgaggcaggggctctgcttcctcagccctagaggcgagccaggcaaggttggcgactgtcatgtggcttggtttggtcatgcccgtcgatgttttgggtattgaatgtggtaagtggaggaaatgttggaactctgtgcaggtgctgccttgagacccccaagcttccacctgtccctctcctatgtggcagctggggagcagctgagatgtggacttgtatgctgcccacatacgtgagggggagctgaaagggagcccctcctctgagcagcctctgccaggcctgtatgaggcttttcccaccagctcccaacagaggcctcccccagccaggaccacctcgtcctcgtggcggggcagcaggagcggtagaaaggggtccgatgtttgaggaggcccttaagggaagctactgaattataacacgtaagaaaatcaccattcttccgtattggttgggggctcctgtttctcatcctagctttttcctggaaagcccgctagaaggtttgggaacgaggggaaagttctcagaactgttggctgctccccacccgcctcccgcctcccccgcaggttatgtcagcagctctgagacagcagtatcacaggccagatgttgttcctggctagatgtttacatttgtaagaaataacactgtgaatgtaaaacagagccattcccttggaatgcatatcgctgggctcaacatagagtttgtcttcctcttgtttacgacgtgatctaaaccagtccttagcaaggggctcagaacaccccgctctggcagtaggtgtcccccacccccaaagacctgcctgtgtgctccggagatgaatatgagctcattagtaaaaatgacttcacccacgcatatacataaagtatccatgcatgtgcatatagacacatctataattttacacacacacctctcaagacggagatgcatggcctctaagagtgcccgtgtcggttcttcctggaagttgactttccttagacccgccaggtcaagttagccgcgtgacggacatccaggcgtgggacgtggtcagggcagggctcattcattgcccactaggatcccactggcgaagatggtctccatatcagctctctgcagaagggaggaagactttatcatgttcctaaaaatctgtggcaagcacccatcgtattatccaaattttgttgcaaatgtgattaatttggttgtcaagttttgggggtgggctgtggggagattgcttttgttttcctgctggtaatatcgggaaagattttaatgaaacccaagtggggcctccttgtccaggtctcactgctttgcaccgtggtcagagggactgtcagctgagcttgagctcccctggagccagcagggctgtgatgggcgagtcccggagccccacccagacctgaatgcttctgagagcaaagggaaggactgacgagagatgtatatttaattttttaactgctgcaaacattgtacatccaaattaaaggaaaaaaatggaaaccatca

SEQ ID NO: 425336 - DNA, 11576 bp, Homo sapiens
ttgctgtgtgaggcagaacctgcgggggcaggggcgggctggttccctggccagccattggcagagtccgcaggctagggctgtcaatcatgctggccggcgtggccccgcctccgccggcgcggccccgcctccgccggcgcacgtctgggacgcaaggcgccgtgggggctgccgggacgggtccaagatggacggccgctcaggttctgcttttacctgcggcccagagccccattcattgccccggtgctgagcggcgccgcgagtcggcccgaggcctccggggactgccgtgccgggcgggagaccgccatggcgaccctggaaaagctgatgaaggccttcgagtccctcaagtccttccagcagcagcagcagcagcagcagcagcagcagcagcagcagcagcagcagcagcagcagcagcaacagccgccaccgccgccgccgccgccgccgcctcctcagcttcctcagccgccgccgcaggcacagccgctgctgcctcagccgcagccgcccccgccgccgcccccgccgccacccggcccggctgtggctgaggagccgctgcaccgaccaaagaaagaactttcagctaccaagaaagaccgtgtgaatcattgtctgacaatatgtgaaaacatagtggcacagtctgtcagaaattctccagaatttcagaaacttctgggcatcgctatggaactttttctgctgtgcagtgatgacgcagagtcagatgtcaggatggtggctgacgaatgcctcaacaaagttatcaaagctttgatggattctaatcttccaaggttacagctcgagctctataaggaaattaaaaagaatggtgcccctcggagtttgcgtgctgccctgtggaggtttgctgagctggctcacctggttcggcctcagaaatgcaggccttacctggtgaaccttctgccgtgcctgactcgaacaagcaagagacccgaagaatcagtccaggagaccttggctgcagctgttcccaaaattatggcttcttttggcaattttgcaaatgacaatgaaattaaggttttgttaaaggccttcatagcgaacctgaagtcaagctcccccaccattcggcggacagcggctggatcagcagtgagcatctgccagcactcaagaaggacacaatatttctatagttggctactaaatgtgctcttaggcttactcgttcctgtcgaggatgaacactccactctgctgattcttggcgtgctgctcaccctgaggtatttggtgcccttgctgcagcagcaggtcaaggacacaagcctgaaaggcagcttcggagtgacaaggaaagaaatggaagtctctccttctgcagagcagcttgtccaggtttatgaactgacgttacatcatacacagcaccaagaccacaatgttgtgaccggagccctggagctgttgcagcagctcttcagaacgcctccacccgagcttctgcaaaccctgaccgcagtcgggggcattgggcagctcaccgctgctaaggaggagtctggtggccgaagccgtagtgggagtattgtggaacttatagctggagggggttcctcatgcagccctgtcctttcaagaaaacaaaaaggcaaagtgctcttaggagaagaagaagccttggaggatgactctgaatcgagatcggatgtcagcagctctgccttaacagcctcagtgaaggatgagatcagtggagagctggctgcttcttcaggggtttccactccagggtcagcaggtcatgacatcatcacagaacagccacggtcacagcacacactgcaggcggactcagtggatctggccagctgtgacttgacaagctctgccactgatggggatgaggaggatatcttgagccacagctccagccaggtcagcgccgtcccatctgaccctgccatggacctgaatgatgggacccaggcctcgtcgcccatcagcgacagctcccagaccaccaccgaagggcctgattcagctgttaccccttcagacagttctgaaattgtgttagacggtaccgacaaccagtatttgggcctgcagattggacagccccaggatgaagatgaggaagccacaggtattcttcctgatgaagcctcggaggccttcaggaactcttccatggcccttcaacaggcacatttattgaaaaacatgagtcactgcaggcagccttctgacagcagtgttgataaatttgtgttgagagatgaagctactgaaccgggtgatcaagaaaacaagccttgccgcatcaaaggtgacattggacagtccactgatgatgactctgcacctcttgtccattgtgtccgccttttatctgcttcgtttttgctaacagggggaaaaaatgtgctggttccggacagggatgtgagggtcagcgtgaaggccctggccctcagctgtgtgggagcagctgtggccctccacccggaatctttcttcagcaaactctataaagttcctcttgacaccacggaataccctgaggaacagtatgtctcagacatcttgaactacatcgatcatggagacccacaggttcgaggagccactgccattctctgtgggaccctcatctgctccatcctcagcaggtcccgcttccacgtgggagattggatgggcaccattagaaccctcacaggaaatacattttctttggcggattgcattcctttgctgcggaaaacactgaaggatgagtcttctgttacttgcaagttagcttgtacagctgtgaggaactgtgtcatgagtctctgcagcagcagctacagtgagttaggactgcagctgatcatcgatgtgctgactctgaggaacagttcctattggctggtgaggacagagcttctggaaacccttgcagagattgacttcaggctggtgagctttttggaggcaaaagcagaaaacttacacagaggggctcatcattatacagggcttttaaaactgcaagaacgagtgctcaataatgttgtcatccatttgcttggagatgaagaccccagggtgcgacatgttgccgcagcatcactaattaggcttgtcccaaagctgttttataaatgtgaccaaggacaagctgatccagtagtggccgtggcaagagatcaaagcagtgtttacctgaaacttctcatgcatgagacgcagcctccatctcatttctccgtcagcacaataaccagaatatatagaggctataacctactaccaagcataacagacgtcactatggaaaataacctttcaagagttattgcagcagtttctcatgaactaatcacatcaaccaccagagcactcacatttggatgctgtgaagctttgtgtcttctttccactgccttcccagtttgcatttggagtttaggttggcactgtggagtgcctccactgagtgcctcagatgagtctaggaagagctgtaccgttgggatggccacaatgattctgaccctgctctcgtcagcttggttcccattggatctctcagcccatcaagatgctttgattttggccggaaacttgcttgcagccagtgctcccaaatctctgagaagttcatgggcctctgaagaagaagccaacccagcagccaccaagcaagaggaggtctggccagccctgggggaccgggccctggtgcccatggtggagcagctcttctctcacctgctgaaggtgattaacatttgtgcccacgtcctggatgacgtggctcctggacccgcaataaaggcagccttgccttctctaacaaaccccccttctctaagtcccatccgacgaaaggggaaggagaaagaaccaggagaacaagcatctgtaccgttgagtcccaagaaaggcagtgaggccagtgcagcttctagacaatctgatacctcaggtcctgttacaacaagtaaatcctcatcactggggagtttctatcatcttccttcatacctcaaactgcatgatgtcctgaaagctacacacgctaactacaaggtcacgctggatcttcagaacagcacggaaaagtttggagggtttctccgctcagccttggatgttctttctcagatactagagctggccacactgcaggacattgggaagtgtgttgaagagatcctaggatacctgaaatcctgctttagtcgagaaccaatgatggcaactgtttgtgttcaacaattgttgaagactctctttggcacaaacttggcctcccagtttgatggcttatcttccaaccccagcaagtcacaaggccgagcacagcgccttggctcctccagtgtgaggccaggcttgtaccactactgcttcatggccccgtacacccacttcacccaggccctcgctgacgccagcctgaggaacatggtgcaggcggagcaggagaacgacacctcgggatggtttgatgtcctccagaaagtgtctacccagttgaagacaaacctcacgagtgtcacaaagaaccgtgcagataagaatgctattcataatcacattcgtttgtttgaacctcttgttataaaagctttaaaacagtacacgactacaacatgtgtgcagttacagaagcaggttttagatttgctggcgcagctggttcagttacgggttaattactgtcttctggattcagatcaggtgtttattggctttgtattgaaacagtttgaatacattgaagtgggccagttcagggaatcagaggcaatcattccaaacatctttttcttcttggtattactatcttatgaacgctatcattcaaaacagatcattggaattcctaaaatcattcagctctgtgatggcatcatggccagtggaaggaaggctgtgacacatgccataccggctctgcagcccatagtccacgacctctttgtattaagaggaacaaataaagctgatgcaggaaaagagcttgaaacccaaaaagaggtggtggtgtcaatgttactgagactcatccagtaccatcaggtgttggagatgttcattcttgtcctgcagcagtgccacaaggagaatgaagacaagtggaagcgactgtctcgacagatagctgacatcatcctcccaatgttagccaaacagcagatgcacattgactctcatgaagcccttggagtgttaaatacattatttgagattttggccccttcctccctccgtccggtagacatgcttttacggagtatgttcgtcactccaaacacaatggcgtccgtgagcactgttcaactgtggatatcgggaattctggccattttgagggttctgatttcccagtcaactgaagatattgttctttctcgtattcaggagctctccttctctccgtatttaatctcctgtacagtaattaataggttaagagatggggacagtacttcaacgctagaagaacacagtgaagggaaacaaataaagaatttgccagaagaaacattttcaaggtttctattacaactggttggtattcttttagaagacattgttacaaaacagctgaaggtggaaatgagtgagcagcaacatactttctattgccaggaactaggcacactgctaatgtgtctgatccacatcttcaagtctggaatgttccggagaatcacagcagctgccactaggctgttccgcagtgatggctgtggcggcagtttctacaccctggacagcttgaacttgcgggctcgttccatgatcaccacccacccggccctggtgctgctctggtgtcagatactgctgcttgtcaaccacaccgactaccgctggtgggcagaagtgcagcagaccccgaaaagacacagtctgtccagcacaaagttacttagtccccagatgtctggagaagaggaggattctgacttggcagccaaacttggaatgtgcaatagagaaatagtacgaagaggggctctcattctcttctgtgattatgtctgtcagaacctccatgactccgagcacttaacgtggctcattgtaaatcacattcaagatctgatcagcctttcccacgagcctccagtacaggacttcatcagtgccgttcatcggaactctgctgccagcggcctgttcatccaggcaattcagtctcgttgtgaaaacctttcaactccaaccatgctgaagaaaactcttcagtgcttggaggggatccatctcagccagtcgggagctgtgctcacgctgtatgtggacaggcttctgtgcacccctttccgtgtgctggctcgcatggtcgacatccttgcttgtcgccgggtagaaatgcttctggctgcaaatttacagagcagcatggcccagttgccaatggaagaactcaacagaatccaggaataccttcagagcagcgggctcgctcagagacaccaaaggctctattccctgctggacaggtttcgtctctccaccatgcaagactcacttagtccctctcctccagtctcttcccacccgctggacggggatgggcacgtgtcactggaaacagtgagtccggacaaagactggtacgttcatcttgtcaaatcccagtgttggaccaggtcagattctgcactgctggaaggtgcagagctggtgaatcggattcctgctgaagatatgaatgccttcatgatgaactcggagttcaacctaagcctgctagctccatgcttaagcctagggatgagtgaaatttctggtggccagaagagtgccctttttgaagcagcccgtgaggtgactctggcccgtgtgagcggcaccgtgcagcagctccctgctgtccatcatgtcttccagcccgagctgcctgcagagccggcggcctactggagcaagttgaatgatctgtttggggatgctgcactgtatcagtccctgcccactctggcccgggccctggcacagtacctggtggtggtctccaaactgcccagtcatttgcaccttcctcctgagaaagagaaggacattgtgaaattcgtggtggcaacccttgaggccctgtcctggcatttgatccatgagcagatcccgctgagtctggatctccaggcagggctggactgctgctgcctggccctgcagctgcctggcctctggagcgtggtctcctccacagagtttgtgacccacgcctgctccctcatctactgtgtgcacttcatcctggaggccgttgcagtgcagcctggagagcagcttcttagtccagaaagaaggacaaataccccaaaagccatcagcgaggaggaggaggaagtagatccaaacacacagaatcctaagtatatcactgcagcctgtgagatggtggcagaaatggtggagtctctgcagtcggtgttggccttgggtcataaaaggaatagcggcgtgccggcgtttctcacgccattgctcaggaacatcatcatcagcctggcccgcctgccccttgtcaacagctacacacgtgtgcccccactggtgtggaagcttggatggtcacccaaaccgggaggggattttggcacagcattccctgagatccccgtggagttcctccaggaaaaggaagtctttaaggagttcatctaccgcatcaacacactaggctggaccagtcgtactcagtttgaagaaacttgggccaccctccttggtgtcctggtgacgcagcccctcgtgatggagcaggaggagagcccaccagaagaagacacagagaggacccagatcaacgtcctggccgtgcaggccatcacctcactggtgctcagtgcaatgactgtgcctgtggccggcaacccagctgtaagctgcttggagcagcagccccggaacaagcctctgaaagctctcgacaccaggtttgggaggaagctgagcattatcagagggattgtggagcaagagattcaagcaatggtttcaaagagagagaatattgccacccatcatttatatcaggcatgggatcctgtcccttctctgtctccggctactacaggtgccctcatcagccacgagaagctgctgctacagatcaaccccgagcgggagctggggagcatgagctacaaactcggccaggtgtccatacactccgtgtggctggggaacagcatcacacccctgagggaggaggaatgggacgaggaagaggaggaggaggccgacgcccctgcaccttcgtcaccacccacgtctccagtcaactccaggaaacaccgggctggagttgacatccactcctgttcgcagtttttgcttgagttgtacagccgctggatcctgccgtccagctcagccaggaggaccccggccatcctgatcagtgaggtggtcagatcccttctagtggtctcagacttgttcaccgagcgcaaccagtttgagctgatgtatgtgacgctgacagaactgcgaagggtgcacccttcagaagacgagatcctcgctcagtacctggtgcctgccacctgcaaggcagctgccgtccttgggatggacaaggccgtggcggagcctgtcagccgcctgctggagagcacgctcaggagcagccacctgcccagcagggttggagccctgcacggcgtcctctatgtgctggagtgcgacctgctggacgacactgccaagcagctcatcccggtcatcagcgactatctcctctccaacctgaaagggatcgcccactgcgtgaacattcacagccagcagcacgtactggtcatgtgtgccactgcgttttacctcattgagaactatcctctggacgtagggccggaattttcagcatcaataatacagatgtgtggggtgatgctgtctggaagtgaggagtccaccccctccatcatttaccactgtgccctcagaggcctggagcgcctcctgctctctgagcagctctcccgcctggatgcagaatcgctggtcaagctgagtgtggacagagtgaacgtgcacagcccgcaccgggccatggcggctctgggcctgatgctcacctgcatgtacacaggaaaggagaaagtcagtccgggtagaacttcagaccctaatcctgcagcccccgacagcgagtcagtgattgttgctatggagcgggtatctgttctttttgataggatcaggaaaggctttccttgtgaagccagagtggtggccaggatcctgccccagtttctagacgacttcttcccaccccaggacatcatgaacaaagtcatcggagagtttctgtccaaccagcagccatacccccagttcatggccaccgtggtgtataaggtgtttcagactctgcacagcaccgggcagtcgtccatggtccgggactgggtcatgctgtccctctccaacttcacgcagagggccccggtcgccatggccacgtggagcctctcctgcttctttgtcagcgcgtccaccagcccgtgggtcgcggcgatcctcccacatgtcatcagcaggatgggcaagctggagcaggtggacgtgaaccttttctgcctggtcgccacagacttctacagacaccagatagaggaggagctcgaccgcagggccttccagtctgtgcttgaggtggttgcagccccaggaagcccatatcaccggctgctgacttgtttacgaaatgtccacaaggtcaccacctgctgagcgccatggtgggagagactgtgaggcggcagctggggccggagcctttggaagtctgcgcccttgtgccctgcctccaccgagccagcttggtccctatgggcttccgcacatgccgcgggcggccaggcaacgtgcgtgtctctgccatgtggcagaagtgctctttgtggcagtggccaggcagggagtgtctgcagtcctggtggggctgagcctgaggccttccagaaagcaggagcagctgtgctgcaccccatgtgggtgaccaggtcctttctcctgatagtcacctgctggttgttgccaggttgcagctgctcttgcatctgggccagaagtcctccctcctgcaggctggctgttggcccctctgctgtcctgcagtagaaggtgccgtgagcaggctttgggaacactggcctgggtctccctggtggggtgtgcatgccacgccccgtgtctggatgcacagatgccatggcctgtgctgggccagtggctgggggtgctagacacccggcaccattctcccttctctcttttcttctcaggatttaaaatttaattatatcagtaaagagattaattttaacgtaactctttctatgcccgtgtaaagtatgtgaatcgcaaggcctgtgctgcatgcgacagcgtccggggtggtggacagggcccccggccacgctccctctcctgtagccactggcatagccctcctgagcacccgctgacatttccgttgtacatgttcctgtttatgcattcacaaggtgactgggatgtagagaggcgttagtgggcaggtggccacagcaggactgaggacaggcccccattatcctaggggtgcgctcacctgcagcccctcctcctcgggcacagacgactgtcgttctccacccaccagtcagggacagcagcctccctgtcactcagctgagaaggccagccctccctggctgtgagcagcctccactgtgtccagagacatgggcctcccactcctgttccttgctagccctggggtggcgtctgcctaggagctggctggcaggtgttgggacctgctgctccatggatgcatgccctaagagtgtcactgagctgtgttttgtctgagcctctctcggtcaacagcaaagcttggtgtcttggcactgttagtgacagagcccagcatcccttctgcccccgttccagctgacatcttgcacggtgaccccttttagtcaggagagtgcagatctgtgctcatcggagactgccccacggccctgtcagagccgccactcctatccccaggccaggtccctggaccagcctcctgtttgcaggcccagaggagccaagtcattaaaatggaagtggattctggatggccgggctgctgctgatgtaggagctggatttgggagctctgcttgccgactggctgtgagacgaggcaggggctctgcttcctcagccctagaggcgagccaggcaaggttggcgactgtcatgtggcttggtttggtcatgcccgtcgatgttttgggtattgaatgtggtaagtggaggaaatgttggaactctgtgcccaggctgtgctagatagtgttgaatggaggcagaaaatagcactttatggtttattatagctggcaatccaaaaaagaaactgtttgagaccagttcgagaaattccgtttgctctattcttcctagctctaagatggtttgcaggcttgaccttcaagacagcataaagtgagtccttttgtccctcttcaggttgcacctgtctaactatgacagggatcatagcagcagcagcagga

SEQ ID NO: 425337 - DNA, 4903 bp, Homo sapiens
ctgcacacggggagtgggcttcccttctcttttccttgcaggatcataccagtgggccagttttgacttggtcgggaggaggcatgaacacctgagactgtgcagcgattctttgacacagaggcctttctccctgtgcagatgtgtggggtgatgctgtctggaagtgaggagtccaccccctccatcatttaccactgtgccctcagaggcctggagcgcctcctgctctctgagcagctctcccgcctggatgcagaatcgctggtcaagctgagtgtggacagagtgaacgtgcacagcccgcaccgggccatggcggctctgggcctgatgctcacctgcatgtacacaggaaaggagaaagtcagtccgggtagaacttcagaccctaatcctgcagcccccgacagcgagtcagtgattgttgctatggagcgggtatctgttctttttgataggatcaggaaaggctttccttgtgaagccagagtggtggccaggatcctgccccagtttctagacgacttcttcccaccccaggacatcatgaacaaagtcatcggagagtttctgtccaaccagcagccatacccccagttcatggccaccgtggtgtataaggtgtttcagactctgcacagcaccgggcagtcgtccatggtccgggactgggtcatgctgtccctctccaacttcacgcagagggccccggtcgccatggccacgtggagcctctcctgcttctttgtcagcgcgtccaccagcccgtgggtcgcggcgatcctcccacatgtcatcagcaggatgggcaagctggagcaggtggacgtgaaccttttctgcctggtcgccacagacttctacagacaccagatagaggaggagctcgaccgcagggccttccagtctgtgcttgaggtggttgcagccccaggaagcccatatcaccggctgctgacttgtttacgaaatgtccacaaggtcaccacctgctgagcgccatggtgggagagactgtgaggcggcagctggggccggagcctttggaagtctgcgcccttgtgccctgcctccaccgagccagcttggtccctatgggcttccgcacatgccgcgggcggccaggcaacgtgcgtgtctctgccatgtggcagaagtgctctttgtggcagtggccaggcagggagtgtctgcagtcctggtggggctgagcctgaggccttccagaaagcaggagcagctgtgctgcaccccatgtgggtgaccaggtcctttctcctgatagtcacctgctggttgttgccaggttgcagctgctcttgcatctgggccagaagtcctccctcctgcaggctggctgttggcccctctgctgtcctgcagtagaaggtgccgtgagcaggctttgggaacactggcctgggtctccctggtggggtgtgcatgccacgccccgtgtctggatgcacagatgccatggcctgtgctgggccagtggctgggggtgctagacacccggcaccattctcccttctctcttttcttctcaggatttaaaatttaattatatcagtaaagagattaattttaacgtaactctttctatgcccgtgtaaagtatgtgaatcgcaaggcctgtgctgcatgcgacagcgtccggggtggtggacagggcccccggccacgctccctctcctgtagccactggcatagccctcctgagcacccgctgacatttccgttgtacatgttcctgtttatgcattcacaaggtgactgggatgtagagaggcgttagtgggcaggtggccacagcaggactgaggacaggcccccattatcctaggggtgcgctcacctgcagcccctcctcctcgggcacagacgactgtcgttctccacccaccagtcagggacagcagcctccctgtcactcagctgagaaggccagccctccctggctgtgagcagcctccactgtgtccagagacatgggcctcccactcctgttccttgctagccctggggtggcgtctgcctaggagctggctggcaggtgttgggacctgctgctccatggatgcatgccctaagagtgtcactgagctgtgttttgtctgagcctctctcggtcaacagcaaagcttggtgtcttggcactgttagtgacagagcccagcatcccttctgcccccgttccagctgacatcttgcacggtgaccccttttagtcaggagagtgcagatctgtgctcatcggagactgccccacggccctgtcagagccgccactcctatccccaggccaggtccctggaccagcctcctgtttgcaggcccagaggagccaagtcattaaaatggaagtggattctggatggccgggctgctgctgatgtaggagctggatttgggagctctgcttgccgactggctgtgagacgaggcaggggctctgcttcctcagccctagaggcgagccaggcaaggttggcgactgtcatgtggcttggtttggtcatgcccgtcgatgttttgggtattgaatgtggtaagtggaggaaatgttggaactctgtgcaggtgctgccttgagacccccaagcttccacctgtccctctcctatgtggcagctggggagcagctgagatgtggacttgtatgctgcccacatacgtgagggggagctgaaagggagcccctcctctgagcagcctctgccaggcctgtatgaggcttttcccaccagctcccaacagaggcctcccccagccaggaccacctcgtcctcgtggcggggcagcaggagcggtagaaaggggtccgatgtttgaggaggcccttaagggaagctactgaattataacacgtaagaaaatcaccattcttccgtattggttgggggctcctgtttctcatcctagctttttcctggaaagcccgctagaaggtttgggaacgaggggaaagttctcagaactgttggctgctccccacccgcctcccgcctcccccgcaggttatgtcagcagctctgagacagcagtatcacaggccagatgttgttcctggctagatgtttacatttgtaagaaataacactgtgaatgtaaaacagagccattcccttggaatgcatatcgctgggctcaacatagagtttgtcttcctcttgtttacgacgtgatctaaaccagtccttagcaaggggctcagaacaccccgctctggcagtaggtgtcccccacccccaaagacctgcctgtgtgctccggagatgaatatgagctcattagtaaaaatgacttcacccacgcatatacataaagtatccatgcatgtgcatatagacacatctataattttacacacacacctctcaagacggagatgcatggcctctaagagtgcccgtgtcggttcttcctggaagttgactttccttagacccgccaggtcaagttagccgcgtgacggacatccaggcgtgggacgtggtcagggcagggctcattcattgcccactaggatcccactggcgaagatggtctccatatcagctctctgcagaagggaggaagactttatcatgttcctaaaaatctgtggcaagcacccatcgtattatccaaattttgttgcaaatgtgattaatttggttgtcaagttttgggggtgggctgtggggagattgcttttgttttcctgctggtaatatcgggaaagattttaatgaaaccagggtagaattgtttggcaatgcactgaagcgtgtttctttcccaaaatgtgcctcccttccgctgcgggcccagctgagtctatgtaggtgatgtttccagctgccaagtgctctttgttactgtccaccctcatttctgccagcgcatgtgtcctttcaaggggaaaatgtgaagctgaaccccctccagacacccagaatgtagcatctgagaaggccctgtgccctaaaggacacccctcgcccccatcttcatggagggggtcatttcagagccctcggagccaatgaacagctcctcctcttggagctgagatgagccccacgtggagctcgggacggatagtagacagcaataactcggtgtgtggccgcctggcaggtggaacttcctcccgttgcggggtggagtgaggttagttctgtgtgtctggtgggtggagtcaggcttctcttgctacctgtgagcatccttcccagcagacatcctcatcgggctttgtccctcccccgcttcctccctctgtggggaggacccgggaccacagctgctggccagggtagacttggagctgtcctccagaggggtcacgtgtaggagtgagaagaaggaagatcttgagagctgctgagggaccttggagagctcaggatggctcagacgaggacactcgcttgccgggcctgggcctcctgggaaggagggagctgctcagaatgccgcatgacaactgaaggcaacctggaaggttcaggggccgctcttcccccatgtgcctgtcacgctctggtgcagtcaaaggaacgccttcccctcagttgtttctaagagcagagtctcccgctgcaatctgggtggtaactgccagccttggaggatcgtggccaacgtggacctgcctacggagggtgggctctgacccaagtggggcctccttgtccaggtctcactgctttgcaccgtggtcagagggactgtcagctgagcttgagctcccctggagccagcagggctgtgatgggcgagtcccggagccccacccagacctgaatgcttctgagagcaaagggaaggactgacgagagatgtatatttaattttttaactgctgcaaacattgtacatccaaattaaaggaaaaaaatggaaaccatca

SEQ ID NO: 425338 - DNA, 8648 bp, Homo sapiens
  misc_feature (8627)..(8627): n is a, c, g, or t
  misc_feature (8632)..(8632): n is a, c, g, or t
ttgctgtgtgaggcagaacctgcgggggcaggggcgggctggttccctggccagccattggcagagtccgcaggctagggctgtcaatcatgctggccggcgtggccccgcctccgccggcgcggccccgcctccgccggcgcacgtctgggacgcaaggcgccgtgggggctgccgggacgggtccaagatggacggccgctcaggttctgcttttacctgcggcccagagccccattcattgccccggtgctgagcggcgccgcgagtcggcccgaggcctccggggactgccgtgccgggcgggagaccgccatggcgaccctggaaaagctgatgaaggccttcgagtccctcaagtccttccagcagcagcagcagcagcagcagcagcagcagcagcagcagcagcagcagcagcagcagcagcaacagccgccaccgccgccgccgccgccgccgcctcctcagcttcctcagccgccgccgcaggcacagccgctgctgcctcagccgcagccgcccccgccgccgcccccgccgccacccggcccggctgtggctgaggagccgctgcaccgaccaaagaaagaactttcagctaccaagaaagaccgtgtgaatcattgtctgacaatatgtgaaaacatagtggcacagtctgtcagaaattctccagaatttcagaaacttctgggcatcgctatggaactttttctgctgtgcagtgatgacgcagagtcagatgtcaggatggtggctgacgaatgcctcaacaaagttatcaaagctttgatggattctaatcttccaaggttacagctcgagctctataaggaaattaaaaagaatggtgcccctcggagtttgcgtgctgccctgtggaggtttgctgagctggctcacctggttcggcctcagaaatgcaggccttacctggtgaaccttctgccgtgcctgactcgaacaagcaagagacccgaagaatcagtccaggagaccttggctgcagctgttcccaaaattatggcttcttttggcaattttgcaaatgacaatgaaattaaggttttgttaaaggccttcatagcgaacctgaagtcaagctcccccaccattcggcggacagcggctggatcagcagtgagcatctgccagcactcaagaaggacacaatatttctatagttggctactaaatgtgctcttaggcttactcgttcctgtcgaggatgaacactccactctgctgattcttggcgtgctgctcaccctgaggtatttggtgcccttgctgcagcagcaggtcaaggacacaagcctgaaaggcagcttcggagtgacaaggaaagaaatggaagtctctccttctgcagagcagcttgtccaggtttatgaactgacgttacatcatacacagcaccaagaccacaatgttgtgaccggagccctggagctgttgcagcagctcttcagaacgcctccacccgagcttctgcaaaccctgaccgcagtcgggggcattgggcagctcaccgctgctaaggaggagtctggtggccgaagccgtagtgggagtattgtggaacttatagctggagggggttcctcatgcagccctgtcctttcaagaaaacaaaaaggcaaagtgctcttaggagaagaagaagccttggaggatgactctgaatcgagatcggatgtcagcagctctgccttaacagcctcagtgaaggatgagatcagtggagagctggctgcttcttcaggggtttccactccagggtcagcaggtcatgacatcatcacagaacagccacggtcacagcacacactgcaggcggactcagtggatctggccagctgtgacttgacaagctctgccactgatggggatgaggaggatatcttgagccacagctccagccaggtcagcgccgtcccatctgaccctgccatggacctgaatgatgggacccaggcctcgtcgcccatcagcgacagctcccagaccaccaccgaagggcctgattcagctgttaccccttcagacagttctgaaattgtgttagacggtaccgacaaccagtatttgggcctgcagattggacagccccaggatgaagatgaggaagccacaggtattcttcctgatgaagcctcggaggccttcaggaactcttccatggcccttcaacaggcacatttattgaaaaacatgagtcactgcaggcagccttctgacagcagtgttgataaatttgtgttgagagatgaagctactgaaccgggtgatcaagaaaacaagccttgccgcatcaaaggtgacattggacagtccactgatgatgactctgcacctcttgtccattgtgtccgccttttatctgcttcgtttttgctaacagggggaaaaaatgtgctggttccggacagggatgtgagggtcagcgtgaaggccctggccctcagctgtgtgggagcagctgtggccctccacccggaatctttcttcagcaaactctataaagttcctcttgacaccacggaataccctgaggaacagtatgtctcagacatcttgaactacatcgatcatggagacccacaggttcgaggagccactgccattctctgtgggaccctcatctgctccatcctcagcaggtcccgcttccacgtgggagattggatgggcaccattagaaccctcacaggaaatacattttctttggcggattgcattcctttgctgcggaaaacactgaaggatgagtcttctgttacttgcaagttagcttgtacagctgtgaggaactgtgtcatgagtctctgcagcagcagctacagtgagttaggactgcagctgatcatcgatgtgctgactctgaggaacagttcctattggctggtgaggacagagcttctggaaacccttgcagagattgacttcaggctggtgagctttttggaggcaaaagcagaaaacttacacagaggggctcatcattatacagggcttttaaaactgcaagaacgagtgctcaataatgttgtcatccatttgcttggagatgaagaccccagggtgcgacatgttgccgcagcatcactaattaggcttgtcccaaagctgttttataaatgtgaccaaggacaagctgatccagtagtggccgtggcaagagatcaaagcagtgtttacctgaaacttctcatgcatgagacgcagcctccatctcatttctccgtcagcacaataaccagaatatatagaggctataacctactaccaagcataacagacgtcactatggaaaataacctttcaagagttattgcagcagtttctcatgaactaatcacatcaaccaccagagcactcacatttggatgctgtgaagctttgtgtcttctttccactgccttcccagtttgcatttggagtttaggttggcactgtggagtgcctccactgagtgcctcagatgagtctaggaagagctgtaccgttgggatggccacaatgattctgaccctgctctcgtcagcttggttcccattggatctctcagcccatcaagatgctttgattttggccggaaacttgcttgcagccagtgctcccaaatctctgagaagttcatgggcctctgaagaagaagccaacccagcagccaccaagcaagaggaggtctggccagccctgggggaccgggccctggtgcccatggtggagcagctcttctctcacctgctgaaggtgattaacatttgtgcccacgtcctggatgacgtggctcctggacccgcaataaaggcagccttgccttctctaacaaaccccccttctctaagtcccatccgacgaaaggggaaggagaaagaaccaggagaacaagcatctgtaccgttgagtcccaagaaaggcagtgaggccagtgcagcttctagacaatctgatacctcaggtcctgttacaacaagtaaatcctcatcactggggagtttctatcatcttccttcatacctcaaactgcatgatgtcctgaaagctacacacgctaactacaaggtcacgctggatcttcagaacagcacggaaaagtttggagggtttctccgctcagccttggatgttctttctcagatactagagctggccacactgcaggacattgggaagtgtgttgaagagatcctaggatacctgaaatcctgctttagtcgagaaccaatgatggcaactgtttgtgttcaacaattgttgaagactctctttggcacaaacttggcctcccagtttgatggcttatcttccaaccccagcaagtcacaaggccgagcacagcgccttggctcctccagtgtgaggccaggcttgtaccactactgcttcatggccccgtacacccacttcacccaggccctcgctgacgccagcctgaggaacatggtgcaggcggagcaggagaacgacacctcgggatggtttgatgtcctccagaaagtgtctacccagttgaagacaaacctcacgagtgtcacaaagaaccgtgcagataagaatgctattcataatcacattcgtttgtttgaacctcttgttataaaagctttaaaacagtacacgactacaacatgtgtgcagttacagaagcaggttttagatttgctggcgcagctggttcagttacgggttaattactgtcttctggattcagatcaggtgtttattggctttgtattgaaacagtttgaatacattgaagtgggccagttcagggaatcagaggcaatcattccaaacatctttttcttcttggtattactatcttatgaacgctatcattcaaaacagatcattggaattcctaaaatcattcagctctgtgatggcatcatggccagtggaaggaaggctgtgacacatgccataccggctctgcagcccatagtccacgacctctttgtattaagaggaacaaataaagctgatgcaggaaaagagcttgaaacccaaaaagaggtggtggtgtcaatgttactgagactcatccagtaccatcaggtgttggagatgttcattcttgtcctgcagcagtgccacaaggagaatgaagacaagtggaagcgactgtctcgacagatagctgacatcatcctcccaatgttagccaaacagcagatgcacattgactctcatgaagcccttggagtgttaaatacattatttgagattttggccccttcctccctccgtccggtagacatgcttttacggagtatgttcgtcactccaaacacaatggcgtccgtgagcactgttcaactgtggatatcgggaattctggccattttgagggttctgatttcccagtcaactgaagatattgttctttctcgtattcaggagctctccttctctccgtatttaatctcctgtacagtaattaataggttaagagatggggacagtacttcaacgctagaagaacacagtgaagggaaacaaataaagaatttgccagaagaaacattttcaaggtttctattacaactggttggtattcttttagaagacattgttacaaaacagctgaaggtggaaatgagtgagcagcaacatactttctattgccaggaactaggcacactgctaatgtgtctgatccacatcttcaagtctggaatgttccggagaatcacagcagctgccactaggctgttccgcagtgatggctgtggcggcagtttctacaccctggacagcttgaacttgcgggctcgttccatgatcaccacccacccggccctggtgctgctctggtgtcagatactgctgcttgtcaaccacaccgactaccgctggtgggcagaagtgcagcagaccccgaaaagacacagtctgtccagcacaaagttacttagtccccagatgtctggagaagaggaggattctgacttggcagccaaacttggaatgtgcaatagagaaatagtacgaagaggggctctcattctcttctgtgattatgtctgtcagaacctccatgactccgagcacttaacgtggctcattgtaaatcacattcaagatctgatcagcctttcccacgagcctccagtacaggacttcatcagtgccgttcatcggaactctgctgccagcggcctgttcatccaggcaattcagtctcgttgtgaaaacctttcaactccaaccatgctgaagaaaactcttcagtgcttggaggggatccatctcagccagtcgggagctgtgctcacgctgtatgtggacaggcttctgtgcacccctttccgtgtgctggctcgcatggtcgacatccttgcttgtcgccgggtagaaatgcttctggctgcaaatttacagagcagcatggcccagttgccaatggaagaactcaacagaatccaggaataccttcagagcagcgggctcgctcagagacaccaaaggctctattccctgctggacaggtttcgtctctccaccatgcaagactcacttagtccctctcctccagtctcttcccacccgctggacggggatgggcacgtgtcactggaaacagtgagtccggacaaagactggtacgttcatcttgtcaaatcccagtgttggaccaggtcagattctgcactgctggaaggtgcagagctggtgaatcggattcctgctgaagatatgaatgccttcatgatgaactcggagttcaacctaagcctgctagctccatgcttaagcctagggatgagtgaaatttctggtggccagaagagtgccctttttgaagcagcccgtgaggtgactctggcccgtgtgagcggcaccgtgcagcagctccctgctgtccatcatgtcttccagcccgagctgcctgcagagccggcggcctactggagcaagttgaatgatctgtttggggatgctgcactgtatcagtccctgcccactctggcccgggccctggcacagtacctggtggtggtctccaaactgcccagtcatttgcaccttcctcctgagaaagagaaggacattgtgaaattcgtggtggcaacccttgaggccctgtcctggcatttgatccatgagcagatcccgctgagtctggatctccaggcagggctggactgctgctgcctggccctgcagctgcctggcctctggagcgtggtctcctccacagagtttgtgacccacgcctgctccctcatctactgtgtgcacttcatcctggaggccgttgcagtgcagcctggagagcagcttcttagtccagaaagaaggacaaataccccaaaagccatcagcgaggaggaggaggaagtagatccaaacacacagaatcctaagtatatcactgcagcctgtgagatggtggcagaaatggtggagtctctgcagtcggtgttggccttgggtcataaaaggaatagcggcgtgccggcgtttctcacgccattgctcaggaacatcatcatcagcctggcccgcctgccccttgtcaacagctacacacgtgtgcccccactggtgtggaagcttggatggtcacccaaaccgggaggggattttggcacagcattccctgagatccccgtggagttcctccaggaaaaggaagtctttaaggagttcatctaccgcatcaacacactaggctggaccagtcgtactcagtttgaagaaacttgggccaccctccttggtgtcctggtgacgcagcccctcgtgatggagcaggaggagagcccaccagaagaagacacagagaggacccagatcaacgtcctggccgtgcaggccatcacctcactggtgctcagtgcaatgactgtgcctgtggccggcaacccagctgtaagctgcttggagcagcagccccggaacaagcctctgaaagctctcgacaccaggtttgggaggaagctgagcattatcagagggattgtggagcaagagattcaagcaatggtttcaaagagagagaatattgccacccatcatttatatcaggcatgggatcctgtcccttctctgtctccggctactacaggtgccctcatcagccacgagaagctgctgctacagatcaaccccgagcgggagctggggagcatgagctacaaactcggccaggtgtccatacactccgtgtggctggggaacagcatcacacccctgagggaggaggaatgggacgaggaagaggaggaggaggccgacgcccctgcaccttcgtcaccacccacgtctccagtcaactccaggaaacaccgggctggagttgacatccactcctgttcgcagtttttgcttgagttgtacagccgctggatcctgccgtccagctcagccaggaggaccccggccatcctgatcagtgaggtggtcagatcccttctagtggtctcagacttgttcaccgagcgcaaccagtttgagctgatgtatgtgacgctgacagaactgcgaagggtgcacccttcagaagacgagatcctcgctcagtacctggtgcctgccacctgcaaggcagctgccgtccttgggatggcaaggcctggcggacctggaaccgctgtggaaacacctangacancactgccacaggttga

SEQ ID NO: 425339 - DNA, 5274 bp, Homo sapiens
ttgctgtgtgaggcagaacctgcgggggcaggggcgggctggttccctggccagccattggcagagtccgcaggctagggctgtcaatcatgctggccggcgtggccccgcctccgccggcgcggccccgcctccgccggcgcacgtctgggacgcaaggcgccgtgggggctgccgggacgggtccaagatggacggccgctcaggttctgcttttacctgcggcccagagccccattcattgccccggtgctgagcggcgccgcgagtcggcccgaggcctccggggactgccgtgccgggcgggagaccgccatggcgaccctggaaaagctgatgaaggccttcgagtccctcaagtccttccagcagcagcagcagcagcagcagcagcagcagcagcagcagcagcagcagcagcagcagcagcaacagccgccaccgccgccgccgccgccgccgcctcctcagcttcctcagccgccgccgcaggcacagccgctgctgcctcagccgcagccgcccccgccgccgcccccgccgccacccggcccggctgtggctgaggagccgctgcaccgaccaaagaaagaactttcagctaccaagaaagaccgtgtgaatcattgtctgacaatatgtgaaaacatagtggcacagtctgtcagaaattctccagaatttcagaaacttctgggcatcgctatggaactttttctgctgtgcagtgatgacgcagagtcagatgtcaggatggtggctgacgaatgcctcaacaaagttatcaaagctttgatggattctaatcttccaaggttacagctcgagctctataaggaaattaaaaagaatggtgcccctcggagtttgcgtgctgccctgtggaggtttgctgagctggctcacctggttcggcctcagaaatgcaggccttacctggtgaaccttctgccgtgcctgactcgaacaagcaagagacccgaagaatcagtccaggagaccttggctgcagctgttcccaaaattatggcttcttttggcaattttgcaaatgacaatgaaattaaggttttgttaaaggccttcatagcgaacctgaagtcaagctcccccaccattcggcggacagcggctggatcagcagtgagcatctgccagcactcaagaaggacacaatatttctatagttggctactaaatgtgctcttaggcttactcgttcctgtcgaggatgaacactccactctgctgattcttggcgtgctgctcaccctgaggtatttggtgcccttgctgcagcagcaggtcaaggacacaagcctgaaaggcagcttcggagtgacaaggaaagaaatggaagtctctccttctgcagagcagcttgtccaggtttatgaactgacgttacatcatacacagcaccaagaccacaatgttgtgaccggagccctggagctgttgcagcagctcttcagaacgcctccacccgagcttctgcaaaccctgaccgcagtcgggggcattgggcagctcaccgctgctaaggaggagtctggtggccgaagccgtagtgggagtattgtggaacttatagctggagggggttcctcatgcagccctgtcctttcaagaaaacaaaaaggcaaagtgctcttaggagaagaagaagccttggaggatgactctgaatcgagatcggatgtcagcagctctgccttaacagcctcagtgaaggatgagatcagtggagagctggctgcttcttcaggggtttccactccagggtcagcaggtcatgacatcatcacagaacagccacggtcacagcacacactgcaggcggactcagtggatctggccagctgtgacttgacaagctctgccactgatggggatgaggaggatatcttgagccacagctccagccaggtcagcgccgtcccatctgaccctgccatggacctgaatgatgggacccaggcctcgtcgcccatcagcgacagctcccagaccaccaccgaagggcctgattcagctgttaccccttcagacagttctgaaattgtgttagacggtaccgacaaccagtatttgggcctgcagattggacagccccaggatgaagatgaggaagccacaggtattcttcctgatgaagcctcggaggccttcaggaactcttccatggcccttcaacaggcacatttattgaaaaacatgagtcactgcaggcagccttctgacagcagtgttgataaatttgtgttgagagatgaagctactgaaccgggtgatcaagaaaacaagccttgccgcatcaaaggtgacattggacagtccactgatgatgactctgcacctcttgtccattgtgtccgccttttatctgcttcgtttttgctaacagggggaaaaaatgtgctggttccggacagggatgtgagggtcagcgtgaaggccctggccctcagctgtgtgggagcagctgtggccctccacccggaatctttcttcagcaaactctataaagttcctcttgacaccacggaataccctgaggaacagtatgtctcagacatcttgaactacatcgatcatggagacccacaggttcgaggagccactgccattctctgtgggaccctcatctgctccatcctcagcaggtcccgcttccacgtgggagattggatgggcaccattagaaccctcacaggaaatacattttctttggcggattgcattcctttgctgcggaaaacactgaaggatgagtcttctgttacttgcaagttagcttgtacagctgtgaggaactgtgtcatgagtctctgcagcagcagctacagtgagttaggactgcagctgatcatcgatgtgctgactctgaggaacagttcctattggctggtgaggacagagcttctggaaacccttgcagagattgacttcaggctggtgagctttttggaggcaaaagcagaaaacttacacagaggggctcatcattatacagggcttttaaaactgcaagaacgagtgctcaataatgttgtcatccatttgcttggagatgaagaccccagggtgcgacatgttgccgcagcatcactaattaggcttgtcccaaagctgttttataaatgtgaccaaggacaagctgatccagtagtggccgtggcaagagatcaaagcagtgtttacctgaaacttctcatgcatgagacgcagcctccatctcatttctccgtcagcacaataaccagaatatatagaggctataacctactaccaagcataacagacgtcactatggaaaataacctttcaagagttattgcagcagtttctcatgaactaatcacatcaaccaccagagcactcacatttggatgctgtgaagctttgtgtcttctttccactgccttcccagtttgcatttggagtttaggttggcactgtggagtgcctccactgagtgcctcagatgagtctaggaagagctgtaccgttgggatggccacaatgattctgaccctgctctcgtcagcttggttcccattggatctctcagcccatcaagatgctttgattttggccggaaacttgcttgcagccagtgctcccaaatctctgagaagttcatgggcctctgaagaagaagccaacccagcagccaccaagcaagaggaggtctggccagccctgggggaccgggccctggtgcccatggtggagcagctcttctctcacctgctgaaggtgattaacatttgtgcccacgtcctggatgacgtggctcctggacccgcaataaaggcagccttgccttctctaacaaaccccccttctctaagtcccatccgacgaaaggggaaggagaaagaaccaggagaacaagcatctgtaccgttgagtcccaagaaaggcagtgaggccagtgcagcttctagacaatctgatacctcaggtcctgttacaacaagtaaatcctcatcactggggagtttctatcatcttccttcatacctcaaactgcatgatgtcctgaaagctacacacgctaactacaaggtcacgctggatcttcagaacagcacggaaaagtttggagggtttctccgctcagccttggatgttctttctcagatactagagctggccacactgcaggacattgggaagtgtgttgaagagatcctaggatacctgaaatcctgctttagtcgagaaccaatgatggcaactgtttgtgttcaacaattgttgaagactctctttggcacaaacttggcctcccagtttgatggcttatcttccaaccccagcaagtcacaaggccgagcacagcgccttggctcctccagtgtgaggccaggcttgtaccactactgcttcatggccccgtacacccacttcacccaggccctcgctgacgccagcctgaggaacatggtgcaggcggagcaggagaacgacacctcgggatggtttgatgtcctccagaaagtgtctacccagttgaagacaaacctcacgagtgtcacaaagaaccgtgcagataagaatgctattcataatcacattcgtttgtttgaacctcttgttataaaagctttaaaacagtacacgactacaacatgtgtgcagttacagaagcaggttttagatttgctggcgcagctggttcagttacgggttaattactgtcttctggattcagatcaggtgtttattggctttgtattgaaacagtttgaatacattgaagtgggccagttcagggaatcagaggcaatcattccaaacatctttttcttcttggtattactatcttatgaacgctatcattcaaaacagatcattggaattcctaaaatcattcagctctgtgatggcatcatggccagtggaaggaaggctgtgacacatgccataccggctctgcagcccatagtccacgacctctttgtattaagaggaacaaataaagctgatgcaggaaaagagcttgaaacccaaaaagaggtggtggtgtcaatgttactgagactcatccagtaccatcaggtaagaggaatgtatgttggaactgtcgtggatactttattgacccgtgcagatggaaggaagtgccatgtggtaacgctcactgttaactgtgttactttgaaccaggtttgggctttctggggcctgggtagattgcggtgtttgcaaaacaccagcaatctgggtgaagctttatcttcttcaaagcctttcctaatcatg

SEQ ID NO: 425340 - DNA, 2273 bp, Homo sapiens
ttgctgtgtgaggcagaacctgcgggggcaggggcgggctggttccctggccagccattggcagagtccgcaggctagggctgtcaatcatgctggccggcgtggccccgcctccgccggcgcggccccgcctccgccggcgcacgtctgggacgcaaggcgccgtgggggctgccgggacgggtccaagatggacggccgctcaggttctgcttttacctgcggcccagagccccattcattgccccggtgctgagcggcgccgcgagtcggcccgaggcctccggggactgccgtgccgggcgggagaccgccatggcgaccctggaaaagctgatgaaggccttcgagtccctcaagtccttccagcagcagcagcagcagcagcagcagcagcagcagcagcagcagcagcagcagcagcagcagcaacagccgccaccgccgccgccgccgccgccgcctcctcagcttcctcagccgccgccgcaggcacagccgctgctgcctcagccgcagccgcccccgccgccgcccccgccgccacccggcccggctgtggctgaggagccgctgcaccgaccaaagaaagaactttcagctaccaagaaagaccgtgtgaatcattgtctgacaatatgtgaaaacatagtggcacagtctgtcagaaattctccagaatttcagaaacttctgggcatcgctatggaactttttctgctgtgcagtgatgacgcagagtcagatgtcaggatggtggctgacgaatgcctcaacaaagttatcaaagctttgatggattctaatcttccaaggttacagctcgagctctataaggaaattaaaaagaatggtgcccctcggagtttgcgtgctgccctgtggaggtttgctgagctggctcacctggttcggcctcagaaatgcaggccttacctggtgaaccttctgccgtgcctgactcgaacaagcaagagacccgaagaatcagtccaggagaccttggctgcagctgttcccaaaattatggcttcttttggcaattttgcaaatgacaatgaaattaaggttttgttaaaggccttcatagcgaacctgaagtcaagctcccccaccattcggcggacagcggctggatcagcagtgagcatctgccagcactcaagaaggacacaatatttctatagttggctactaaatgtgctcttaggcttactcgttcctgtcgaggatgaacactccactctgctgattcttggcgtgctgctcaccctgaggtatttggtgcccttgctgcagcagcaggtcaaggacacaagcctgaaaggcagcttcggagtgacaaggaaagaaatggaagtctctccttctgcagagcagcttgtccaggtttatgaactgacgttacatcatacacagcaccaagaccacaatgttgtgaccggagccctggagctgttgcagcagctcttcagaacgcctccacccgagcttctgcaaaccctgaccgcagtcgggggcattgggcagctcaccgctgctaaggaggagtctggtggccgaagccgtagtgggagtattgtggaacttatagctggagggggttcctcatgcagccctgtcctttcaagaaaacaaaaaggtgattatttcagaaatcagagtcttgtgttgaatcttactgattttcttgtatttctgtaatgtaatgtatcttgtatttcttgtaatactgtattggactctgtgtatatctcttctcagatgagtgattatatgtgtgaatgttgctggaatctgataaccaggcctgaatagttttgtagggtggcttttaaaaattactttcatatcagaattgctttgtcataaattttgaacgcatcataaatttctaatgttcggggtcagcagactttttttgtaaagggacagagtgtaaacatcttagctttatgggccatatggtctcttttgcaacattcagctctgccctgtgacaggaatgcagttgtaaagacatgagctactggccagctatgttccagtagaactttacttacagaaacagacaggctgtagtttgccaatacctgccttagggaatgtgttgttatattttgtgagttaccttctcagtaaattttatttagtattagtcaggaatattattaagtagcttcttttccagcctggtcaacatagtgagacccggtctctaccaaaacaaaacaaaacaaaaaaacagccacgcatgtggcatgtgcctgtag

SEQ ID NO: 425341 - DNA, 1873 bp, Homo sapiens
ttgctgtgtgaggcagaacctgcgggggcaggggcgggctggttccctggccagccattggcagagtccgcaggctagggctgtcaatcatgctggccggcgtggccccgcctccgccggcgcggccccgcctccgccggcgcacgtctgggacgcaaggcgccgtgggggctgccgggacgggtccaagatggacggccgctcaggttctgcttttacctgcggcccagagccccattcattgccccggtgctgagcggcgccgcgagtcggcccgaggcctccggggactgccgtgccgggcgggagaccgccatggcgaccctggaaaagctgatgaaggccttcgagtccctcaagtccttccagcagcagcagcagcagcagcagcagcagcagcagcagcagcagcagcagcagcagcagcagcaacagccgccaccgccgccgccgccgccgccgcctcctcagcttcctcagccgccgccgcaggcacagccgctgctgcctcagccgcagccgcccccgccgccgcccccgccgccacccggcccggctgtggctgaggagccgctgcaccgaccaaagaaagaactttcagctaccaagaaagaccgtgtgaatcattgtctgacaatatgtgaaaacatagtggcacagtctgtcagaaattctccagaatttcagaaacttctgggcatcgctatggaactttttctgctgtgcagtgatgacgcagagtcagatgtcaggatggtggctgacgaatgcctcaacaaagttatcaaagctttgatggattctaatcttccaaggttacagctcgagctctataaggaaattaaaaagaatggtgcccctcggagtttgcgtgctgccctgtggaggtttgctgagctggctcacctggttcggcctcagaaatgcaggccttacctggtgaaccttctgccgtgcctgactcgaacaagcaagagacccgaagaatcagtccaggagaccttggctgcagctgttcccaaaattatggcttcttttggcaattttgcaaatgacaatgaaattaaggttttgttaaaggccttcatagcgaacctgaagtcaagctcccccaccattcggcggacagcggctggatcagcagtgagcatctgccagcactcaagaaggacacaatatttctatagttggctactaaatgtgctcttaggcttactcgttcctgtcgaggatgaacactccactctgctgattcttggcgtgctgctcaccctgaggtatttggtgcccttgctgcagcagcaggtcaaggacacaagcctgaaaggcagcttcggagtgacaaggaaagaaatggaagtctctccttctgcagagcagcttgtccaggtttatgaactgacgttacatcatacacagcaccaagaccacaatgttgtgaccggagccctggagctgttgcagcagctcttcagaacgcctccacccgagcttctgcaaaccctgaccgcagtcgggggcattgggcagctcaccgctgctaaggaggagtctggtggccgaagccgtagtgggagtattgtggaacttataggcaagttattagcaaggtctactcttacaattaactttgcagtaatactagttacactctattgattatgggcctgccctgtgctaagcagtctgcattccatcttccttgccaaaacttataatacaaatttcatctttattttataaataggggagttgggctgggtgtggtggctcacgcctgtaatttcagcactttggaaggatcgcttcagcccaggagtttgagacaacctggccaagtgagaccctgtctctacaaaagaaaaaaaaaaaa

SEQ ID NO: 425342 - DNA, 1093 bp, Homo sapiens
caaattggggctgaatttgagttgacagtggaccttctttatgtctactgctcatatttgaattgcaaatactgcctcttctctttcagaggctcattaccctatagctgtattattgcaaagtgcacaattacagcttgagtgtaagtcacactgcgctggcaggacggcccactgagaaagggcacgtttcctgttcgttagttttcacattgacacataatttacaatacagtaaaatgtacttttctatcaactgtagtcagtaacagcccccctcccccaaccacatcaagatatagaggagtgctgtcacttcaaacagttccctcttcctctgccacatcctgcccctccccaggtctaaccaccaatccgtgctctgtccctctgttcagcccattgcagaaggccatagaaatagaatctataggctaggtgtggtggctcatgcctgtaatcccagtattttgagaggctgaagtgggaggatgacttgaggctgggagttcaagactagcctgggctgcctagcaagaccccatctccaggcaggaggatcacttgagctcaggagttagaggttacagtgagctatgatcgtgccactgtgctccagcctaggtgacacagcaagacgttgtctctggggaaaaaagaaagaaacggaaccacgcggtgtgcagccttctgagtctggcccctttcggtgagcagtgtctaaagttctgtcgcgtgttgcccacgcgtcggtggctcgctccttgcaactgctgagcattgtatggctaggctgtagtttgttttcacttcaccagttgggaaacagagaaaaggcactttttaaaaagtttaaatctgtagaattttggtttttaccagttctcttctaaatcctgagggattacaggaaaagttgttgtatttcagaatattcttagcttgatgtgacctctgtccccgttaaggccctttgccgcaatgggaaggacgtcgctcggtcagaccctgaaggtcagaggggcagtttgggagtgtgtcaacattttaactgtatggactagagccaagagtctcaaggtttataattccc

SEQ ID NO: 425343 - DNA, 354 bp, Homo sapiens
caatggcctttttctttttaacagaaatttgaaatttcttatcagtcatttgatttgtttgaggtgcttcttgaaatgagcctctcatctcatgtacttggaaaatacccatctcgcatattccacaggaaacaccgggctggagttgacatccactcctgttcgcagtttttgcttgagttgtacagccgctggatcctgccgtccagctcagccaggaggaccccggccatcctgatcagtgaggtggtcagatccgtaagtgagccttcccattcccctcacacctgcacgtgccacacgcaccacacacgccacacaccccacacacacacaccgcccacacacatgcca

SEQ ID NO: 425344 - DNA, 214 bp, Homo sapiens
gggatgctgcactgtatcagtccctgcccactctggcccgggccctggcacagtacctggtggtggtctccaaactgcccagtcatttgcaccttcctcctgagaaagagaaggacattgtgaaattcgtggtggcaacccttgaggtaagaggcagctcgggagctcagtgttgctgtggggagggggcatggggctgacactgaagagggta

SEQ ID NO: 425345 - DNA, 631 bp, Homo sapiens
agctccccaaggacagtgatgaggcactcgtaagtgcttgctgcctagatgggtccctctccacctttgctagattctgagcattcactgagttagagctgcttctgcaaatgtgctgcttctgctaagtggctgtgacttcatgcagccttcacttggtttgtcatcagtggagatgccctgtgttgtcgaaggagataagcccagtaagcctgctgggcaccttttggtttgcaggttcagcaggcagcccatggctttccctgtgtcgcattgaagcagctggctaaaattgatgatacattaaattcctgtgacagatgatcagcttgtatttgtgtaatggtgtacagttcacaaagcttaaaaaaatgctacctgccatttcatcctcagtgaggaaggtgatacacagagagaccaagtgactgtgtccacggcgacggcgctctgcatttcactttagcggttaatgtactctacctatatttttactttatatttaccatatatcttttcatgtatacttggcgtaagtgctttatagtagtcacctaattcactgtcatcttttttgtttcttggaaggtttctattacaactggttggtattcttttagaagacattgtt

SEQ ID NO: 425346 - DNA, 419 bp, Homo sapiens
aaaatcaataaatattaattattaaaatgttttgtggtatagtttgagaatcattgcttttaactttttccatataggtttattgactttaatagcattctaaacataacatctctacattctttgtgtttaatactgtggaggtataaaaatacttatatatgatgataaactatattagagtaaattaaatattcttatgagtttcattttagagtgcatttacttaattttgaagtccttatttttagcaaactaaaaggaatgttggtacattatttactaggcaaagtgctcttaggagaagaagaagccttggaggatgactctgaatcgagatcggatgtcagcagctctgccttaacaggtagttctcactagttagccgctggtgtggaccttcactgtctgccttccac

SEQ ID NO: 425347 - DNA, 237 bp, Homo sapiens
acgctgtcacgtgcttgaagaacgccacctgagaaagggggcgagaagtggtgtccgctggtaaccagaggtgttggcttagccatctgcagggaggagggtggtctatcacaggtgagtttcatctactttcttaagcaaattaaccttacttttgtgttaggcttgtcccaaagctgttttataaatgtgaccaaggacaagctgatccagtagtggccgtggcaagagatcaaa

SEQ ID NO: 425348 - DNA, 820 bp, Homo sapiens
ggggatgtgcacagttgaaggaaataactaggtttcagaggtcagcttggtggcctgtttttgccttgcgtgcagcagaggaagtagaatctgaggatgagtttggttttcactagccgaggggagggaggaaatgatgggagcaggtaggttattgggtctggttttgttcatttgaaaacaatctgttgtttgaggctgaaggtggcttgggtgatttcttggcagtgctggttccggacagggatgtgagggtcagcgtgaaggccctggccctcagctgtgtgggagcagctgtggccctccacccggaatctttcttcagcaaactctataaagttcctcttgacaccacggaataccctggtatgttaaaagttcacatcttattttctcagatttaatcattattgtaaaaactatttcagtattgactattttagttttagagcagtaagtgttttgagttcatttgggatatttgacctgcgttgtagctcttcagaaaacacatgaatagtgaagttctttgtttcatgggttccctttagatgaaacccatagaggagaaaagtagaaacctcagcacgtaagagccaacatatatacacatcggatttaaacctaaagcacaaattgtgcctggtcgcagtggcgctgagtcgcactcagccaggccaggcattcacactcagggtgagtgggaaccaggactggctgaggcagcagtggacccaagtctccatcgcgcccatgcttactatggagccttctcgttctctctttttctttgggtgagagggtacacttgtgtttttga

SEQ ID NO: 425349 - DNA, 464 bp, Homo sapiens
tcagattttcttaatttctatgtaatgtcctttttctgttccagaattccatgcaggacaccggatacctcattacatttcattgtcatgtcaccttaggctcctcttgacagtttctcttctttttttgcttagaaattctccagaatttcagaaacttctgggcatcgctatggaactttttctgctgtgcagtgatgacgcagagtcagatgtcaggatggtggctgacgaatgcctcaacaaagttatcaaagtaagaaccgtgtggatgatgttctcctcagagctatcattgttgtaggctgagagaagaagcgatcattgagtgttcttctgttttgagtccctgaggatgtctgcacttttttcctttctgatgtatggtttggaggtgctctgttgtatggtttggaggtgctctgttgtatggtttggaggtgctctattgtatggtttggagg

SEQ ID NO: 425350 - DNA, 13654 bp, Homo sapiens
ttgctgtgtgaggcagaacctgcgggggcaggggcgggctggttccctggccagccattggcagagtccgcaggctagggctgtcaatcatgctggccggcgtggccccgcctccgccggcgcggccccgcctccgccggcgcacgtctgggacgcaaggcgccgtgggggctgccgggacgggtccaagatggacggccgctcaggttctgcttttacctgcggcccagagccccattcattgccccggtgctgagcggcgccgcgagtcggcccgaggcctccggggactgccgtgccgggcgggagaccgccatggcgaccctggaaaagctgatgaaggccttcgagtccctcaagtccttccagcagcagcagcagcagcagcagcagcagcagcagcagcagcagcagcagcagcagcagcagcaacagccgccaccgccgccgccgccgccgccgcctcctcagcttcctcagccgccgccgcaggcacagccgctgctgcctcagccgcagccgcccccgccgccgcccccgccgccacccggcccggctgtggctgaggagccgctgcaccgaccaaagaaagaactttcagctaccaagaaagaccgtgtgaatcattgtctgacaatatgtgaaaacatagtggcacagtctgtcagaaattctccagaatttcagaaacttctgggcatcgctatggaactttttctgctgtgcagtgatgacgcagagtcagatgtcaggatggtggctgacgaatgcctcaacaaagttatcaaagctttgatggattctaatcttccaaggttacagctcgagctctataaggaaattaaaaagaatggtgcccctcggagtttgcgtgctgccctgtggaggtttgctgagctggctcacctggttcggcctcagaaatgcaggccttacctggtgaaccttctgccgtgcctgactcgaacaagcaagagacccgaagaatcagtccaggagaccttggctgcagctgttcccaaaattatggcttcttttggcaattttgcaaatgacaatgaaattaaggttttgttaaaggccttcatagcgaacctgaagtcaagctcccccaccattcggcggacagcggctggatcagcagtgagcatctgccagcactcaagaaggacacaatatttctatagttggctactaaatgtgctcttaggcttactcgttcctgtcgaggatgaacactccactctgctgattcttggcgtgctgctcaccctgaggtatttggtgcccttgctgcagcagcaggtcaaggacacaagcctgaaaggcagcttcggagtgacaaggaaagaaatggaagtctctccttctgcagagcagcttgtccaggtttatgaactgacgttacatcatacacagcaccaagaccacaatgttgtgaccggagccctggagctgttgcagcagctcttcagaacgcctccacccgagcttctgcaaaccctgaccgcagtcgggggcattgggcagctcaccgctgctaaggaggagtctggtggccgaagccgtagtgggagtattgtggaacttatagctggagggggttcctcatgcagccctgtcctttcaagaaaacaaaaaggcaaagtgctcttaggagaagaagaagccttggaggatgactctgaatcgagatcggatgtcagcagctctgccttaacagcctcagtgaaggatgagatcagtggagagctggctgcttcttcaggggtttccactccagggtcagcaggtcatgacatcatcacagaacagccacggtcacagcacacactgcaggcggactcagtggatctggccagctgtgacttgacaagctctgccactgatggggatgaggaggatatcttgagccacagctccagccaggtcagcgccgtcccatctgaccctgccatggacctgaatgatgggacccaggcctcgtcgcccatcagcgacagctcccagaccaccaccgaagggcctgattcagctgttaccccttcagacagttctgaaattgtgttagacggtaccgacaaccagtatttgggcctgcagattggacagccccaggatgaagatgaggaagccacaggtattcttcctgatgaagcctcggaggccttcaggaactcttccatggcccttcaacaggcacatttattgaaaaacatgagtcactgcaggcagccttctgacagcagtgttgataaatttgtgttgagagatgaagctactgaaccgggtgatcaagaaaacaagccttgccgcatcaaaggtgacattggacagtccactgatgatgactctgcacctcttgtccattgtgtccgccttttatctgcttcgtttttgctaacagggggaaaaaatgtgctggttccggacagggatgtgagggtcagcgtgaaggccctggccctcagctgtgtgggagcagctgtggccctccacccggaatctttcttcagcaaactctataaagttcctcttgacaccacggaataccctgaggaacagtatgtctcagacatcttgaactacatcgatcatggagacccacaggttcgaggagccactgccattctctgtgggaccctcatctgctccatcctcagcaggtcccgcttccacgtgggagattggatgggcaccattagaaccctcacaggaaatacattttctttggcggattgcattcctttgctgcggaaaacactgaaggatgagtcttctgttacttgcaagttagcttgtacagctgtgaggaactgtgtcatgagtctctgcagcagcagctacagtgagttaggactgcagctgatcatcgatgtgctgactctgaggaacagttcctattggctggtgaggacagagcttctggaaacccttgcagagattgacttcaggctggtgagctttttggaggcaaaagcagaaaacttacacagaggggctcatcattatacagggcttttaaaactgcaagaacgagtgctcaataatgttgtcatccatttgcttggagatgaagaccccagggtgcgacatgttgccgcagcatcactaattaggcttgtcccaaagctgttttataaatgtgaccaaggacaagctgatccagtagtggccgtggcaagagatcaaagcagtgtttacctgaaacttctcatgcatgagacgcagcctccatctcatttctccgtcagcacaataaccagaatatatagaggctataacctactaccaagcataacagacgtcactatggaaaataacctttcaagagttattgcagcagtttctcatgaactaatcacatcaaccaccagagcactcacatttggatgctgtgaagctttgtgtcttctttccactgccttcccagtttgcatttggagtttaggttggcactgtggagtgcctccactgagtgcctcagatgagtctaggaagagctgtaccgttgggatggccacaatgattctgaccctgctctcgtcagcttggttcccattggatctctcagcccatcaagatgctttgattttggccggaaacttgcttgcagccagtgctcccaaatctctgagaagttcatgggcctctgaagaagaagccaacccagcagccaccaagcaagaggaggtctggccagccctgggggaccgggccctggtgcccatggtggagcagctcttctctcacctgctgaaggtgattaacatttgtgcccacgtcctggatgacgtggctcctggacccgcaataaaggcagccttgccttctctaacaaaccccccttctctaagtcccatccgacgaaaggggaaggagaaagaaccaggagaacaagcatctgtaccgttgagtcccaagaaaggcagtgaggccagtgcagcttctagacaatctgatacctcaggtcctgttacaacaagtaaatcctcatcactggggagtttctatcatcttccttcatacctcaaactgcatgatgtcctgaaagctacacacgctaactacaaggtcacgctggatcttcagaacagcacggaaaagtttggagggtttctccgctcagccttggatgttctttctcagatactagagctggccacactgcaggacattgggaagtgtgttgaagagatcctaggatacctgaaatcctgctttagtcgagaaccaatgatggcaactgtttgtgttcaacaattgttgaagactctctttggcacaaacttggcctcccagtttgatggcttatcttccaaccccagcaagtcacaaggccgagcacagcgccttggctcctccagtgtgaggccaggcttgtaccactactgcttcatggccccgtacacccacttcacccaggccctcgctgacgccagcctgaggaacatggtgcaggcggagcaggagaacgacacctcgggatggtttgatgtcctccagaaagtgtctacccagttgaagacaaacctcacgagtgtcacaaagaaccgtgcagataagaatgctattcataatcacattcgtttgtttgaacctcttgttataaaagctttaaaacagtacacgactacaacatgtgtgcagttacagaagcaggttttagatttgctggcgcagctggttcagttacgggttaattactgtcttctggattcagatcaggtgtttattggctttgtattgaaacagtttgaatacattgaagtgggccagttcagggaatcagaggcaatcattccaaacatctttttcttcttggtattactatcttatgaacgctatcattcaaaacagatcattggaattcctaaaatcattcagctctgtgatggcatcatggccagtggaaggaaggctgtgacacatgccataccggctctgcagcccatagtccacgacctctttgtattaagaggaacaaataaagctgatgcaggaaaagagcttgaaacccaaaaagaggtggtggtgtcaatgttactgagactcatccagtaccatcaggtgttggagatgttcattcttgtcctgcagcagtgccacaaggagaatgaagacaagtggaagcgactgtctcgacagatagctgacatcatcctcccaatgttagccaaacagcagatgcacattgactctcatgaagcccttggagtgttaaatacattatttgagattttggccccttcctccctccgtccggtagacatgcttttacggagtatgttcgtcactccaaacacaatggcgtccgtgagcactgttcaactgtggatatcgggaattctggccattttgagggttctgatttcccagtcaactgaagatattgttctttctcgtattcaggagctctccttctctccgtatttaatctcctgtacagtaattaataggttaagagatggggacagtacttcaacgctagaagaacacagtgaagggaaacaaataaagaatttgccagaagaaacattttcaaggtttctattacaactggttggtattcttttagaagacattgttacaaaacagctgaaggtggaaatgagtgagcagcaacatactttctattgccaggaactaggcacactgctaatgtgtctgatccacatcttcaagtctggaatgttccggagaatcacagcagctgccactaggctgttccgcagtgatggctgtggcggcagtttctacaccctggacagcttgaacttgcgggctcgttccatgatcaccacccacccggccctggtgctgctctggtgtcagatactgctgcttgtcaaccacaccgactaccgctggtgggcagaagtgcagcagaccccgaaaagacacagtctgtccagcacaaagttacttagtccccagatgtctggagaagaggaggattctgacttggcagccaaacttggaatgtgcaatagagaaatagtacgaagaggggctctcattctcttctgtgattatgtctgtcagaacctccatgactccgagcacttaacgtggctcattgtaaatcacattcaagatctgatcagcctttcccacgagcctccagtacaggacttcatcagtgccgttcatcggaactctgctgccagcggcctgttcatccaggcaattcagtctcgttgtgaaaacctttcaactccaaccatgctgaagaaaactcttcagtgcttggaggggatccatctcagccagtcgggagctgtgctcacgctgtatgtggacaggcttctgtgcacccctttccgtgtgctggctcgcatggtcgacatccttgcttgtcgccgggtagaaatgcttctggctgcaaatttacagagcagcatggcccagttgccaatggaagaactcaacagaatccaggaataccttcagagcagcgggctcgctcagagacaccaaaggctctattccctgctggacaggtttcgtctctccaccatgcaagactcacttagtccctctcctccagtctcttcccacccgctggacggggatgggcacgtgtcactggaaacagtgagtccggacaaagactggtacgttcatcttgtcaaatcccagtgttggaccaggtcagattctgcactgctggaaggtgcagagctggtgaatcggattcctgctgaagatatgaatgccttcatgatgaactcggagttcaacctaagcctgctagctccatgcttaagcctagggatgagtgaaatttctggtggccagaagagtgccctttttgaagcagcccgtgaggtgactctggcccgtgtgagcggcaccgtgcagcagctccctgctgtccatcatgtcttccagcccgagctgcctgcagagccggcggcctactggagcaagttgaatgatctgtttggggatgctgcactgtatcagtccctgcccactctggcccgggccctggcacagtacctggtggtggtctccaaactgcccagtcatttgcaccttcctcctgagaaagagaaggacattgtgaaattcgtggtggcaacccttgaggccctgtcctggcatttgatccatgagcagatcccgctgagtctggatctccaggcagggctggactgctgctgcctggccctgcagctgcctggcctctggagcgtggtctcctccacagagtttgtgacccacgcctgctccctcatctactgtgtgcacttcatcctggaggccgttgcagtgcagcctggagagcagcttcttagtccagaaagaaggacaaataccccaaaagccatcagcgaggaggaggaggaagtagatccaaacacacagaatcctaagtatatcactgcagcctgtgagatggtggcagaaatggtggagtctctgcagtcggtgttggccttgggtcataaaaggaatagcggcgtgccggcgtttctcacgccattgctcaggaacatcatcatcagcctggcccgcctgccccttgtcaacagctacacacgtgtgcccccactggtgtggaagcttggatggtcacccaaaccgggaggggattttggcacagcattccctgagatccccgtggagttcctccaggaaaaggaagtctttaaggagttcatctaccgcatcaacacactaggctggaccagtcgtactcagtttgaagaaacttgggccaccctccttggtgtcctggtgacgcagcccctcgtgatggagcaggaggagagcccaccagaagaagacacagagaggacccagatcaacgtcctggccgtgcaggccatcacctcactggtgctcagtgcaatgactgtgcctgtggccggcaacccagctgtaagctgcttggagcagcagccccggaacaagcctctgaaagctctcgacaccaggtttgggaggaagctgagcattatcagagggattgtggagcaagagattcaagcaatggtttcaaagagagagaatattgccacccatcatttatatcaggcatgggatcctgtcccttctctgtctccggctactacaggtgccctcatcagccacgagaagctgctgctacagatcaaccccgagcgggagctggggagcatgagctacaaactcggccaggtgtccatacactccgtgtggctggggaacagcatcacacccctgagggaggaggaatgggacgaggaagaggaggaggaggccgacgcccctgcaccttcgtcaccacccacgtctccagtcaactccaggaaacaccgggctggagttgacatccactcctgttcgcagtttttgcttgagttgtacagccgctggatcctgccgtccagctcagccaggaggaccccggccatcctgatcagtgaggtggtcagatcccttctagtggtctcagacttgttcaccgagcgcaaccagtttgagctgatgtatgtgacgctgacagaactgcgaagggtgcacccttcagaagacgagatcctcgctcagtacctggtgcctgccacctgcaaggcagctgccgtccttgggatggacaaggccgtggcggagcctgtcagccgcctgctggagagcacgctcaggagcagccacctgcccagcagggttggagccctgcacggcgtcctctatgtgctggagtgcgacctgctggacgacactgccaagcagctcatcccggtcatcagcgactatctcctctccaacctgaaagggatcgcccactgcgtgaacattcacagccagcagcacgtactggtcatgtgtgccactgcgttttacctcattgagaactatcctctggacgtagggccggaattttcagcatcaataatacagatgtgtggggtgatgctgtctggaagtgaggagtccaccccctccatcatttaccactgtgccctcagaggcctggagcgcctcctgctctctgagcagctctcccgcctggatgcagaatcgctggtcaagctgagtgtggacagagtgaacgtgcacagcccgcaccgggccatggcggctctgggcctgatgctcacctgcatgtacacaggaaaggagaaagtcagtccgggtagaacttcagaccctaatcctgcagcccccgacagcgagtcagtgattgttgctatggagcgggtatctgttctttttgataggatcaggaaaggctttccttgtgaagccagagtggtggccaggatcctgccccagtttctagacgacttcttcccaccccaggacatcatgaacaaagtcatcggagagtttctgtccaaccagcagccatacccccagttcatggccaccgtggtgtataaggtgtttcagactctgcacagcaccgggcagtcgtccatggtccgggactgggtcatgctgtccctctccaacttcacgcagagggccccggtcgccatggccacgtggagcctctcctgcttctttgtcagcgcgtccaccagcccgtgggtcgcggcgatcctcccacatgtcatcagcaggatgggcaagctggagcaggtggacgtgaaccttttctgcctggtcgccacagacttctacagacaccagatagaggaggagctcgaccgcagggccttccagtctgtgcttgaggtggttgcagccccaggaagcccatatcaccggctgctgacttgtttacgaaatgtccacaaggtcaccacctgctgagcgccatggtgggagagactgtgaggcggcagctggggccggagcctttggaagtctgcgcccttgtgccctgcctccaccgagccagcttggtccctatgggcttccgcacatgccgcgggcggccaggcaacgtgcgtgtctctgccatgtggcagaagtgctctttgtggcagtggccaggcagggagtgtctgcagtcctggtggggctgagcctgaggccttccagaaagcaggagcagctgtgctgcaccccatgtgggtgaccaggtcctttctcctgatagtcacctgctggttgttgccaggttgcagctgctcttgcatctgggccagaagtcctccctcctgcaggctggctgttggcccctctgctgtcctgcagtagaaggtgccgtgagcaggctttgggaacactggcctgggtctccctggtggggtgtgcatgccacgccccgtgtctggatgcacagatgccatggcctgtgctgggccagtggctgggggtgctagacacccggcaccattctcccttctctcttttcttctcaggatttaaaatttaattatatcagtaaagagattaattttaacgtaactctttctatgcccgtgtaaagtatgtgaatcgcaaggcctgtgctgcatgcgacagcgtccggggtggtggacagggcccccggccacgctccctctcctgtagccactggcatagccctcctgagcacccgctgacatttccgttgtacatgttcctgtttatgcattcacaaggtgactgggatgtagagaggcgttagtgggcaggtggccacagcaggactgaggacaggcccccattatcctaggggtgcgctcacctgcagcccctcctcctcgggcacagacgactgtcgttctccacccaccagtcagggacagcagcctccctgtcactcagctgagaaggccagccctccctggctgtgagcagcctccactgtgtccagagacatgggcctcccactcctgttccttgctagccctggggtggcgtctgcctaggagctggctggcaggtgttgggacctgctgctccatggatgcatgccctaagagtgtcactgagctgtgttttgtctgagcctctctcggtcaacagcaaagcttggtgtcttggcactgttagtgacagagcccagcatcccttctgcccccgttccagctgacatcttgcacggtgaccccttttagtcaggagagtgcagatctgtgctcatcggagactgccccacggccctgtcagagccgccactcctatccccaggccaggtccctggaccagcctcctgtttgcaggcccagaggagccaagtcattaaaatggaagtggattctggatggccgggctgctgctgatgtaggagctggatttgggagctctgcttgccgactggctgtgagacgaggcaggggctctgcttcctcagccctagaggcgagccaggcaaggttggcgactgtcatgtggcttggtttggtcatgcccgtcgatgttttgggtattgaatgtggtaagtggaggaaatgttggaactctgtgcaggtgctgccttgagacccccaagcttccacctgtccctctcctatgtggcagctggggagcagctgagatgtggacttgtatgctgcccacatacgtgagggggagctgaaagggagcccctcctctgagcagcctctgccaggcctgtatgaggcttttcccaccagctcccaacagaggcctcccccagccaggaccacctcgtcctcgtggcggggcagcaggagcggtagaaaggggtccgatgtttgaggaggcccttaagggaagctactgaattataacacgtaagaaaatcaccattcttccgtattggttgggggctcctgtttctcatcctagctttttcctggaaagcccgctagaaggtttgggaacgaggggaaagttctcagaactgttggctgctccccacccgcctcccgcctcccccgcaggttatgtcagcagctctgagacagcagtatcacaggccagatgttgttcctggctagatgtttacatttgtaagaaataacactgtgaatgtaaaacagagccattcccttggaatgcatatcgctgggctcaacatagagtttgtcttcctcttgtttacgacgtgatctaaaccagtccttagcaaggggctcagaacaccccgctctggcagtaggtgtcccccacccccaaagacctgcctgtgtgctccggagatgaatatgagctcattagtaaaaatgacttcacccacgcatatacataaagtatccatgcatgtgcatatagacacatctataattttacacacacacctctcaagacggagatgcatggcctctaagagtgcccgtgtcggttcttcctggaagttgactttccttagacccgccaggtcaagttagccgcgtgacggacatccaggcgtgggacgtggtcagggcagggctcattcattgcccactaggatcccactggcgaagatggtctccatatcagctctctgcagaagggaggaagactttatcatgttcctaaaaatctgtggcaagcacccatcgtattatccaaattttgttgcaaatgtgattaatttggttgtcaagttttgggggtgggctgtggggagattgcttttgttttcctgctggtaatatcgggaaagattttaatgaaaccagggtagaattgtttggcaatgcactgaagcgtgtttctttcccaaaatgtgcctcccttccgctgcgggcccagctgagtctatgtaggtgatgtttccagctgccaagtgctctttgttactgtccaccctcatttctgccagcgcatgtgtcctttcaaggggaaaatgtgaagctgaaccccctccagacacccagaatgtagcatctgagaaggccctgtgccctaaaggacacccctcgcccccatcttcatggagggggtcatttcagagccctcggagccaatgaacagctcctcctcttggagctgagatgagccccacgtggagctcgggacggatagtagacagcaataactcggtgtgtggccgcctggcaggtggaacttcctcccgttgcggggtggagtgaggttagttctgtgtgtctggtgggtggagtcaggcttctcttgctacctgtgagcatccttcccagcagacatcctcatcgggctttgtccctcccccgcttcctccctctgtggggaggacccgggaccacagctgctggccagggtagacttggagctgtcctccagaggggtcacgtgtaggagtgagaagaaggaagatcttgagagctgctgagggaccttggagagctcaggatggctcagacgaggacactcgcttgccgggcctgggcctcctgggaaggagggagctgctcagaatgccgcatgacaactgaaggcaacctggaaggttcaggggccgctcttcccccatgtgcctgtcacgctctggtgcagtcaaaggaacgccttcccctcagttgtttctaagagcagagtctcccgctgcaatctgggtggtaactgccagccttggaggatcgtggccaacgtggacctgcctacggagggtgggctctgacccaagtggggcctccttgtccaggtctcactgctttgcaccgtggtcagagggactgtcagctgagcttgagctcccctggagccagcagggctgtgatgggcgagtcccggagccccacccagacctgaatgcttctgagagcaaagggaaggactgacgagagatgtatatttaattttttaactgctgcaaacattgtacatccaaattaaaggaaaaaaatggaaaccatca

SEQ ID NO: 425351 - DNA, 13807 bp, Homo sapiens
ttgctgtgtgaggcagaacctgcgggggcaggggcgggctggttccctggccagccattggcagagtccgcaggctagggctgtcaatcatgctggccggcgtggccccgcctccgccggcgcggccccgcctccgccggcgcacgtctgggacgcaaggcgccgtgggggctgccgggacgggtccaagatggacggccgctcaggttctgcttttacctgcggcccagagccccattcattgccccggtgctgagcggcgccgcgagtcggcccgaggcctccggggactgccgtgccgggcgggagaccgccatggcgaccctggaaaagctgatgaaggccttcgagtccctcaagtccttccagcagcagcagcagcagcagcagcagcagcagcagcagcagcagcagcagcagcagcagcagcaacagccgccaccgccgccgccgccgccgccgcctcctcagcttcctcagccgccgccgcaggcacagccgctgctgcctcagccgcagccgcccccgccgccgcccccgccgccacccggcccggctgtggctgaggagccgctgcaccgaccaaagaaagaactttcagctaccaagaaagaccgtgtgaatcattgtctgacaatatgtgaaaacatagtggcacagtctgtcagaaattctccagaatttcagaaacttctgggcatcgctatggaactttttctgctgtgcagtgatgacgcagagtcagatgtcaggatggtggctgacgaatgcctcaacaaagttatcaaagctttgatggattctaatcttccaaggttacagctcgagctctataaggaaattaaaaagaatggtgcccctcggagtttgcgtgctgccctgtggaggtttgctgagctggctcacctggttcggcctcagaaatgcaggccttacctggtgaaccttctgccgtgcctgactcgaacaagcaagagacccgaagaatcagtccaggagaccttggctgcagctgttcccaaaattatggcttcttttggcaattttgcaaatgacaatgaaattaaggttttgttaaaggccttcatagcgaacctgaagtcaagctcccccaccattcggcggacagcggctggatcagcagtgagcatctgccagcactcaagaaggacacaatatttctatagttggctactaaatgtgctcttaggcttactcgttcctgtcgaggatgaacactccactctgctgattcttggcgtgctgctcaccctgaggtatttggtgcccttgctgcagcagcaggtcaaggacacaagcctgaaaggcagcttcggagtgacaaggaaagaaatggaagtctctccttctgcagagcagcttgtccaggtttatgaactgacgttacatcatacacagcaccaagaccacaatgttgtgaccggagccctggagctgttgcagcagctcttcagaacgcctccacccgagcttctgcaaaccctgaccgcagtcgggggcattgggcagctcaccgctgctaaggaggagtctggtggccgaagccgtagtgggagtattgtggaacttatagctggagggggttcctcatgcagccctgtcctttcaagaaaacaaaaaggcaaagtgctcttaggagaagaagaagccttggaggatgactctgaatcgagatcggatgtcagcagctctgccttaacagcctcagtgaaggatgagatcagtggagagctggctgcttcttcaggggtttccactccagggtcagcaggtcatgacatcatcacagaacagccacggtcacagcacacactgcaggcggactcagtggatctggccagctgtgacttgacaagctctgccactgatggggatgaggaggatatcttgagccacagctccagccaggtcagcgccgtcccatctgaccctgccatggacctgaatgatgggacccaggcctcgtcgcccatcagcgacagctcccagaccaccaccgaagggcctgattcagctgttaccccttcagacagttctgaaattgtgttagacggtaccgacaaccagtatttgggcctgcagattggacagccccaggatgaagatgaggaagccacaggtattcttcctgatgaagcctcggaggccttcaggaactcttccatggcccttcaacaggcacatttattgaaaaacatgagtcactgcaggcagccttctgacagcagtgttgataaatttgtgttgagagatgaagctactgaaccgggtgatcaagaaaacaagccttgccgcatcaaaggtgacattggacagtccactgatgatgactctgcacctcttgtccattgtgtccgccttttatctgcttcgtttttgctaacagggggaaaaaatgtgctggttccggacagggatgtgagggtcagcgtgaaggccctggccctcagctgtgtgggagcagctgtggccctccacccggaatctttcttcagcaaactctataaagttcctcttgacaccacggaataccctgaggaacagtatgtctcagacatcttgaactacatcgatcatggagacccacaggttcgaggagccactgccattctctgtgggaccctcatctgctccatcctcagcaggtcccgcttccacgtgggagattggatgggcaccattagaaccctcacaggaaatacattttctttggcggattgcattcctttgctgcggaaaacactgaaggatgagtcttctgttacttgcaagttagcttgtacagctgtgaggaactgtgtcatgagtctctgcagcagcagctacagtgagttaggactgcagctgatcatcgatgtgctgactctgaggaacagttcctattggctggtgaggacagagcttctggaaacccttgcagagattgacttcaggctggtgagctttttggaggcaaaagcagaaaacttacacagaggggctcatcattatacagggcttttaaaactgcaagaacgagtgctcaataatgttgtcatccatttgcttggagatgaagaccccagggtgcgacatgttgccgcagcatcactaattaggcttgtcccaaagctgttttataaatgtgaccaaggacaagctgatccagtagtggccgtggcaagagatcaaagcagtgtttacctgaaacttctcatgcatgagacgcagcctccatctcatttctccgtcagcacaataaccagaatatatagaggctataacctactaccaagcataacagacgtcactatggaaaataacctttcaagagttattgcagcagtttctcatgaactaatcacatcaaccaccagagcactcacatttggatgctgtgaagctttgtgtcttctttccactgccttcccagtttgcatttggagtttaggttggcactgtggagtgcctccactgagtgcctcagatgagtctaggaagagctgtaccgttgggatggccacaatgattctgaccctgctctcgtcagcttggttcccattggatctctcagcccatcaagatgctttgattttggccggaaacttgcttgcagccagtgctcccaaatctctgagaagttcatgggcctctgaagaagaagccaacccagcagccaccaagcaagaggaggtctggccagccctgggggaccgggccctggtgcccatggtggagcagctcttctctcacctgctgaaggtgattaacatttgtgcccacgtcctggatgacgtggctcctggacccgcaataaaggcagccttgccttctctaacaaaccccccttctctaagtcccatccgacgaaaggggaaggagaaagaaccaggagaacaagcatctgtaccgttgagtcccaagaaaggcagtgaggccagtgcagcttctagacaatctgatacctcaggtcctgttacaacaagtaaatcctcatcactggggagtttctatcatcttccttcatacctcaaactgcatgatgtcctgaaagctacacacgctaactacaaggtcacgctggatcttcagaacagcacggaaaagtttggagggtttctccgctcagccttggatgttctttctcagatactagagctggccacactgcaggacattgggaagtgtgttgaagagatcctaggatacctgaaatcctgctttagtcgagaaccaatgatggcaactgtttgtgttcaacaattgttgaagactctctttggcacaaacttggcctcccagtttgatggcttatcttccaaccccagcaagtcacaaggccgagcacagcgccttggctcctccagtgtgaggccaggcttgtaccactactgcttcatggccccgtacacccacttcacccaggccctcgctgacgccagcctgaggaacatggtgcaggcggagcaggagaacgacacctcgggatggtttgatgtcctccagaaagtgtctacccagttgaagacaaacctcacgagtgtcacaaagaaccgtgcagataagaatgctattcataatcacattcgtttgtttgaacctcttgttataaaagctttaaaacagtacacgactacaacatgtgtgcagttacagaagcaggttttagatttgctggcgcagctggttcagttacgggttaattactgtcttctggattcagatcaggtgtttattggctttgtattgaaacagtttgaatacattgaagtgggccagttcagggaatcagaggcaatcattccaaacatctttttcttcttggtattactatcttatgaacgctatcattcaaaacagatcattggaattcctaaaatcattcagctctgtgatggcatcatggccagtggaaggaaggctgtgacacatgccataccggctctgcagcccatagtccacgacctctttgtattaagaggaacaaataaagctgatgcaggaaaagagcttgaaacccaaaaagaggtggtggtgtcaatgttactgagactcatccagtaccatcaggtgttggagatgttcattcttgtcctgcagcagtgccacaaggagaatgaagacaagtggaagcgactgtctcgacagatagctgacatcatcctcccaatgttagccaaacagcagatgcacattgactctcatgaagcccttggagtgttaaatacattatttgagattttggccccttcctccctccgtccggtagacatgcttttacggagtatgttcgtcactccaaacacaatggcgtccgtgagcactgttcaactgtggatatcgggaattctggccattttgagggttctgatttcccagtcaactgaagatattgttctttctcgtattcaggagctctccttctctccgtatttaatctcctgtacagtaattaataggttaagagatggggacagtacttcaacgctagaagaacacagtgaagggaaacaaataaagaatttgccagaagaaacattttcaaggtttctattacaactggttggtattcttttagaagacattgttacaaaacagctgaaggtggaaatgagtgagcagcaacatactttctattgccaggaactaggcacactgctaatgtgtctgatccacatcttcaagtctggaatgttccggagaatcacagcagctgccactaggctgttccgcagtgatggctgtggcggcagtttctacaccctggacagcttgaacttgcgggctcgttccatgatcaccacccacccggccctggtgctgctctggtgtcagatactgctgcttgtcaaccacaccgactaccgctggtgggcagaagtgcagcagaccccgaaaagacacagtctgtccagcacaaagttacttagtccccagatgtctggagaagaggaggattctgacttggcagccaaacttggaatgtgcaatagagaaatagtacgaagaggggctctcattctcttctgtgattatgtctgtcagaacctccatgactccgagcacttaacgtggctcattgtaaatcacattcaagatctgatcagcctttcccacgagcctccagtacaggacttcatcagtgccgttcatcggaactctgctgccagcggcctgttcatccaggcaattcagtctcgttgtgaaaacctttcaactccaaccatgctgaagaaaactcttcagtgcttggaggggatccatctcagccagtcgggagctgtgctcacgctgtatgtggacaggcttctgtgcacccctttccgtgtgctggctcgcatggtcgacatccttgcttgtcgccgggtagaaatgcttctggctgcaaatttacagagcagcatggcccagttgccaatggaagaactcaacagaatccaggaataccttcagagcagcgggctcgctcagagacaccaaaggctctattccctgctggacaggtttcgtctctccaccatgcaagactcacttagtccctctcctccagtctcttcccacccgctggacggggatgggcacgtgtcactggaaacagtgagtccggacaaagactggtacgttcatcttgtcaaatcccagtgttggaccaggtcagattctgcactgctggaaggtgcagagctggtgaatcggattcctgctgaagatatgaatgccttcatgatgaactcggagttcaacctaagcctgctagctccatgcttaagcctagggatgagtgaaatttctggtggccagaagagtgccctttttgaagcagcccgtgaggtgactctggcccgtgtgagcggcaccgtgcagcagctccctgctgtccatcatgtcttccagcccgagctgcctgcagagccggcggcctactggagcaagttgaatgatctgtttggggatgctgcactgtatcagtccctgcccactctggcccgggccctggcacagtacctggtggtggtctccaaactgcccagtcatttgcaccttcctcctgagaaagagaaggacattgtgaaattcgtggtggcaacccttgaggccctgtcctggcatttgatccatgagcagatcccgctgagtctggatctccaggcagggctggactgctgctgcctggccctgcagctgcctggcctctggagcgtggtctcctccacagagtttgtgacccacgcctgctccctcatctactgtgtgcacttcatcctggaggccgttgcagtgcagcctggagagcagcttcttagtccagaaagaaggacaaataccccaaaagccatcagcgaggaggaggaggaagtagatccaaacacacagaatcctaagtatatcactgcagcctgtgagatggtggcagaaatggtggagtctctgcagtcggtgttggccttgggtcataaaaggaatagcggcgtgccggcgtttctcacgccattgctcaggaacatcatcatcagcctggcccgcctgccccttgtcaacagctacacacgtgtgcccccactggtgtggaagcttggatggtcacccaaaccgggaggggattttggcacagcattccctgagatccccgtggagttcctccaggaaaaggaagtctttaaggagttcatctaccgcatcaacacactaggctggaccagtcgtactcagtttgaagaaacttgggccaccctccttggtgtcctggtgacgcagcccctcgtgatggagcaggaggagagcccaccagaagaagacacagagaggacccagatcaacgtcctggccgtgcaggccatcacctcactggtgctcagtgcaatgactgtgcctgtggccggcaacccagctgtaagctgcttggagcagcagccccggaacaagcctctgaaagctctcgacaccaggtttgggaggaagctgagcattatcagagggattgtggagcaagagattcaagcaatggtttcaaagagagagaatattgccacccatcatttatatcaggcatgggatcctgtcccttctctgtctccggctactacaggtgccctcatcagccacgagaagctgctgctacagatcaaccccgagcgggagctggggagcatgagctacaaactcggccaggtgtccatacactccgtgtggctggggaacagcatcacacccctgagggaggaggaatgggacgaggaagaggaggaggaggccgacgcccctgcaccttcgtcaccacccacgtctccagtcaactccaggaaacaccgggctggagttgacatccactcctgttcgcagtttttgcttgagttgtacagccgctggatcctgccgtccagctcagccaggaggaccccggccatcctgatcagtgaggtggtcagatcccttctagtggtctcagacttgttcaccgagcgcaaccagtttgagctgatgtatgtgacgctgacagaactgcgaagggtgcacccttcagaagacgagatcctcgctcagtacctggtgcctgccacctgcaaggcagctgccgtccttgggatggacaaggccgtggcggagcctgtcagccgcctgctggagagcacgctcaggagcagccacctgcccagcagggttggagccctgcacggcgtcctctatgtgctggagtgcgacctgctggacgacactgccaagcagctcatcccggtcatcagcgactatctcctctccaacctgaaagggatcgcccactgcgtgaacattcacagccagcagcacgtactggtcatgtgtgccactgcgttttacctcattgagaactatcctctggacgtagggccggaattttcagcatcaataatacagatgtgtggggtgatgctgtctggaagtgaggagtccaccccctccatcatttaccactgtgccctcagaggcctggagcgcctcctgctctctgagcagctctcccgcctggatgcagaatcgctggtcaagctgagtgtggacagagtgaacgtgcacagcccgcaccgggccatggcggctctgggcctgatgctcacctgcatgtacacaggaaaggagaaagtcagtccgggtagaacttcagaccctaatcctgcagcccccgacagcgagtcagtgattgttgctatggagcgggtatctgttctttttgataggatcaggaaaggctttccttgtgaagccagagtggtggccaggatcctgccccagtttctagacgacttcttcccaccccaggacatcatgaacaaagtcatcggagagtttctgtccaaccagcagccatacccccagttcatggccaccgtggtgtataaggtgtttcagactctgcacagcaccgggcagtcgtccatggtccgggactgggtcatgctgtccctctccaacttcacgcagagggccccggtcgccatggccacgtggagcctctcctgcttctttgtcagcgcgtccaccagcccgtgggtcgcggcgatcctcccacatgtcatcagcaggatgggcaagctggagcaggtggacgtgaaccttttctgcctggtcgccacagacttctacagacaccagatagaggaggagctcgaccgcagggccttccagtctgtgcttgaggtggttgcagccccaggaagcccatatcaccggctgctgacttgtttacgaaatgtccacaaggtcaccacctgctgagcgccatggtgggagagactgtgaggcggcagctggggccggagcctttggaagtctgcgcccttgtgccctgcctccaccgagccagcttggtccctatgggcttccgcacatgccgcgggcggccaggcaacgtgcgtgtctctgccatgtggcagaagtgctctttgtggcagtggccaggcagggagtgtctgcagtcctggtggggctgagcctgaggccttccagaaagcaggagcagctgtgctgcaccccatgtgggtgaccaggtcctttctcctgatagtcacctgctggttgttgccaggttgcagctgctcttgcatctgggccagaagtcctccctcctgcaggctggctgttggcccctctgctgtcctgcagtagaaggtgccgtgagcaggctttgggaacactggcctgggtctccctggtggggtgtgcatgccacgccccgtgtctggatgcacagatgccatggcctgtgctgggccagtggctgggggtgctagacacccggcaccattctcccttctctcttttcttctcaggatttaaaatttaattatatcagtaaagagattaattttaacgtaactctttctatgcccgtgtaaagtatgtgaatcgcaaggcctgtgctgcatgcgacagcgtccggggtggtggacagggcccccggccacgctccctctcctgtagccactggcatagccctcctgagcacccgctgacatttccgttgtacatgttcctgtttatgcattcacaaggtgactgggatgtagagaggcgttagtgggcaggtggccacagcaggactgaggacaggcccccattatcctaggggtgcgctcacctgcagcccctcctcctcgggcacagacgactgtcgttctccacccaccagtcagggacagcagcctccctgtcactcagctgagaaggccagccctccctggctgtgagcagcctccactgtgtccagagacatgggcctcccactcctgttccttgctagccctggggtggcgtctgcctaggagctggctggcaggtgttgggacctgctgctccatggatgcatgccctaagagtgtcactgagctgtgttttgtctgagcctctctcggtcaacagcaaagcttggtgtcttggcactgttagtgacagagcccagcatcccttctgcccccgttccagctgacatcttgcacggtgaccccttttagtcaggagagtgcagatctgtgctcatcggagactgccccacggccctgtcagagccgccactcctatccccaggccaggtccctggaccagcctcctgtttgcaggcccagaggagccaagtcattaaaatggaagtggattctggatggccgggctgctgctgatgtaggagctggatttgggagctctgcttgccgactggctgtgagacgaggcaggggctctgcttcctcagccctagaggcgagccaggcaaggttggcgactgtcatgtggcttggtttggtcatgcccgtcgatgttttgggtattgaatgtggtaagtggaggaaatgttggaactctgtgcaggtgctgccttgagacccccaagcttccacctgtccctctcctatgtggcagctggggagcagctgagatgtggacttgtatgctgcccacatacgtgagggggagctgaaagggagcccctcctctgagcagcctctgccaggcctgtatgaggcttttcccaccagctcccaacagaggcctcccccagccaggaccacctcgtcctcgtggcggggcagcaggagcggtagaaaggggtccgatgtttgaggaggcccttaagggaagctactgaattataacacgtaagaaaatcaccattcttccgtattggttgggggctcctgtttctcatcctagctttttcctggaaagcccgctagaaggtttgggaacgaggggaaagttctcagaactgttggctgctccccacccgcctcccgcctcccccgcaggttatgtcagcagctctgagacagcagtatcacaggccagatgttgttcctggctagatgtttacatttgtaagaaataacactgtgaatgtaaaacagagccattcccttggaatgcatatcgctgggctcaacatagagtttgtcttcctcttgtttacgacgtgatctaaaccagtccttagcaaggggctcagaacaccccgctctggcagtaggtgtcccccacccccaaagacctgcctgtgtgctccggagatgaatatgagctcattagtaaaaatgacttcacccacgcatatacataaagtatccatgcatgtgcatatagacacatctataattttacacacacacctctcaagacggagatgcatggcctctaagagtgcccgtgtcggttcttcctggaagttgactttccttagacccgccaggtcaagttagccgcgtgacggacatccaggcgtgggacgtggtcagggcagggctcattcattgcccactaggatcccactggcgaagatggtctccatatcagctctctgcagaagggaggaagactttatcatgttcctaaaaatctgtggcaagcacccatcgtattatccaaattttgttgcaaatgtgattaatttggttgtcaagttttgggggtgggctgtggggagattgcttttgttttcctgctggtaatatcgggaaagattttaatgaaaccagggtagaattgtttggcaatgcactgaagcgtgtttctttcccaaaatgtgcctcccttccgctgcgggcccagctgagtctatgtaggtgatgtttccagctgccaagtgctctttgttactgtccaccctcatttctgccagcgcatgtgtcctttcaaggggaaaatgtgaagctgaaccccctccagacacccagaatgtagcatctgagaaggccctgtgccctaaaggacacccctcgcccccatcttcatggagggggtcatttcagagccctcggagccaatgaacagctcctcctcttggagctgagatgagccccacgtggagctcgggacggatagtagacagcaataactcggtgtgtggccgcctggcaggtggaacttcctcccgttgcggggtggagtgaggttagttctgtgtgtctggtgggtggagtcaggcttctcttgctacctgtgagcatccttcccagcagacatcctcatcgggctttgtccctcccccgcttcctccctctgtggggaggacccgggaccacagctgctggccagggtagacttggagctgtcctccagaggggtcacgtgtaggagtgagaagaaggaagatcttgagagctgctgagggaccttggagagctcaggatggctcagacgaggacactcgcttgccgggcctgggcctcctgggaaggagggagctgctcagaatgccgcatgacaactgaaggcaacctggaaggttcaggggccgctcttcccccatgtgcctgtcacgctctggtgcagtcaaaggaacgccttcccctcagttgtttctaagagcagagtctcccgctgcaatctgggtggtaactgccagccttggaggatcgtggccaacgtggacctgcctacggagggtgggctctgacccaagtggggcctccttgtccaggtctcactgctttgcaccgtggtcagagggactgtcagctgagcttgagctcccctggagccagcagggctgtgatgggcgagtcccggagccccacccagacctgaatgcttctgagagcaaagggaaggactgacgagagatgtatatttaattttttaactgctgcaaacattgtacatccaaattaaaggaaaaaaatggaaaccatcaaaaaaaaaaggggggctaaaaatcccgagggcaagtacacggacccgttttgaaagggccaagagggaaaaaagggggggttaaaacgaggaaacggtggctgggaccctctggcatggaccaaaccggaaaagttggctctggttaagcaga

SEQ ID NO: 425352 - DNA, 8466 bp, Homo sapiens
caaattggggctgaatttgagttgacagtggaccttctttatgtctactgctcatatttgaattgcaaatactgcctcttctctttcagaggctcattaccctatagctgtattattgcaaagtgcacaattacagcttgagtgtaagtcacactgcgctggcaggacggcccactgagaaagggcacgtttcctgttcgttagttttcacattgacacataatttacaatacagtaaaatgtacttttctatcaactgtagtcagtaacagcccccctcccccaaccacatcaagatatagaggagtgctgtcacttcaaacagttccctcttcctctgccacatcctgcccctccccaggtctaaccaccaatccgtgctctgtccctctgttcagcccattgcagaaggccatagaaatagaatctataggctaggtgtggtggctcatgcctgtaatcccagtattttgagaggctgaagtgggaggatgacttgaggctgggagttcaagactagcctgggctgcctagcaagaccccatctccaggcaggaggatcacttgagctcaggagttagaggttacagtgagctatgatcgtgccactgtgctccagcctaggtgacacagcaagacgttgtctctggggaaaaaagaaagaaacggaaccacgcggtgtgcagccttctgagtctggcccctttcgaagacacagtctgtccagcacaaagttacttagtccccagatgtctggagaagaggaggattctgacttggcagccaaacttggaatgtgcaatagagaaatagtacgaagaggggctctcattctcttctgtgattatgtctgtcagaacctccatgactccgagcacttaacgtggctcattgtaaatcacattcaagatctgatcagcctttcccacgagcctccagtacaggacttcatcagtgccgttcatcggaactctgctgccagcggcctgttcatccaggcaattcagtctcgttgtgaaaacctttcaactccaaccatgctgaagaaaactcttcagtgcttggaggggatccatctcagccagtcgggagctgtgctcacgctgtatgtggacaggcttctgtgcacccctttccgtgtgctggctcgcatggtcgacatccttgcttgtcgccgggtagaaatgcttctggctgcaaatttacagagcagcatggcccagttgccaatggaagaactcaacagaatccaggaataccttcagagcagcgggctcgctcagagacaccaaaggctctattccctgctggacaggtttcgtctctccaccatgcaagactcacttagtccctctcctccagtctcttcccacccgctggacggggatgggcacgtgtcactggaaacagtgagtccggacaaagactggtacgttcatcttgtcaaatcccagtgttggaccaggtcagattctgcactgctggaaggtgcagagctggtgaatcggattcctgctgaagatatgaatgccttcatgatgaactcggagttcaacctaagcctgctagctccatgcttaagcctagggatgagtgaaatttctggtggccagaagagtgccctttttgaagcagcccgtgaggtgactctggcccgtgtgagcggcaccgtgcagcagctccctgctgtccatcatgtcttccagcccgagctgcctgcagagccggcggcctactggagcaagttgaatgatctgtttggggatgctgcactgtatcagtccctgcccactctggcccgggccctggcacagtacctggtggtggtctccaaactgcccagtcatttgcaccttcctcctgagaaagagaaggacattgtgaaattcgtggtggcaacccttgaggccctgtcctggcatttgatccatgagcagatcccgctgagtctggatctccaggcagggctggactgctgctgcctggccctgcagctgcctggcctctggagcgtggtctcctccacagagtttgtgacccacgcctgctccctcatctactgtgtgcacttcatcctggaggccgttgcagtgcagcctggagagcagcttcttagtccagaaagaaggacaaataccccaaaagccatcagcgaggaggaggaggaagtagatccaaacacacagaatcctaagtatatcactgcagcctgtgagatggtggcagaaatggtggagtctctgcagtcggtgttggccttgggtcataaaaggaatagcggcgtgccggcgtttctcacgccattgctcaggaacatcatcatcagcctggcccgcctgccccttgtcaacagctacacacgtgtgcccccactggtgtggaagcttggatggtcacccaaaccgggaggggattttggcacagcattccctgagatccccgtggagttcctccaggaaaaggaagtctttaaggagttcatctaccgcatcaacacactaggctggaccagtcgtactcagtttgaagaaacttgggccaccctccttggtgtcctggtgacgcagcccctcgtgatggagcaggaggagagcccaccagaagaagacacagagaggacccagatcaacgtcctggccgtgcaggccatcacctcactggtgctcagtgcaatgactgtgcctgtggccggcaacccagctgtaagctgcttggagcagcagccccggaacaagcctctgaaagctctcgacaccaggtttgggaggaagctgagcattatcagagggattgtggagcaagagattcaagcaatggtttcaaagagagagaatattgccacccatcatttatatcaggcatgggatcctgtcccttctctgtctccggctactacaggtgccctcatcagccacgagaagctgctgctacagatcaaccccgagcgggagctggggagcatgagctacaaactcggccaggtgtccatacactccgtgtggctggggaacagcatcacacccctgagggaggaggaatgggacgaggaagaggaggaggaggccgacgcccctgcaccttcgtcaccacccacgtctccagtcaactccaggaaacaccgggctggagttgacatccactcctgttcgcagtttttgcttgagttgtacagccgctggatcctgccgtccagctcagccaggaggaccccggccatcctgatcagtgaggtggtcagatcccttctagtggtctcagacttgttcaccgagcgcaaccagtttgagctgatgtatgtgacgctgacagaactgcgaagggtgcacccttcagaagacgagatcctcgctcagtacctggtgcctgccacctgcaaggcagctgccgtccttgggatggacaaggccgtggcggagcctgtcagccgcctgctggagagcacgctcaggagcagccacctgcccagcagggttggagccctgcacggcgtcctctatgtgctggagtgcgacctgctggacgacactgccaagcagctcatcccggtcatcagcgactatctcctctccaacctgaaagggatcgcccactgcgtgaacattcacagccagcagcacgtactggtcatgtgtgccactgcgttttacctcattgagaactatcctctggacgtagggccggaattttcagcatcaataatacagatgtgtggggtgatgctgtctggaagtgaggagtccaccccctccatcatttaccactgtgccctcagaggcctggagcgcctcctgctctctgagcagctctcccgcctggatgcagaatcgctggtcaagctgagtgtggacagagtgaacgtgcacagcccgcaccgggccatggcggctctgggcctgatgctcacctgcatgtacacaggaaaggagaaagtcagtccgggtagaacttcagaccctaatcctgcagcccccgacagcgagtcagtgattgttgctatggagcgggtatctgttctttttgataggatcaggaaaggctttccttgtgaagccagagtggtggccaggatcctgccccagtttctagacgacttcttcccaccccaggacatcatgaacaaagtcatcggagagtttctgtccaaccagcagccatacccccagttcatggccaccgtggtgtataaggtgtttcagactctgcacagcaccgggcagtcgtccatggtccgggactgggtcatgctgtccctctccaacttcacgcagagggccccggtcgccatggccacgtggagcctctcctgcttctttgtcagcgcgtccaccagcccgtgggtcgcggcgatcctcccacatgtcatcagcaggatgggcaagctggagcaggtggacgtgaaccttttctgcctggtcgccacagacttctacagacaccagatagaggaggagctcgaccgcagggccttccagtctgtgcttgaggtggttgcagccccaggaagcccatatcaccggctgctgacttgtttacgaaatgtccacaaggtcaccacctgctgagcgccatggtgggagagactgtgaggcggcagctggggccggagcctttggaagtctgcgcccttgtgccctgcctccaccgagccagcttggtccctatgggcttccgcacatgccgcgggcggccaggcaacgtgcgtgtctctgccatgtggcagaagtgctctttgtggcagtggccaggcagggagtgtctgcagtcctggtggggctgagcctgaggccttccagaaagcaggagcagctgtgctgcaccccatgtgggtgaccaggtcctttctcctgatagtcacctgctggttgttgccaggttgcagctgctcttgcatctgggccagaagtcctccctcctgcaggctggctgttggcccctctgctgtcctgcagtagaaggtgccgtgagcaggctttgggaacactggcctgggtctccctggtggggtgtgcatgccacgccccgtgtctggatgcacagatgccatggcctgtgctgggccagtggctgggggtgctagacacccggcaccattctcccttctctcttttcttctcaggatttaaaatttaattatatcagtaaagagattaattttaacgtaactctttctatgcccgtgtaaagtatgtgaatcgcaaggcctgtgctgcatgcgacagcgtccggggtggtggacagggcccccggccacgctccctctcctgtagccactggcatagccctcctgagcacccgctgacatttccgttgtacatgttcctgtttatgcattcacaaggtgactgggatgtagagaggcgttagtgggcaggtggccacagcaggactgaggacaggcccccattatcctaggggtgcgctcacctgcagcccctcctcctcgggcacagacgactgtcgttctccacccaccagtcagggacagcagcctccctgtcactcagctgagaaggccagccctccctggctgtgagcagcctccactgtgtccagagacatgggcctcccactcctgttccttgctagccctggggtggcgtctgcctaggagctggctggcaggtgttgggacctgctgctccatggatgcatgccctaagagtgtcactgagctgtgttttgtctgagcctctctcggtcaacagcaaagcttggtgtcttggcactgttagtgacagagcccagcatcccttctgcccccgttccagctgacatcttgcacggtgaccccttttagtcaggagagtgcagatctgtgctcatcggagactgccccacggccctgtcagagccgccactcctatccccaggccaggtccctggaccagcctcctgtttgcaggcccagaggagccaagtcattaaaatggaagtggattctggatggccgggctgctgctgatgtaggagctggatttgggagctctgcttgccgactggctgtgagacgaggcaggggctctgcttcctcagccctagaggcgagccaggcaaggttggcgactgtcatgtggcttggtttggtcatgcccgtcgatgttttgggtattgaatgtggtaagtggaggaaatgttggaactctgtgcaggtgctgccttgagacccccaagcttccacctgtccctctcctatgtggcagctggggagcagctgagatgtggacttgtatgctgcccacatacgtgagggggagctgaaagggagcccctcctctgagcagcctctgccaggcctgtatgaggcttttcccaccagctcccaacagaggcctcccccagccaggaccacctcgtcctcgtggcggggcagcaggagcggtagaaaggggtccgatgtttgaggaggcccttaagggaagctactgaattataacacgtaagaaaatcaccattcttccgtattggttgggggctcctgtttctcatcctagctttttcctggaaagcccgctagaaggtttgggaacgaggggaaagttctcagaactgttggctgctccccacccgcctcccgcctcccccgcaggttatgtcagcagctctgagacagcagtatcacaggccagatgttgttcctggctagatgtttacatttgtaagaaataacactgtgaatgtaaaacagagccattcccttggaatgcatatcgctgggctcaacatagagtttgtcttcctcttgtttacgacgtgatctaaaccagtccttagcaaggggctcagaacaccccgctctggcagtaggtgtcccccacccccaaagacctgcctgtgtgctccggagatgaatatgagctcattagtaaaaatgacttcacccacgcatatacataaagtatccatgcatgtgcatatagacacatctataattttacacacacacctctcaagacggagatgcatggcctctaagagtgcccgtgtcggttcttcctggaagttgactttccttagacccgccaggtcaagttagccgcgtgacggacatccaggcgtgggacgtggtcagggcagggctcattcattgcccactaggatcccactggcgaagatggtctccatatcagctctctgcagaagggaggaagactttatcatgttcctaaaaatctgtggcaagcacccatcgtattatccaaattttgttgcaaatgtgattaatttggttgtcaagttttgggggtgggctgtggggagattgcttttgttttcctgctggtaatatcgggaaagattttaatgaaaccagggtagaattgtttggcaatgcactgaagcgtgtttctttcccaaaatgtgcctcccttccgctgcgggcccagctgagtctatgtaggtgatgtttccagctgccaagtgctctttgttactgtccaccctcatttctgccagcgcatgtgtcctttcaaggggaaaatgtgaagctgaaccccctccagacacccagaatgtagcatctgagaaggccctgtgccctaaaggacacccctcgcccccatcttcatggagggggtcatttcagagccctcggagccaatgaacagctcctcctcttggagctgagatgagccccacgtggagctcgggacggatagtagacagcaataactcggtgtgtggccgcctggcaggtggaacttcctcccgttgcggggtggagtgaggttagttctgtgtgtctggtgggtggagtcaggcttctcttgctacctgtgagcatccttcccagcagacatcctcatcgggctttgtccctcccccgcttcctccctctgtggggaggacccgggaccacagctgctggccagggtagacttggagctgtcctccagaggggtcacgtgtaggagtgagaagaaggaagatcttgagagctgctgagggaccttggagagctcaggatggctcagacgaggacactcgcttgccgggcctgggcctcctgggaaggagggagctgctcagaatgccgcatgacaactgaaggcaacctggaaggttcaggggccgctcttcccccatgtgcctgtcacgctctggtgcagtcaaaggaacgccttcccctcagttgtttctaagagcagagtctcccgctgcaatctgggtggtaactgccagccttggaggatcgtggccaacgtggacctgcctacggagggtgggctctgacccaagtggggcctccttgtccaggtctcactgctttgcaccgtggtcagagggactgtcagctgagcttgagctcccctggagccagcagggctgtgatgggcgagtcccggagccccacccagacctgaatgcttctgagagcaaagggaaggactgacgagagatgtatatttaattttttaactgctgcaaacattgtacatccaaattaaaggaaaaaaatggaaaccatca

SEQ ID NO: 425353 - DNA, 5725 bp, Homo sapiens
ttttttctaaaatgtaggtttgggaggaagctgagcattatcagagggattgtggagcaagagattcaagcaatggtttcaaagagagagaatattgccacccatcatttatatcaggcatgggatcctgtcccttctctgtctccggctactacaggtgccctcatcagccacgagaagctgctgctacagatcaaccccgagcgggagctggggagcatgagctacaaactcggccaggtgtccatacactccgtgtggctggggaacagcatcacacccctgagggaggaggaatgggacgaggaagaggaggaggaggccgacgcccctgcaccttcgtcaccacccacgtctccagtcaactccaggaaacaccgggctggagttgacatccactcctgttcgcagtttttgcttgagttgtacagccgctggatcctgccgtccagctcagccaggaggaccccggccatcctgatcagtgaggtggtcagatcccttctagtggtctcagacttgttcaccgagcgcaaccagtttgagctgatgtatgtgacgctgacagaactgcgaagggtgcacccttcagaagacgagatcctcgctcagtacctggtgcctgccacctgcaaggcagctgccgtccttgggatggacaaggccgtggcggagcctgtcagccgcctgctggagagcacgctcaggagcagccacctgcccagcagggttggagccctgcacggcgtcctctatgtgctggagtgcgacctgctggacgacactgccaagcagctcatcccggtcatcagcgactatctcctctccaacctgaaagggatcgcccactgcgtgaacattcacagccagcagcacgtactggtcatgtgtgccactgcgttttacctcattgagaactatcctctggacgtagggccggaattttcagcatcaataatacagatgtgtggggtgatgctgtctggaagtgaggagtccaccccctccatcatttaccactgtgccctcagaggcctggagcgcctcctgctctctgagcagctctcccgcctggatgcagaatcgctggtcaagctgagtgtggacagagtgaacgtgcacagcccgcaccgggccatggcggctctgggcctgatgctcacctgcatgtacacaggaaaggagaaagtcagtccgggtagaacttcagaccctaatcctgcagcccccgacagcgagtcagtgattgttgctatggagcgggtatctgttctttttgataggatcaggaaaggctttccttgtgaagccagagtggtggccaggatcctgccccagtttctagacgacttcttcccaccccaggacatcatgaacaaagtcatcggagagtttctgtccaaccagcagccatacccccagttcatggccaccgtggtgtataaggtgtttcagactctgcacagcaccgggcagtcgtccatggtccgggactgggtcatgctgtccctctccaacttcacgcagagggccccggtcgccatggccacgtggagcctctcctgcttctttgtcagcgcgtccaccagcccgtgggtcgcggcgatcctcccacatgtcatcagcaggatgggcaagctggagcaggtggacgtgaaccttttctgcctggtcgccacagacttctacagacaccagatagaggaggagctcgaccgcagggccttccagtctgtgcttgaggtggttgcagccccaggaagcccatatcaccggctgctgacttgtttacgaaatgtccacaaggtcaccacctgctgagcgccatggtgggagagactgtgaggcggcagctggggccggagcctttggaagtctgcgcccttgtgccctgcctccaccgagccagcttggtccctatgggcttccgcacatgccgcgggcggccaggcaacgtgcgtgtctctgccatgtggcagaagtgctctttgtggcagtggccaggcagggagtgtctgcagtcctggtggggctgagcctgaggccttccagaaagcaggagcagctgtgctgcaccccatgtgggtgaccaggtcctttctcctgatagtcacctgctggttgttgccaggttgcagctgctcttgcatctgggccagaagtcctccctcctgcaggctggctgttggcccctctgctgtcctgcagtagaaggtgccgtgagcaggctttgggaacactggcctgggtctccctggtggggtgtgcatgccacgccccgtgtctggatgcacagatgccatggcctgtgctgggccagtggctgggggtgctagacacccggcaccattctcccttctctcttttcttctcaggatttaaaatttaattatatcagtaaagagattaattttaacgtaactctttctatgcccgtgtaaagtatgtgaatcgcaaggcctgtgctgcatgcgacagcgtccggggtggtggacagggcccccggccacgctccctctcctgtagccactggcatagccctcctgagcacccgctgacatttccgttgtacatgttcctgtttatgcattcacaaggtgactgggatgtagagaggcgttagtgggcaggtggccacagcaggactgaggacaggcccccattatcctaggggtgcgctcacctgcagcccctcctcctcgggcacagacgactgtcgttctccacccaccagtcagggacagcagcctccctgtcactcagctgagaaggccagccctccctggctgtgagcagcctccactgtgtccagagacatgggcctcccactcctgttccttgctagccctggggtggcgtctgcctaggagctggctggcaggtgttgggacctgctgctccatggatgcatgccctaagagtgtcactgagctgtgttttgtctgagcctctctcggtcaacagcaaagcttggtgtcttggcactgttagtgacagagcccagcatcccttctgcccccgttccagctgacatcttgcacggtgaccccttttagtcaggagagtgcagatctgtgctcatcggagactgccccacggccctgtcagagccgccactcctatccccaggccaggtccctggaccagcctcctgtttgcaggcccagaggagccaagtcattaaaatggaagtggattctggatggccgggctgctgctgatgtaggagctggatttgggagctctgcttgccgactggctgtgagacgaggcaggggctctgcttcctcagccctagaggcgagccaggcaaggttggcgactgtcatgtggcttggtttggtcatgcccgtcgatgttttgggtattgaatgtggtaagtggaggaaatgttggaactctgtgcaggtgctgccttgagacccccaagcttccacctgtccctctcctatgtggcagctggggagcagctgagatgtggacttgtatgctgcccacatacgtgagggggagctgaaagggagcccctcctctgagcagcctctgccaggcctgtatgaggcttttcccaccagctcccaacagaggcctcccccagccaggaccacctcgtcctcgtggcggggcagcaggagcggtagaaaggggtccgatgtttgaggaggcccttaagggaagctactgaattataacacgtaagaaaatcaccattcttccgtattggttgggggctcctgtttctcatcctagctttttcctggaaagcccgctagaaggtttgggaacgaggggaaagttctcagaactgttggctgctccccacccgcctcccgcctcccccgcaggttatgtcagcagctctgagacagcagtatcacaggccagatgttgttcctggctagatgtttacatttgtaagaaataacactgtgaatgtaaaacagagccattcccttggaatgcatatcgctgggctcaacatagagtttgtcttcctcttgtttacgacgtgatctaaaccagtccttagcaaggggctcagaacaccccgctctggcagtaggtgtcccccacccccaaagacctgcctgtgtgctccggagatgaatatgagctcattagtaaaaatgacttcacccacgcatatacataaagtatccatgcatgtgcatatagacacatctataattttacacacacacctctcaagacggagatgcatggcctctaagagtgcccgtgtcggttcttcctggaagttgactttccttagacccgccaggtcaagttagccgcgtgacggacatccaggcgtgggacgtggtcagggcagggctcattcattgcccactaggatcccactggcgaagatggtctccatatcagctctctgcagaagggaggaagactttatcatgttcctaaaaatctgtggcaagcacccatcgtattatccaaattttgttgcaaatgtgattaatttggttgtcaagttttgggggtgggctgtggggagattgcttttgttttcctgctggtaatatcgggaaagattttaatgaaaccagggtagaattgtttggcaatgcactgaagcgtgtttctttcccaaaatgtgcctcccttccgctgcgggcccagctgagtctatgtaggtgatgtttccagctgccaagtgctctttgttactgtccaccctcatttctgccagcgcatgtgtcctttcaaggggaaaatgtgaagctgaaccccctccagacacccagaatgtagcatctgagaaggccctgtgccctaaaggacacccctcgcccccatcttcatggagggggtcatttcagagccctcggagccaatgaacagctcctcctcttggagctgagatgagccccacgtggagctcgggacggatagtagacagcaataactcggtgtgtggccgcctggcaggtggaacttcctcccgttgcggggtggagtgaggttagttctgtgtgtctggtgggtggagtcaggcttctcttgctacctgtgagcatccttcccagcagacatcctcatcgggctttgtccctcccccgcttcctccctctgtggggaggacccgggaccacagctgctggccagggtagacttggagctgtcctccagaggggtcacgtgtaggagtgagaagaaggaagatcttgagagctgctgagggaccttggagagctcaggatggctcagacgaggacactcgcttgccgggcctgggcctcctgggaaggagggagctgctcagaatgccgcatgacaactgaaggcaacctggaaggttcaggggccgctcttcccccatgtgcctgtcacgctctggtgcagtcaaaggaacgccttcccctcagttgtttctaagagcagagtctcccgctgcaatctgggtggtaactgccagccttggaggatcgtggccaacgtggacctgcctacggagggtgggctctgacccaagtggggcctccttgtccaggtctcactgctttgcaccgtggtcagagggactgtcagctgagcttgagctcccctggagccagcagggctgtgatgggcgagtcccggagccccacccagacctgaatgcttctgagagcaaagggaaggactgacgagagatgtatatttaattttttaactgctgcaaacattgtacatccaaattaaaggaaaaaaatggaaaccatca

SEQ ID NO: 425354 - DNA, 9135 bp, Homo sapiens
ttgctgtgtgaggcagaacctgcgggggcaggggcgggctggttccctggccagccattggcagagtccgcaggctagggctgtcaatcatgctggccggcgtggccccgcctccgccggcgcggccccgcctccgccggcgcacgtctgggacgcaaggcgccgtgggggctgccgggacgggtccaagatggacggccgctcaggttctgcttttacctgcggcccagagccccattcattgccccggtgctgagcggcgccgcgagtcggcccgaggcctccggggactgccgtgccgggcgggagaccgccatggcgaccctggaaaagctgatgaaggccttcgagtccctcaagtccttccagcagcagcagcagcagcagcagcagcagcagcagcagcagcagcagcagcagcagcagcagcaacagccgccaccgccgccgccgccgccgccgcctcctcagcttcctcagccgccgccgcaggcacagccgctgctgcctcagccgcagccgcccccgccgccgcccccgccgccacccggcccggctgtggctgaggagccgctgcaccgaccaaagaaagaactttcagctaccaagaaagaccgtgtgaatcattgtctgacaatatgtgaaaacatagtggcacagtctgtcagaaattctccagaatttcagaaacttctgggcatcgctatggaactttttctgctgtgcagtgatgacgcagagtcagatgtcaggatggtggctgacgaatgcctcaacaaagttatcaaagctttgatggattctaatcttccaaggttacagctcgagctctataaggaaattaaaaagaatggtgcccctcggagtttgcgtgctgccctgtggaggtttgctgagctggctcacctggttcggcctcagaaatgcaggccttacctggtgaaccttctgccgtgcctgactcgaacaagcaagagacccgaagaatcagtccaggagaccttggctgcagctgttcccaaaattatggcttcttttggcaattttgcaaatgacaatgaaattaaggttttgttaaaggccttcatagcgaacctgaagtcaagctcccccaccattcggcggacagcggctggatcagcagtgagcatctgccagcactcaagaaggacacaatatttctatagttggctactaaatgtgctcttaggcttactcgttcctgtcgaggatgaacactccactctgctgattcttggcgtgctgctcaccctgaggtatttggtgcccttgctgcagcagcaggtcaaggacacaagcctgaaaggcagcttcggagtgacaaggaaagaaatggaagtctctccttctgcagagcagcttgtccaggtttatgaactgacgttacatcatacacagcaccaagaccacaatgttgtgaccggagccctggagctgttgcagcagctcttcagaacgcctccacccgagcttctgcaaaccctgaccgcagtcgggggcattgggcagctcaccgctgctaaggaggagtctggtggccgaagccgtagtgggagtattgtggaacttatagctggagggggttcctcatgcagccctgtcctttcaagaaaacaaaaaggcaaagtgctcttaggagaagaagaagccttggaggatgactctgaatcgagatcggatgtcagcagctctgccttaacagcctcagtgaaggatgagatcagtggagagctggctgcttcttcaggggtttccactccagggtcagcaggtcatgacatcatcacagaacagccacggtcacagcacacactgcaggcggactcagtggatctggccagctgtgacttgacaagctctgccactgatggggatgaggaggatatcttgagccacagctccagccaggtcagcgccgtcccatctgaccctgccatggacctgaatgatgggacccaggcctcgtcgcccatcagcgacagctcccagaccaccaccgaagggcctgattcagctgttaccccttcagacagttctgaaattgtgttagacggtaccgacaaccagtatttgggcctgcagattggacagccccaggatgaagatgaggaagccacaggtattcttcctgatgaagcctcggaggccttcaggaactcttccatggcccttcaacaggcacatttattgaaaaacatgagtcactgcaggcagccttctgacagcagtgttgataaatttgtgttgagagatgaagctactgaaccgggtgatcaagaaaacaagccttgccgcatcaaaggtgacattggacagtccactgatgatgactctgcacctcttgtccattgtgtccgccttttatctgcttcgtttttgctaacagggggaaaaaatgtgctggttccggacagggatgtgagggtcagcgtgaaggccctggccctcagctgtgtgggagcagctgtggccctccacccggaatctttcttcagcaaactctataaagttcctcttgacaccacggaataccctgaggaacagtatgtctcagacatcttgaactacatcgatcatggagacccacaggttcgaggagccactgccattctctgtgggaccctcatctgctccatcctcagcaggtcccgcttccacgtgggagattggatgggcaccattagaaccctcacaggaaatacattttctttggcggattgcattcctttgctgcggaaaacactgaaggatgagtcttctgttacttgcaagttagcttgtacagctgtgaggaactgtgtcatgagtctctgcagcagcagctacagtgagttaggactgcagctgatcatcgatgtgctgactctgaggaacagttcctattggctggtgaggacagagcttctggaaacccttgcagagattgacttcaggctggtgagctttttggaggcaaaagcagaaaacttacacagaggggctcatcattatacagggcttttaaaactgcaagaacgagtgctcaataatgttgtcatccatttgcttggagatgaagaccccagggtgcgacatgttgccgcagcatcactaattaggcttgtcccaaagctgttttataaatgtgaccaaggacaagctgatccagtagtggccgtggcaagagatcaaagcagtgtttacctgaaacttctcatgcatgagacgcagcctccatctcatttctccgtcagcacaataaccagaatatatagaggctataacctactaccaagcataacagacgtcactatggaaaataacctttcaagagttattgcagcagtttctcatgaactaatcacatcaaccaccagagcactcacatttggatgctgtgaagctttgtgtcttctttccactgccttcccagtttgcatttggagtttaggttggcactgtggagtgcctccactgagtgcctcagatgagtctaggaagagctgtaccgttgggatggccacaatgattctgaccctgctctcgtcagcttggttcccattggatctctcagcccatcaagatgctttgattttggccggaaacttgcttgcagccagtgctcccaaatctctgagaagttcatgggcctctgaagaagaagccaacccagcagccaccaagcaagaggaggtctggccagccctgggggaccgggccctggtgcccatggtggagcagctcttctctcacctgctgaaggtgattaacatttgtgcccacgtcctggatgacgtggctcctggacccgcaataaaggcagccttgccttctctaacaaaccccccttctctaagtcccatccgacgaaaggggaaggagaaagaaccaggagaacaagcatctgtaccgttgagtcccaagaaaggcagtgaggccagtgcagcttctagacaatctgatacctcaggtcctgttacaacaagtaaatcctcatcactggggagtttctatcatcttccttcatacctcaaactgcatgatgtcctgaaagctacacacgctaactacaaggtcacgctggatcttcagaacagcacggaaaagtttggagggtttctccgctcagccttggatgttctttctcagatactagagctggccacactgcaggacattgggaagtgtgttgaagagatcctaggatacctgaaatcctgctttagtcgagaaccaatgatggcaactgtttgtgttcaacaattgttgaagactctctttggcacaaacttggcctcccagtttgatggcttatcttccaaccccagcaagtcacaaggccgagcacagcgccttggctcctccagtgtgaggccaggcttgtaccactactgcttcatggccccgtacacccacttcacccaggccctcgctgacgccagcctgaggaacatggtgcaggcggagcaggagaacgacacctcgggatggtttgatgtcctccagaaagtgtctacccagttgaagacaaacctcacgagtgtcacaaagaaccgtgcagataagaatgctattcataatcacattcgtttgtttgaacctcttgttataaaagctttaaaacagtacacgactacaacatgtgtgcagttacagaagcaggttttagatttgctggcgcagctggttcagttacgggttaattactgtcttctggattcagatcaggtgtttattggctttgtattgaaacagtttgaatacattgaagtgggccagttcagggaatcagaggcaatcattccaaacatctttttcttcttggtattactatcttatgaacgctatcattcaaaacagatcattggaattcctaaaatcattcagctctgtgatggcatcatggccagtggaaggaaggctgtgacacatgccataccggctctgcagcccatagtccacgacctctttgtattaagaggaacaaataaagctgatgcaggaaaagagcttgaaacccaaaaagaggtggtggtgtcaatgttactgagactcatccagtaccatcaggtgttggagatgttcattcttgtcctgcagcagtgccacaaggagaatgaagacaagtggaagcgactgtctcgacagatagctgacatcatcctcccaatgttagccaaacagcagatgcacattgactctcatgaagcccttggagtgttaaatacattatttgagattttggccccttcctccctccgtccggtagacatgcttttacggagtatgttcgtcactccaaacacaatggcgtccgtgagcactgttcaactgtggatatcgggaattctggccattttgagggttctgatttcccagtcaactgaagatattgttctttctcgtattcaggagctctccttctctccgtatttaatctcctgtacagtaattaataggttaagagatggggacagtacttcaacgctagaagaacacagtgaagggaaacaaataaagaatttgccagaagaaacattttcaaggtttctattacaactggttggtattcttttagaagacattgttacaaaacagctgaaggtggaaatgagtgagcagcaacatactttctattgccaggaactaggcacactgctaatgtgtctgatccacatcttcaagtctggaatgttccggagaatcacagcagctgccactaggctgttccgcagtgatggctgtggcggcagtttctacaccctggacagcttgaacttgcgggctcgttccatgatcaccacccacccggccctggtgctgctctggtgtcagatactgctgcttgtcaaccacaccgactaccgctggtgggcagaagtgcagcagaccccgaaaagacacagtctgtccagcacaaagttacttagtccccagatgtctggagaagaggaggattctgacttggcagccaaacttggaatgtgcaatagagaaatagtacgaagaggggctctcattctcttctgtgattatgtctgtcagaacctccatgactccgagcacttaacgtggctcattgtaaatcacattcaagatctgatcagcctttcccacgagcctccagtacaggacttcatcagtgccgttcatcggaactctgctgccagcggcctgttcatccaggcaattcagtctcgttgtgaaaacctttcaactccaaccatgctgaagaaaactcttcagtgcttggaggggatccatctcagccagtcgggagctgtgctcacgctgtatgtggacaggcttctgtgcacccctttccgtgtgctggctcgcatggtcgacatccttgcttgtcgccgggtagaaatgcttctggctgcaaatttacagagcagcatggcccagttgccaatggaagaactcaacagaatccaggaataccttcagagcagcgggctcgctcagagacaccaaaggctctattccctgctggacaggtttcgtctctccaccatgcaagactcacttagtccctctcctccagtctcttcccacccgctggacggggatgggcacgtgtcactggaaacagtgagtccggacaaagactggtacgttcatcttgtcaaatcccagtgttggaccaggtcagattctgcactgctggaaggtgcagagctggtgaatcggattcctgctgaagatatgaatgccttcatgatgaactcggagttcaacctaagcctgctagctccatgcttaagcctagggatgagtgaaatttctggtggccagaagagtgccctttttgaagcagcccgtgaggtgactctggcccgtgtgagcggcaccgtgcagcagctccctgctgtccatcatgtcttccagcccgagctgcctgcagagccggcggcctactggagcaagttgaatgatctgtttggggatgctgcactgtatcagtccctgcccactctggcccgggccctggcacagtacctggtggtggtctccaaactgcccagtcatttgcaccttcctcctgagaaagagaaggacattgtgaaattcgtggtggcaacccttgaggccctgtcctggcatttgatccatgagcagatcccgctgagtctggatctccaggcagggctggactgctgctgcctggccctgcagctgcctggcctctggagcgtggtctcctccacagagtttgtgacccacgcctgctccctcatctactgtgtgcacttcatcctggaggccgttgcagtgcagcctggagagcagcttcttagtccagaaagaaggacaaataccccaaaagccatcagcgaggaggaggaggaagtagatccaaacacacagaatcctaagtatatcactgcagcctgtgagatggtggcagaaatggtggagtctctgcagtcggtgttggccttgggtcataaaaggaatagcggcgtgccggcgtttctcacgccattgctcaggaacatcatcatcagcctggcccgcctgccccttgtcaacagctacacacgtgtgcccccactggtgtggaagcttggatggtcacccaaaccgggaggggattttggcacagcattccctgagatccccgtggagttcctccaggaaaaggaagtctttaaggagttcatctaccgcatcaacacactaggctggaccagtcgtactcagtttgaagaaacttgggccaccctccttggtgtcctggtgacgcagcccctcgtgatggagcaggaggagagcccaccagaagaagacacagagaggacccagatcaacgtcctggccgtgcaggccatcacctcactggtgctcagtgcaatgactgtgcctgtggccggcaacccagctgtaagctgcttggagcagcagccccggaacaagcctctgaaagctctcgacaccaggtttgggaggaagctgagcattatcagagggattgtggagcaagagattcaagcaatggtttcaaagagagagaatattgccacccatcatttatatcaggcatgggatcctgtcccttctctgtctccggctactacaggtgccctcatcagccacgagaagctgctgctacagatcaaccccgagcgggagctggggagcatgagctacaaactcggccaggtgtccatacactccgtgtggctggggaacagcatcacacccctgagggaggaggaatgggacgaggaagaggaggaggaggccgacgcccctgcaccttcgtcaccacccacgtctccagtcaactccaggaaacaccgggctggagttgacatccactcctgttcgcagtttttgcttgagttgtacagccgctggatcctgccgtccagctcagccaggaggaccccggccatcctgatcagtgaggtggtcagatcccttctagtggtctcagacttgttcaccgagcgcaaccagtttgagctgatgtatgtgacgctgacagaactgcgaagggtgcacccttcagaagacgagatcctcgctcagtacctggtgcctgccacctgcaaggcagctgccgtccttgggatggacaaggccgtggcggagcctgtcagccgcctgctggagagcacgctcaggagcagccacctgcccagcagggttggagccctgcacggcgtcctctatgtgctggagtgcgacctgctggacgacactgccaagcagctcatcccggtcatcagcgactatctcctctccaacctgaaagggatcgcccactgcgtgaacattcacagccagcagcacgtactggtcatgtgtgccactgcgttttacctcattgagaactatcctctggacgtagggccggaattttcagcatcaataatacagatgtgtggggtgatgctgtctggaagtgaggagttatatgccactccagctggcacacaactcagatgccgcacacagcacacgacactcacagaccctccacacagcacacaactcaggtgccgcacacagcacatgacactcacacagacgctccacacggcacacaactcagacgccacacacagcacacaacactcatacacagcacacagcacatgactcacacagatgccactccag

SEQ ID NO: 425355 - DNA, 4588 bp, Homo sapiens
ttgctgtgtgaggcagaacctgcgggggcaggggcgggctggttccctggccagccattggcagagtccgcaggctagggctgtcaatcatgctggccggcgtggccccgcctccgccggcgcggccccgcctccgccggcgcacgtctgggacgcaaggcgccgtgggggctgccgggacgggtccaagatggacggccgctcaggttctgcttttacctgcggcccagagccccattcattgccccggtgctgagcggcgccgcgagtcggcccgaggcctccggggactgccgtgccgggcgggagaccgccatggcgaccctggaaaagctgatgaaggccttcgagtccctcaagtccttccagcagcagcagcagcagcagcagcagcagcagcagcagcagcagcagcagcagcagcagcagcaacagccgccaccgccgccgccgccgccgccgcctcctcagcttcctcagccgccgccgcaggcacagccgctgctgcctcagccgcagccgcccccgccgccgcccccgccgccacccggcccggctgtggctgaggagccgctgcaccgaccaaagaaagaactttcagctaccaagaaagaccgtgtgaatcattgtctgacaatatgtgaaaacatagtggcacagtctgtcagaaattctccagaatttcagaaacttctgggcatcgctatggaactttttctgctgtgcagtgatgacgcagagtcagatgtcaggatggtggctgacgaatgcctcaacaaagttatcaaagctttgatggattctaatcttccaaggttacagctcgagctctataaggaaattaaaaagaatggtgcccctcggagtttgcgtgctgccctgtggaggtttgctgagctggctcacctggttcggcctcagaaatgcaggccttacctggtgaaccttctgccgtgcctgactcgaacaagcaagagacccgaagaatcagtccaggagaccttggctgcagctgttcccaaaattatggcttcttttggcaattttgcaaatgacaatgaaattaaggttttgttaaaggccttcatagcgaacctgaagtcaagctcccccaccattcggcggacagcggctggatcagcagtgagcatctgccagcactcaagaaggacacaatatttctatagttggctactaaatgtgctcttaggcttactcgttcctgtcgaggatgaacactccactctgctgattcttggcgtgctgctcaccctgaggtatttggtgcccttgctgcagcagcaggtcaaggacacaagcctgaaaggcagcttcggagtgacaaggaaagaaatggaagtctctccttctgcagagcagcttgtccaggtttatgaactgacgttacatcatacacagcaccaagaccacaatgttgtgaccggagccctggagctgttgcagcagctcttcagaacgcctccacccgagcttctgcaaaccctgaccgcagtcgggggcattgggcagctcaccgctgctaaggaggagtctggtggccgaagccgtagtgggagtattgtggaacttatagctggagggggttcctcatgcagccctgtcctttcaagaaaacaaaaaggcaaagtgctcttaggagaagaagaagccttggaggatgactctgaatcgagatcggatgtcagcagctctgccttaacagcctcagtgaaggatgagatcagtggagagctggctgcttcttcaggggtttccactccagggtcagcaggtcatgacatcatcacagaacagccacggtcacagcacacactgcaggcggactcagtggatctggccagctgtgacttgacaagctctgccactgatggggatgaggaggatatcttgagccacagctccagccaggtcagcgccgtcccatctgaccctgccatggacctgaatgatgggacccaggcctcgtcgcccatcagcgacagctcccagaccaccaccgaagggcctgattcagctgttaccccttcagacagttctgaaattgtgttagacggtaccgacaaccagtatttgggcctgcagattggacagccccaggatgaagatgaggaagccacaggtattcttcctgatgaagcctcggaggccttcaggaactcttccatggcccttcaacaggcacatttattgaaaaacatgagtcactgcaggcagccttctgacagcagtgttgataaatttgtgttgagagatgaagctactgaaccgggtgatcaagaaaacaagccttgccgcatcaaaggtgacattggacagtccactgatgatgactctgcacctcttgtccattgtgtccgccttttatctgcttcgtttttgctaacagggggaaaaaatgtgctggttccggacagggatgtgagggtcagcgtgaaggccctggccctcagctgtgtgggagcagctgtggccctccacccggaatctttcttcagcaaactctataaagttcctcttgacaccacggaataccctgaggaacagtatgtctcagacatcttgaactacatcgatcatggagacccacaggttcgaggagccactgccattctctgtgggaccctcatctgctccatcctcagcaggtcccgcttccacgtgggagattggatgggcaccattagaaccctcacaggaaatacattttctttggcggattgcattcctttgctgcggaaaacactgaaggatgagtcttctgttacttgcaagttagcttgtacagctgtgaggaactgtgtcatgagtctctgcagcagcagctacagtgagttaggactgcagctgatcatcgatgtgctgactctgaggaacagttcctattggctggtgaggacagagcttctggaaacccttgcagagattgacttcaggctggtgagctttttggaggcaaaagcagaaaacttacacagaggggctcatcattatacagggcttttaaaactgcaagaacgagtgctcaataatgttgtcatccatttgcttggagatgaagaccccagggtgcgacatgttgccgcagcatcactaattaggcttgtcccaaagctgttttataaatgtgaccaaggacaagctgatccagtagtggccgtggcaagagatcaaagcagtgtttacctgaaacttctcatgcatgagacgcagcctccatctcatttctccgtcagcacaataaccagaatatatagaggctataacctactaccaagcataacagacgtcactatggaaaataacctttcaagagttattgcagcagtttctcatgaactaatcacatcaaccaccagagcactcacatttggatgctgtgaagctttgtgtcttctttccactgccttcccagtttgcatttggagtttaggttggcactgtggagtgcctccactgagtgcctcagatgagtctaggaagagctgtaccgttgggatggccacaatgattctgaccctgctctcgtcagcttggttcccattggatctctcagcccatcaagatgctttgattttggccggaaacttgcttgcagccagtgctcccaaatctctgagaagttcatgggcctctgaagaagaagccaacccagcagccaccaagcaagaggaggtctggccagccctgggggaccgggccctggtgcccatggtggagcagctcttctctcacctgctgaaggtgattaacatttgtgcccacgtcctggatgacgtggctcctggacccgcaataaaggcagccttgccttctctaacaaaccccccttctctaagtcccatccgacgaaaggggaaggagaaagaaccaggagaacaagcatctgtaccgttgagtcccaagaaaggcagtgaggccagtgcagcttctagacaatctgatacctcaggtcctgttacaacaagtaaatcctcatcactggggagtttctatcatcttccttcatacctcaaactgcatgatgtcctgaaagctacacacgctaactacaaggtcacgctggatcttcagaacagcacggaaaagtttggagggtttctccgctcagccttggatgttctttctcagatactagagctggccacactgcaggacattgggaagtgtgttgaagagatcctaggatacctgaaatcctgctttagtcgagaaccaatgatggcaactgtttgtgttcaacaattgttgaagactctctttggcacaaacttggcctcccagtttgatggcttatcttccaaccccagcaagtcacaaggccgagcacagcgccttggctcctccagtgtgaggccaggcttgtaccactactgcttcatggccccgtacacccacttcacccaggccctcgctgacgccagcctgaggaacatggtgcaggcggagcaggagaacgacacctcggggtaacagttgtggcaagaatgctgtcgttggtggaagcacgaaagagcaagcaggaaatactttgtaaaagaataaaaacgaaaaatgttagcgaaaaaat

SEQ ID NO: 425356 - DNA, 3084 bp, Homo sapiens
ttgctgtgtgaggcagaacctgcgggggcaggggcgggctggttccctggccagccattggcagagtccgcaggctagggctgtcaatcatgctggccggcgtggccccgcctccgccggcgcggccccgcctccgccggcgcacgtctgggacgcaaggcgccgtgggggctgccgggacgggtccaagatggacggccgctcaggttctgcttttacctgcggcccagagccccattcattgccccggtgctgagcggcgccgcgagtcggcccgaggcctccggggactgccgtgccgggcgggagaccgccatggcgaccctggaaaagctgatgaaggccttcgagtccctcaagtccttccagcagcagcagcagcagcagcagcagcagcagcagcagcagcagcagcagcagcagcagcagcaacagccgccaccgccgccgccgccgccgccgcctcctcagcttcctcagccgccgccgcaggcacagccgctgctgcctcagccgcagccgcccccgccgccgcccccgccgccacccggcccggctgtggctgaggagccgctgcaccgaccaaagaaagaactttcagctaccaagaaagaccgtgtgaatcattgtctgacaatatgtgaaaacatagtggcacagtctgtcagaaattctccagaatttcagaaacttctgggcatcgctatggaactttttctgctgtgcagtgatgacgcagagtcagatgtcaggatggtggctgacgaatgcctcaacaaagttatcaaagctttgatggattctaatcttccaaggttacagctcgagctctataaggaaattaaaaagaatggtgcccctcggagtttgcgtgctgccctgtggaggtttgctgagctggctcacctggttcggcctcagaaatgcaggccttacctggtgaaccttctgccgtgcctgactcgaacaagcaagagacccgaagaatcagtccaggagaccttggctgcagctgttcccaaaattatggcttcttttggcaattttgcaaatgacaatgaaattaaggttttgttaaaggccttcatagcgaacctgaagtcaagctcccccaccattcggcggacagcggctggatcagcagtgagcatctgccagcactcaagaaggacacaatatttctatagttggctactaaatgtgctcttaggcttactcgttcctgtcgaggatgaacactccactctgctgattcttggcgtgctgctcaccctgaggtatttggtgcccttgctgcagcagcaggtcaaggacacaagcctgaaaggcagcttcggagtgacaaggaaagaaatggaagtctctccttctgcagagcagcttgtccaggtttatgaactgacgttacatcatacacagcaccaagaccacaatgttgtgaccggagccctggagctgttgcagcagctcttcagaacgcctccacccgagcttctgcaaaccctgaccgcagtcgggggcattgggcagctcaccgctgctaaggaggagtctggtggccgaagccgtagtgggagtattgtggaacttatagctggagggggttcctcatgcagccctgtcctttcaagaaaacaaaaaggcaaagtgctcttaggagaagaagaagccttggaggatgactctgaatcgagatcggatgtcagcagctctgccttaacagcctcagtgaaggatgagatcagtggagagctggctgcttcttcaggggtttccactccagggtcagcaggtcatgacatcatcacagaacagccacggtcacagcacacactgcaggcggactcagtggatctggccagctgtgacttgacaagctctgccactgatggggatgaggaggatatcttgagccacagctccagccaggtcagcgccgtcccatctgaccctgccatggacctgaatgatgggacccaggcctcgtcgcccatcagcgacagctcccagaccaccaccgaagggcctgattcagctgttaccccttcagacagttctgaaattgtgttagacggtaccgacaaccagtatttgggcctgcagattggacagccccaggatgaagatgaggaagccacaggtattcttcctgatgaagcctcggaggccttcaggaactcttccatggcccttcaacaggcacatttattgaaaaacatgagtcactgcaggcagccttctgacagcagtgttgataaatttgtgttgagagatgaagctactgaaccgggtgatcaagaaaacaagccttgccgcatcaaaggtgacattggacagtccactgatgatgactctgcacctcttgtccattgtgtccgccttttatctgcttcgtttttgctaacagggggaaaaaatgtgctggttccggacagggatgtgagggtcagcgtgaaggccctggccctcagctgtgtgggagcagctgtggccctccacccggaatctttcttcagcaaactctataaagttcctcttgacaccacggaataccctgaggaacagtatgtctcagacatcttgaactacatcgatcatggagacccacaggttcgaggagccactgccattctctgtgggaccctcatctgctccatcctcagcaggtcccgcttccacgtgggagattggatgggcaccattagaaccctcacaggaaatacattttctttggcggattgcattcctttgctgcggaaaacactgaaggatgagtcttctgttacttgcaagttagcttgtacagctgtgagggtgagcataatcttctgtggaaccatttcttcacttagtggacattttatcattgctacaattaaaattggagcttaataggaaatatttccatgcactctaaagctgtaaccagtaatacccaccatgtatccatctctcagctttagaaagaaaacgttgccagtaaagttaatgcttcataaacttcagtttaagttctaattctcagaatatttgtttgaaatagacctcttcctaaaggatatatttagaaataacctatcatta

SEQ ID NO: 425357 - DNA, 431 bp, Homo sapiens
gtacgtcttcatcctgccgactattgccagttgcagttttccctgccttaaaaatggagtattgaaatttttaactttaatttctgatttgcaaaatagtcatcttttgttcttttccttcttgctgttagccaaccatgctgaagaaaactcttcagtgcttggaggggatccatctcagccagtcgggagctgtgctcacgctgtatgtggacaggcttctgtgcacccctttccgtgtgctggctcgcatggtcgacatccttgcttgtcgccgggtagaaatgcttctggctgcaaatttacaggtattgggaagagaaaccctgatattgatttatattgaaaatttagcaggccaagcaaaacaggtggctggctttttcctccgtaagtatggtcttgacatggtcaccgatagaaacatggaa

SEQ ID NO: 425358 - DNA, 2951 bp, Homo sapiens
atctaagaaatcactgccaaatccaatgttgttaaaagtttcccttatgtttctcctaaatgttttagttttagctcttagtttaggcctttgatctattttaatttttatatatggtgtgaggtagatctagcttcatgtggatgtccacttgtctagcaccatttgttgaaaagactgtcctttctcccttgaatggtcttggcaccatcaaaaatcatttgacccatatgtgcaagggtttatttggggatttgctattctgttccattggtctacatgactgtctttgtttcaatacaacaccattttgattattgtagctttgtcgtaagttatgaaataaggaagtgagagacctcctacttggttccctttcaagatgattttggctgtgtgaggtctcttgagattccatatgagtttcaggatggaaaaaaaaaagccactgggatattctgatagagattgcatgaaatctatagattgctttggactatggacatcttaaggtatccaatccataaacacgggattgctttctatttatttgtgttgaccttactttctttaagcagtgttttatggttttcaagtacaagtcttttgcttccttaagtttattcctaaatatttcagtttttttgttactattataatggaattttcttaaatttccttttgagattgcttgttattgtatagaaatatcatggatttgttgtgttgattttgtaaactgcagtgttactgaaatttttttttgtatatgtatggacactaggattttctacatataagatcatgtcatctgcaaacagataattttgcttcttcctttccagtctggatgccttttatttctttttcttgcctaactgctctaagactccagtactgtgttaaacagaagtggtgagacagggtatttctgtgttgttcttgatcttaaagtcctttcagtcttattgaatatgatgtttacagtgggatgttcatatggcctctattttaggttgtttccttctattcccaattgttgagtttttatcatgaaagggcatgacattgtctcaaatgctttttctccatcaatggagatcacatttttttccttcattctattaatgtaatagacattacatttattgacttgagcatgttgaaacatctttgcataccagctgtaaatcttacttggccatgatgtgtaatcctttcaatgtcccactgaatcctgttggccagtattttgttgaatattgatttaaaaaaatcttgatcaggaatactgatgtgtggtgtttttttcttatagtgtctttgtctggttttggtatcagaataatgatggcctcatagaatgcatttggaagtgtcctttcctcttcagttttttggaagagtttgaggagaattgatttaattcttcagatgtttgccagaattcccatatgaccctgggcttttctttcttgggaggcttttctttactacttcatgctcttgactagcataggtctgttcagattttccatttcttcatgattcaatcttgataggctgtgtgtttctaagaatttgtccagttcatctaggttatccaattctttgatatgtaattgctcatagtactcttaatcctttttatttctgtaaaatcggttgtaatgtctcctcctggtttttagttgtttttcttagtcactcttagctatcaacaaactcttggtttcatttatttttctctattgcttttctgttctctattttgtctctgctctaatctttattattattataatcatctccattctgctggctttgggttgattgctcttctttttctagttctttcagatgtaaattttgggttgacttgagatcttaatttgtttaataggtgtatttacagttacaaatttccctcctaccactgctttgactgtacctgtttttttgtatattacgtttaagttttcatttaccacaagatattttctaatttcccttgtgagttccccattaatctgctggttgagagcgttgtttaattttcacataattgtgtacttttcagttttttgtctgttactgatttctagtttcatcccactgtggccagaaaagatattttatttcctcagtcttttgaaatttgttgacttgtttagtcatctaacatactgtctatcctagagaaaggtccatttgcacttgagaaaaacgtgtgtactgctgttgtgtctgttaggtccagctggtatgatgctgttcaagttctgtcttgcgactgatcttctgtctggttgtcctatccgttactgaaagtgggctactgcagtctcctactcttactgtagaactatccatttcttcctttgattctgtcaatgtttgtttcatatattttgggctctgatgtttggtgcatatatattacatcttggtgaattttcaaactttttaaatttcaacatgaagatgaaattataggatgtctgggatttcctttgaatccgtggggctgggagtaactataaatgaaacaagattggccgggaatttgaggctgcaaggataggtacacacaggggagtgaagcagggcttggagcagatggtaaagattgttggcttttccagccatggggctctcttgccacttggcagtagtggcatgaagccgccaccagggggccacgcaccagtgcatgtggctgtgttccaaactttttggacaataaaatctgaatttcacatacttttcttatgtcattagatattacccttttacatcttttcactatttaaaaatgtaaaaatcattcttaacatttgggctgtgcaaaaacagctggtgggcccaattttggcctgtatttcacttgccaacccgatttatacttttgtatctatttgacattttccattaaaagttatataacacta

SEQ ID NO: 425359 - DNA, 2897 bp, Homo sapiens
atctaagaaatcactgccaaatccaatgttgttaaaagtttcccttatgtttctcctaaatgttttagttttagctcttagtttaggcctttgatctattttaatttttatatatggtgtgaggtagatctagcttcatgtggatgtccacttgtctagcaccatttgttgaaaagactgtcctttctcccttgaatggtcttggcaccatcaaaaatcatttgacccatatgtgcaagggtttatttggggatttgctattctgttccattggtctacatgactgtctttgtttcaatacaacaccattttgattattgtagctttgtcgtaagttatgaaataaggaagtgagagacctcctacttggttccctttcaagatgattttggctgtgtgaggtctcttgagattccatatgagtttcaggatggaaaaaaaaaagccactgggatattctgatagagattgcatgaaatctatagattgctttggactatggacatcttaaggtatccaatccataaacacgggattgctttctatttatttgtgttgaccttactttctttaagcagtgttttatggttttcaagtacaagtcttttgcttccttaagtttattcctaaatatttcagtttttttgttactattataatggaattttcttaaatttccttttgagattgcttgttattgtatagaaatatcatggatttgttgtgttgattttgtaaactgcagtgttactgaaatttttttttgtatatgtatggacactaggattttctacatataagatcatgtcatctgcaaacagataattttgcttcttcctttccagtctggatgccttttatttctttttcttgcctaactgctctaagactccagtactgtgttaaacagaagtggtgagacagggtatttctgtgttgttcttgatcttaaagtcctttcagtcttattgaatatgatgtttacagtgggatgttcatatggcctctattttaggttgtttccttctattcccaattgttgagtttttatcatgaaagggcatgacattgtctcaaatgctttttctccatcaatggagatcacatttttttccttcattctattaatgtaatagacattacatttattgacttgagcatgttgaaacatctttgcataccagctgtaaatcttacttggccatgatgtgtaatcctttcaatgtcccactgaatcctgttggccagtattttgttgaatattgatttaaaaaaatcttgatcaggaatactgatgtgtggtgtttttttcttatagtgtctttgtctggttttggtatcagaataatgatggcctcatagaatgcatttggaagtgtcctttcctcttcagttttttggaagagtttgaggagaattgatttaattcttcagatgtttgccagaattcccatatgaccctgggcttttctttcttgggaggcttttctttactacttcatgctcttgactagcataggtctgttcagattttccatttcttcatgattcaatcttgataggctgtgtgtttctaagaatttgtccagttcatctaggttatccaattctttgatatgtaattgctcatagtactcttaatcctttttatttctgtaaaatcggttgtaatgtctcctcctggtttttagttgtttttcttagtcactcttagctatcaacaaactcttggtttcatttatttttctctattgcttttctgttctctattttgtctctgctctaatctttattattattataatcatctccattctgctggctttgggttgattgctcttctttttctagttctttcagatgtaaattttgggttgacttgagatcttaatttgtttaataggtgtatttacagttacaaatttccctcctaccactgctttgactgtacctgtttttttgtatattacgtttaagttttcatttaccacaagatattttctaatttcccttgtgagttccccattaatctgctggttgagagcgttgtttaattttcacataattgtgtacttttcagttttttgtctgttactgatttctagtttcatcccactgtggccagaaaagatattttatttcctcagtcttttgaaatttgttgacttgtttagtcatctaacatactgtctatcctagagaaaggtccatttgcacttgagaaaattctgtcttgcgactgatcttctgtctggttgtcctatccgttactgaaagtgggctactgcagtctcctactcttactgtagaactatccatttcttcctttgattctgtcaatgtttgtttcatatattttgggctctgatgtttggtgcatatatattacatcttggtgaattttcaaactttttaaatttcaacatgaagatgaaattataggatgtctgggatttcctttgaatccgtggggctgggagtaactataaatgaaacaagattggccgggaatttgaggctgcaaggataggtacacacaggggagtgaagcagggcttggagcagatggtaaagattgttggcttttccagccatggggctctcttgccacttggcagtagtggcatgaagccgccaccagggggccacgcaccagtgcatgtggctgtgttccaaactttttggacaataaaatctgaatttcacatacttttcttatgtcattagatattacccttttacatcttttcactatttaaaaatgtaaaaatcattcttaacatttgggctgtgcaaaaacagctggtgggcccaattttggcctgtatttcacttgccaacccgatttatacttttgtatctatttgacattttccattaaaagttatataacacta

SEQ ID NO: 425360 - DNA, 3837 bp, Homo sapiens
atctaagaaatcactgccaaatccaatgttgttaaaagtttcccttatgtttctcctaaatgttttagttttagctcttagtttaggcctttgatctattttaatttttatatatggtgtgaggtagatctagcttcatgtggatgtccacttgtctagcaccatttgttgaaaagactgtcctttctcccttgaatggtcttggcaccatcaaaaatcatttgacccatatgtgcaagggtttatttggggatttgctattctgttccattggtctacatgactgtctttgtttcaatacaacaccattttgattattgtagctttgtcgtaagttatgaaataaggaagtgagagacctcctacttggttccctttcaagatgattttggctgtgtgaggtctcttgagattccatatgagtttcaggatggaaaaaaaaaagccactgggatattctgatagagattgcatgaaatctatagattgctttggactatggacatcttaaggtatccaatccataaacacgggattgctttctatttatttgtgttgaccttactttctttaagcagtgttttatggttttcaagtacaagtcttttgcttccttaagtttattcctaaatatttcagtttttttgttactattataatggaattttcttaaatttccttttgagattgcttgttattgtatagaaatatcatggatttgttgtgttgattttgtaaactgcagtgttactgaaatttttttttgtatatgtatggacactaggattttctacatataagatcatgtcatctgcaaacagataattttgcttcttcctttccagtctggatgccttttatttctttttcttgcctaactgctctaagactccagtactgtgttaaacagaagtggtgagacagggtatttctgtgttgttcttgatcttaaagtcctttcagtcttattgaatatgatgtttacagtgggatgttcatatggcctctattttaggttgtttccttctattcccaattgttgagtttttatcatgaaagggcatgacattgtctcaaatgctttttctccatcaatggagatcacatttttttccttcattctattaatgtaatagacattacatttattgacttgagcatgttgaaacatctttgcataccagctgtaaatcttacttggccatgatgtgtaatcctttcaatgtcccactgaatcctgttggccagtattttgttgaatattgatttaaaaaaatcttgatcaggaatactgatgtgtggtgtttttttcttatagtgtctttgtctggttttggtatcagaataatgatggcctcatagaatgcatttggaagtgtcctttcctcttcagttttttggaagagtttgaggagaattgatttaattcttcagatgtttgccagaattcccatatgaccctgggcttttctttcttgggaggcttttctttactacttcatgctcttgactagcataggtctgttcagattttccatttcttcatgattcaatcttgataggctgtgtgtttctaagaatttgtccagttcatctaggttatccaattctttgatatgtaattgctcatagtactcttaatcctttttatttctgtaaaatcggttgtaatgtctcctcctggtttttagttgtttttcttagtcactcttagctatcaacaaactcttggtttcatttatttttctctattgcttttctgttctctattttgtctctgctctaatctttattattattataatcatctccattctgctggctttgggttgattgctcttctttttctagttctttcagatgtaaattttgggttgacttgagatcttaatttgtttaataggtgtatttacagttacaaatttccctcctaccactgctttgactgtacctgtttttttgtatattacgtttaagttttcatttaccacaagatattttctaatttcccttgtgagttccccattaatctgctggttgagagcgttgtttaattttcacataattgtgtacttttcagttttttgtctgttactgatttctagtttcatcccactgtggccagaaaagatattttatttcctcagtcttttgaaatttgttgacttgtttagtcatctaacatactgtctatcctagagaaaggtccatttgcacttgagaaaaacgtgtgtactgctgttgtgtctgttaggtccagctggtatgatgctgttcaagttctgtcttgcgactgatcttctgtctggttgtcctatccgttactgaaagtgggctactgcagtctcctactcttactgtagaactatccatttcttcctttgattctgtcaatgtttgtttcatatattttgggctctgatgtttggtgcatatatattacatcttggtgaattttcaaactttttaaatttcaacatgaagatgaaattataggatgtctgggatttcctttgaatccgtggggctgggagtaactataaatgaaacaagattggccgggaatttgaggctgcaaggataggtacacacaggggagtgaagcagggcttggagcagatggtaaagattgttggcttttccagccatggggctctcttgccacttggcagtagtggcatgaagccgccaccagggggccacgcaccagtgcatgtggctgtgttccaaactttttggacaataaaatctgaatttcacatacttttcttatgtcattagatattacccttttacatcttttcactatttaaaaatgtaaaaatcattcttaacatttgggctgtgcaaaaacagctggtgggcccaattttggcctgtatttcacttgccaacccgatttatacttttgtatctatttgacattttccattaaaagttatataacactacttttttgtactcgttacttttttaaaaaaaactttctacaatgaaaatacattatttttacaataaaaagccaaaatacatacacaaaaatgttacccattaattatgggaattacttcaaggtaattcttattttgaaatatctttccaatattttctcttatatcgctttttgaagacgcataacatgatcccaaataaacagttgaataaacaccaccctcctctcccctcctgcccagaaacccacccatctggagctgcatctcccaggaaaggagactctagagggaaccgccttcttgcatttctctagcctggattcccatgggaaagatgtgtatcttcatgctgagctttgaagattcttacagaataaaaattcttaccatatccttctgtcttaatagcacgttttaaagtctctagggagaagagatttctgtaaacactagtttccaaagaataaaaaaaaaaatcacttctcaaaactcaaatggtatttcccatcacccccacaccatccagatttgttcagctttcttgaaaataaattatctaaatttttaaaaatattttcctaaaactctaaacagaagtaacgtcaaagggatcaatagcctcacttcttatgaaagctaaaactctacccctttatcaaaagctaaaactctacccctttatcagtaagtaagtgaaaatatctttgcaactctgaaaaaccatgctgggacattaatttctaaatacttaaatggcggccaggtgcagtccctcacacctgtaatcccagcacttggggaggtcgaggccagagattgcttgagcgagcccaggagttcaagaccagcctaggcaatatagcaagacctcgtcgctacaaaa

SEQ ID NO: 425361 - DNA, 775 bp, Homo sapiens
agactttaaaaatgaaagtcacatattctacaaaaaacattcacattcataaaaatacccttaaacaaaatacaaatttatttttttctttccagtagagggggcagtgattacctggcattgttgcaaaacaaaagttaagcttgccattattgtagttacaatttttaatataatttttgcagttatctctcagtaactttttattatatactatttaattatgaatgtcagggtctgaaaaatacatggtcaattcaggattggttgtaacttttaaaaaaagatacttacattgacttgttgttatctaaaatgtctttattatgtagacacatcaccttcactttgggatgtggaatttgctaagcagttagccacagtaaatgaacaaccccttcagaatggatttgaagagctgatccagtggacaaaagaggggaaactatgggagttcccaattaacaatgaagcaggttttgatgatgatggttcagaatttcatgaacatatatttctggagaaacacctggagagctttccaaaacaaggaccaattcgccacttcatggagctggtgacttgtggcctttccaaaaacccatatcttagtgttaaacagaaggttgaacacatagagtggtttagaaattattttaatgaaaaaaaggatattctaaaagaaagtaacatacagttcaattaagaccatggaaatttttatttcaaacaattagagatggatattacaactaaataaaataattttactaga

SEQ ID NO: 425362 - DNA, 1330 bp, Homo sapiens
agagggcggggacgtgtttggcagcgggacgcaccatttcagttgtgttcttggttcatttcgtgtctcggcgatgtttcctagagtctcgacgttcctacctcttcgccccctttcccgccaccctttgtcctctggaagcccggagacatcagcggctgcgattatgctactcactgttcggcacggaacagtcaggtaccgcagttcagcgctgttggcccggacaaaaaataacatccaaagatattttggcactaacagtgtgatctgtagcaagaaagataagcagtctgttcgaactgaggagacttccaaggagacttcagagagccaagacagtgaaaaggaaaatacgaaaaaagacttgttaggcattattaagggcatgaaagttgaattaagcacagtaaatgtacgaacaacaaagccccccaaaagaagaccacttaaaagtttggaagctacacttggcaggcttcgaagagctacagaatatgctccaaagaagagaattgagcccctgagtcctgagttggtggcagctgcatctgctgtggcagattctctcccttttgataagcaaacaaccaagtcagagctgctgagccagctccagcagcatgaggaagagtcaagggcacagagagatgcaaagcgacctaaaattagtttcagtaacataatatcagatatgaaagttgccagatctgctacagctagagttcgttcaagaccagagcttcggattcagtttgatgaaggctatgacaattatcctggccaggagaagacggatgatcttaaaaaaaggaaaaatatattcacagggaaaagacttaatatttttgacatgatggcagttactaaagaagcacctgaaacagacacatcaccttcactttgggatgtggaatttgctaagcagttagccacagtaaatgaacaaccccttcagaatggatttgaagagctgatccagtggacaaaagaggggaaactatgggagttcccaattaacaatgaagcaggttttgatgatgatggttcagaatttcatgaacatatatttctggagaaacacctggagagctttccaaaacaaggaccaattcgccacttcatggagctggtgacttgtggcctttccaaaaacccatatcttagtgttaaacagaaggttgaacacatagagtggtttagaaattattttaatgaaaaaaaggatattctaaaagaaagtaacatacagttcaattaagaccatggaaatttttatttcaaacaattagagatggatattacaactaaataaaataattttactaga

SEQ ID NO: 425363 - DNA, 1638 bp, Homo sapiens
agagggcggggacgtgtttggcagcgggacgcaccatttcagttgtgttcttggttcatttcgtgtctcggcgatgtttcctagagtctcgacgttcctacctcttcgccccctttcccgccaccctttgtcctctggaagcccggagacatcagcggctgcgattatgctactcactgttcggcacggaacagtcaggtaccgcagttcagcgctgttggcccggacaaaaaataacatccaaagatattttggcactaacagtgtgatctgtagcaagaaagataagcagtctgttcgaactgaggagacttccaaggagacttcagagagccaagacagtgaaaaggaaaatacgaaaaaagacttgttaggcattattaagggcatgaaagttgaattaagcacagtaaatgtacgaacaacaaagccccccaaaagaagaccacttaaaagtttggaagctacacttggcaggcttcgaagagctacagaatatgctccaaagaagagaattgagcccctgagtcctgagttggtggcagctgcatctgctgtggcagattctctcccttttgataagcaaacaaccaagtcagagctgctgagccagctccagcagcatgaggaagagtcaagggcacagagagatgcaaagcgacctaaaattagtttcagtaacataatatcagatatgaaagttgccagatctgctacagctagagttcgttcaagaccagagcttcggattcagtttgatgaaggctatgacaattatcctggccaggagaagacggatgatcttaaaaaaaggaaaaatatattcacagggaaaagacttaatatttttgacatgatggcagttactaaagaagcacctgaaacagacacatcaccttcactttgggatgtggaatttgctaagcagttagccacagtaaatgaacaaccccttcagaatggatttgaagagctgatccagtggacaaaagaggggaaactatgggagttcccaattaacaatgaagcaggttttgatgatgatggttcagaatttcatgaacatatatttctggagaaacacctggagagctttccaaaacaaggaccaattcgccacttcatggagctggtgacttgtggcctttccaaaaacccatatcttagtgttaaacagaaggttgaacacatagagtggtttagaaattattttaatgaaaaaaaggatattctaaaagaaagtaacatacagttcaattaagaccatggaaatttttatttcaaacaattagagatggatattacaactaaataaaataattttactagaaaaaaaaggaaactgaatgaaagaaacacatgagggggcggaggagctgaagaagtgatgccccaggagggggcacaaggagtaatgcgggataccacggattctccgggtaccagagggggggcccccagaaagggagaagacgccatgataatagacagaaaggaaccgggggcgggctgctattaaagagcgctgagggggcggggcaaaaaagtgtgtgaactctggggactcctgaggtgaagcagacaccatgaacatcgaggggggatgaacaccagaatgggggcacaaacacgccaaga

SEQ ID NO: 425364 - DNA, 1330 bp, Homo sapiens
agagggcggggacgtgtttggcagcgggacgcaccatttcagttgtgttcttggttcatttcgtgtctcggcgatgtttcctagagtctcgacgttcctacctcttcgccccctttcccgccaccctttgtcctctggaagcccggagacatcagcggctgcgattatgctactcactgttcggcacggaacagtcaggtaccgcagttcagcgctgttggcccggacaaaaaataacatccaaagatattttggcactaacagtgtgatctgtagcaagaaagataagcagtctgttcgaactgaggagacttccaaggagacttcagagagccaagacagtgaaaaggaaaatacgaaaaaagacttgttaggcattattaagggcatgaaagttgaattaagcacagtaaatgtacgaacaacaaagccccccaaaagaagaccacttaaaagtttggaagctacacttggcaggcttcgaagagctacagaatatgctccaaagaagagaattgagcccctgagtcctgagttggtggcagctgcatctgctgtggcagattctctcccttttgataagcaaacaaccaagtcagagctgctgagccagctccagcagcatgaggaagagtcaagggcacagagagatgcaaagcgacctaaaattagtttcagtaacataatatcagatatgaaagttgccagatctgctacagctagagttcgttcaagaccagagcttcggattcagtttgatgaaggctatgacaattatcctggccaggagaagacggatgatcttaaaaaaaggaaaaatatattcacagggaaaagacttaatatttttgacatgatggcagttactaaagaagcacctgaaacagacacatcaccttcactttgggatgtggaatttgctaagcagttagccacagtaaatgaacaaccccttcagaatggatttgaagagctgatccagtggacaaaagaggggaaactatgggagttcccaattaacaatgaagcaggttttgatgatgatggttcagaatttcatgaacatatatttctgacacacccccccaaccccatcctgaggcagtgcctggcagataacttaggttggccgcagaagctattcatacccgacagcatgtgtgtaagtgcttatggtgggcatggtggacctcatctgtgcttcttcctccctctggtttaaagagatatattaactaatttcgcatcatttgtgtgtgcaggtgactggtttttacataagtcctacttatacctttgatatgttccagtaattaaagttattttatat

SEQ ID NO: 425365 - DNA, 3045 bp, Homo sapiens
agagggcggggacgtgtttggcagcgggacgcaccatttcagttgtgttcttggttcatttcgtgtctcggcgatgtttcctagagtctcgacgttcctacctcttcgccccctttcccgccaccctttgtcctctggaagcccggagacatcagcggctgcgattatgctactcactgttcggcacggaacagtcaggtaccgcagttcagcgctgttggcccggacaaaaaataacatccaaagatattttggcactaacagtgtgatctgtagcaagaaagataagcagtctgttcgaactgaggagacttccaaggagacttcagagagccaagacagtgaaaaggaaaatacgaaaaaagacttgttaggcattattaagggcatgaaagttgaattaagcacagtaaatgtacgaacaacaaagccccccaaaagaagaccacttaaaagtttggaagctacacttggcaggcttcgaagagctacagaatatgctccaaagaagagaattgagcccctgagtcctgagttggtggcagctgcatctgctgtggcagattctctcccttttgataagcaaacaaccaagtcagagctgctgagccagctccagcagcatgaggaagagtcaagggcacagagagatgcaaagcgacctaaaattagtttcagtaacataatatcagatatgaaagttgccagatctgctacagctagagttcgttcaagaccagagcttcggattcagtttgatgaaggctatgacaattatcctggccaggagaagacggatgatcttaaaaaaaggtatcaggctttgtaatctgctgggttttgtttgtgtagtttgtttttaccttaactgtagatttaccttattgtgtgtgtgtgtattattgctgttggatatctgaacattatgaatacatttacatctgtgttcttactctctgtataccacttccctagagagggaaccatgtgctggatttagccagtcctgtagttttccatacctgaaatcaaaacgggccatgcttcacatctacccacgatgaataggggtcctttcatttagagtaagcggagctgactgaattctgagcaaataagtattttgtgagaaacattatttttcattttaaaaataagtgtctaatactgtgtattcatatagcctttatatcccaatacgtgcttatctgttggtataccttagagaaataacccaccatcaatgagaagaaggaaaggcaggaggaaaaaagtttatataacactttaaaatggtagattatttgtggccatttgaatttactgatttgaagttcttaaagatgctgagccatgccttacatagttattttagaatctaaagttgttctgtatttgcataacgtttctgttctttttcttctttaaaccctgaaagtgatagatgggaaggaggaaccagatatttggcatggtctgacaaaaattaacttgtctttgtagcaggatatgctcacaactggagtgttttcaatgcattgtatattccatggatttgttttaagtaaaatcagaaacttgagttaactctttctgggtgttaaattaatgatttatacaggaaagttggaaaaggtggtcagcagttaacaccggaagttcaagaggttatggtgactttggaagattatttgaattactaatttaaagtgatttagcatctgttacatattattgaataaaggagaaggtgtacttggagttttacttaagaatatttaactgaatcagttaatcctcgagaatatttaactgaatcattcatcttggacatgattctgtgcaactacattaggatggtatattataatttgatttttaatattagatttgatatttaatatttaaaaaattagaagcaagtaggaaagggttttctgtgctttcaatgtgttaaaaagccagccagaggtgagtaaggggaagcaatggtgagacgccaagtttttcaccctgctatgactggggcaggatctgggatatcaaccccagacaacccaggcctggattgattttttctgttggagattgacagttcacactggcctgcctcagaatgttggcactgccactgactaattctgtgactggggcaccttttatagcctccatcaggctgtttccccagctataaaatgctgaaagtgaaacctagcttaaatggctttcttaaggaatagaaaagaaacacgtgtaaactatctggtacatagtaggtgctcagcaaatgtccattccctctctttgtagtacgttcctcttttgaaattcaatactttatcaaggcatttgccctctgctgtgacttgctttaatccaccatcctgtttatcagacgtgcggttgagggagaagaatgcaaggcactgaagagagttatggagcgtaaaagcctttgtttacaaataacttggaacctgttagagggaagattatatgatttgagatcacattatttaacgttcatatggtatttgcatttttccagttatttctatttagtagagagaagtaatttagtttataaaaaaacaagaattcaaaattatttttaaaactaaccctccagtttattattttttatttttcttcgagacggagtctcgctgcttatcgcccagcctggagtgtagtggcacaatgtcggctcactgcaacttctgcttcctgggttcaagggattctcctgccttagcctctcaagtagcagagattacaggcacctgccatcacacctggctaattttttttgtgtgtttttagtagagacggggtttcaccatgttggccaggctggtctcaaactcctgacctcaggtaatctacctgccttggcctcccaaagtgctgggattacaggcgtgagccacctcgcctggccagccatccagtttataaactggattttaatctgccagtaaatgtattcaagtaaatatgtgaattgatgcataaagcagttgattatcaagtgtgtaagaaaat

SEQ ID NO: 425366 - DNA, 2202 bp, Homo sapiens
agagggcggggacgtgtttggcagcgggacgcaccatttcagttgtgttcttggttcatttcgtgtctcggcgatgtttcctagagtctcgacgttcctacctcttcgccccctttcccgccaccctttgtcctctggaagcccggagacatcagcggctgcgattatgctactcactgttcggcacggaacagtcaggtaccgcagttcagcgctgttggcccggacaaaaaataacatccaaagatattttggcactaacagtgtgatctgtagcaagaaagataagcagtctgttcgaactgaggagacttccaaggagacttcagagagccaagacagtgaaaaggaaaatacgaaaaaagacttgttaggcattattaagggcatgaaagttgaattaagcacagtaaatgtacgaacaacaaagccccccaaaagaagaccacttaaaagtttggaagctacacttggcaggcttcgaagagctacagaatatgctccaaagaagagaattgagcccctgagtcctgagttggtggcagctgcatctgctgtggcagattctctcccttttgataagcaaacaaccaagtcagagctgctgagccagctccagcagcatgaggaagagtcaagggcacagagagatgcaaagcgacctaaaattagtttcagtaacataatatcagatatgaaagttgccagatctgctacagctagagttcgttcaagaccagagcttcggattcagtttgatgaaggctatgacaattatcctggccaggagaagacggatgatcttaaaaaaaggtatcaggctttgtaatctgctgggttttgtttgtgtagtttgtttttaccttaactgtagatttaccttattgtgtgtgtgtgtattattgctgttggatatctgaacattatgaatacatttacatctgtgttcttactctctgtataccacttccctagagagggaaccatgtgctggatttagccagtcctgtagttttccatacctgaaatcaaaacgggccatgcttcacatctacccacgatgaataggggtcctttcatttagagtaagcggagctgactgaattctgagcaaataagtattttgtgagaaacattatttttcattttaaaaataagtgtctaatactgtgtattcatatagcctttatatcccaatacgtgcttatctgttggtataccttagagaaataacccaccatcaatgagaagaaggaaaggcaggaggaaaaaagtttatataacactttaaaatggtagattatttgtggccatttgaatttactgatttgaagttcttaaagatgctgagccatgccttacatagttattttagaatctaaagttgttctgtatttgcataacgtttctgttctttttcttctttaaaccctgaaagtgatagatgggaaggaggaaccagatatttggcatggtctgacaaaaattaacttgtctttgtagcaggatatgctcacaactggagtgttttcaatgcattgtatattccatggatttgttttaagtaaaatcagaaacttgagttaactctttctgggtgttaaattaatgatttatacaggaaagttggaaaaggtggtcagcagttaacaccggaagttcaagaggttatggtgactttggaagattatttgaattactaatttaaagtgatttagcatctgttacatattattgaataaaggagaaggtgtacttggagttttacttaagaatatttaactgaatcagttaatcctcgagaatatttaactgaatcattcatcttggacatgattctgtgcaactacattaggatggtatattataatttgatttttaatattagatttgatatttaatatttaaaaaattagaagcaagtaggaaagggttttctgtgctttcaatgtgttaaaaagccagccagaggtgagtaaggggaagcaatggtgagacgccaagtttttcaccctgctatgactggggcaggatctgggatatcaaccccagacaaccagccgaatgattaccgggggatgaggtcccgggcgcccaagtggcgccccacaatcgagcggggcgccatacccccacgggggccccaaaggtaggacacaaaggtttcagaccatacccagagaccacaccacccgctgtccg

SEQ ID NO: 425367 - DNA, 1326 bp, Homo sapiens
aaaaccttaccgcgcttagagttagcgagggccctggggggtgggtgtaggtcatttcgtgtctcggcgatgtttcctagagtctcgacgttcctacctcttcgccccctttcccgccaccctttgtcctctggaagcccggagacatcagcggctgcgattatgctactcactgttcggcacggaacagtcaggtaccgcagttcagcgctgttggcccggacaaaaaataacatccaaagatattttggcactaacagtgtgatctgtagcaagaaagataagcagtctgttcgaactgaggagacttccaaggagacttcagagagccaagacagtgaaaaggaaaatacgaaaaaagacttgttaggcattattaagggcatgaaagttgaattaagcacagtaaatgtacgaacaacaaagccccccaaaagaagaccacttaaaagtttggaagctacacttggcaggcttcgaagagctacagaatatgctccaaagaagagaattgagcccctgagtcctgagttggtggcagctgcatctgctgtggcagattctctcccttttgataagcaaacaaccaagtcagagctgctgagccagctccagcagcatgaggaagagtcaagggcacagagagatgcaaagcgacctaaaattagtttcagtaacataatatcagatatgaaagttgccagatctgctacagctagagttcgttcaagaccagagcttcggattcagtttgatgaaggctatgacaattatcctggccaggagaagacggatgatcttaaaaaaaggaaaaatatattcacagggaaaagacttaatatttttgacatgatggcagttactaaagaagcacctgaaacagacacatcaccttcactttgggatgtggaatttgctaagcagttagccacagtaaatgaacaaccccttcagaatggatttgaagagctgatccagtggacaaaagaggggaaactatgggagttcccaattaacaatgaagcaggttttgatgatgatggttcagaatttcatgaacatatatttctggagaaacacctggagagctttccaaaacaaggaccaattcgccacttcatggagctggtgacttgtggcctttccaaaaacccatatcttagtgttaaacagaaggttgaacacatagagtggtttagaaattattttaatgaaaaaaaggatattctaaaagaaagtaacatacagttcaattaagaccatggaaatttttatttcaaacaattagagatggatattacaactaaataaaataattttactaga

SEQ ID NO: 425368 - DNA, 1363 bp, Homo sapiens
gtggcagcatgagtctgcatcgcaggttgtgttctggtgtgcagaacatggtcattggctgatgtccttactgaaaatccttcggatcgattgcactaagctgcctttcggcctcctctatccacgtacaacacttgtgctcgcgtcgtggaaagccgcacgcgatactgtacacacagagtctcgcatggatgtctagacagttattcgggagcagtgctatacatcaggtgtcgaagtgaagttccagttggactggacaaaaaataacatccaaagatattttggcactaacagtgtgatctgtagcaagaaagataagcagtctgttcgaactgaggagacttccaaggagacttcagagagccaagacagtgaaaaggaaaatacgaaaaaagacttgttaggcattattaagggcatgaaagttgaattaagcacagtaaatgtacgaacaacaaagccccccaaaagaagaccacttaaaagtttggaagctacacttggcaggcttcgaagagctacagaatatgctccaaagaagagaattgagcccctgagtcctgagttggtggcagctgcatctgctgtggcagattctctcccttttgataagcaaacaaccaagtcagagctgctgagccagctccagcagcatgaggaagagtcaagggcacagagagatgcaaagcgacctaaaattagtttcagtaacataatatcagatatgaaagttgccagatctgctacagctagagttcgttcaagaccagagcttcggattcagtttgatgaaggctatgacaattatcctggccaggagaagacggatgatcttaaaaaaaggaaaaatatattcacagggaaaagacttaatatttttgacatgatggcagttactaaagaagcacctgaaacagacacatcaccttcactttgggatgtggaatttgctaagcagttagccacagtaaatgaacaaccccttcagaatggatttgaagagctgatccagtggacaaaagaggggaaactatgggagttcccaattaacaatgaagcaggttttgatgatgatggttcagaatttcatgaacatatatttctggagaaacacctggagagctttccaaaacaaggaccaattcgccacttcatggagctggtgacttgtggcctttccaaaaacccatatcttagtgttaaacagaaggttgaacacatagagtggtttagaaattattttaatgaaaaaaaggatattctaaaagaaagtaacatacagttcaattaagaccatggaaatttttatttcaaacaattagagatggatattacaactaaataaaataattttactaga

SEQ ID NO: 425369 - DNA, 1303 bp, Homo sapiens
agagggcggggacgtgtttggcagcgggacgcaccatttcagttgtgttcttggttcatttcgtgtctcggcgatgtttcctagagtctcgacgttcctacctcttcgccccctttcccgccaccctttgtcctctggaagcccggagacatcagcggctgcgattatgctactcactgttcggcacggaacagtcaggacaaaaaataacatccaaagatattttggcactaacagtgtgatctgtagcaagaaagataagcagtctgttcgaactgaggagacttccaaggagacttcagagagccaagacagtgaaaaggaaaatacgaaaaaagacttgttaggcattattaagggcatgaaagttgaattaagcacagtaaatgtacgaacaacaaagccccccaaaagaagaccacttaaaagtttggaagctacacttggcaggcttcgaagagctacagaatatgctccaaagaagagaattgagcccctgagtcctgagttggtggcagctgcatctgctgtggcagattctctcccttttgataagcaaacaaccaagtcagagctgctgagccagctccagcagcatgaggaagagtcaagggcacagagagatgcaaagcgacctaaaattagtttcagtaacataatatcagatatgaaagttgccagatctgctacagctagagttcgttcaagaccagagcttcggattcagtttgatgaaggctatgacaattatcctggccaggagaagacggatgatcttaaaaaaaggaaaaatatattcacagggaaaagacttaatatttttgacatgatggcagttactaaagaagcacctgaaacagacacatcaccttcactttgggatgtggaatttgctaagcagttagccacagtaaatgaacaaccccttcagaatggatttgaagagctgatccagtggacaaaagaggggaaactatgggagttcccaattaacaatgaagcaggttttgatgatgatggttcagaatttcatgaacatatatttctggagaaacacctggagagctttccaaaacaaggaccaattcgccacttcatggagctggtgacttgtggcctttccaaaaacccatatcttagtgttaaacagaaggttgaacacatagagtggtttagaaattattttaatgaaaaaaaggatattctaaaagaaagtaacatacagttcaattaagaccatggaaatttttatttcaaacaattagagatggatattacaactaaataaaataattttactaga

SEQ ID NO: 425370 - DNA, 1171 bp, Homo sapiens
agagggcggggacgtgtttggcagcgggacgcaccatttcagttgtgttcttggttcatttcgtgtctcggcgatgtttcctagagtctcgacgttcctacctcttcgccccctttcccgccaccctttgtcctctggaagcccggagacatcagcggctgcgattatgctactcactgttcggcacggaacagtcaggtaccgcagttcagcgctgttggcccggacaaaaaataacatccaaagatattttggcactaacagtgtgatctgtagcaagaaagataagcagtctgttcgaactgaggagacttccaaggagacttcagagagccaagacagtgaaaaggaaaatacgaaaaaagacttgttaggcattattaagggcatgaaagttgaattaagcacagtaaatgtacgaacaacaaagccccccaaaagaagaccacttaaaagtttggaagctacacttggcaggcttcgaagagctacagaatatgctccaaagaagagtttcagtaacataatatcagatatgaaagttgccagatctgctacagctagagttcgttcaagaccagagcttcggattcagtttgatgaaggctatgacaattatcctggccaggagaagacggatgatcttaaaaaaaggaaaaatatattcacagggaaaagacttaatatttttgacatgatggcagttactaaagaagcacctgaaacagacacatcaccttcactttgggatgtggaatttgctaagcagttagccacagtaaatgaacaaccccttcagaatggatttgaagagctgatccagtggacaaaagaggggaaactatgggagttcccaattaacaatgaagcaggttttgatgatgatggttcagaatttcatgaacatatatttctggagaaacacctggagagctttccaaaacaaggaccaattcgccacttcatggagctggtgacttgtggcctttccaaaaacccatatcttagtgttaaacagaaggttgaacacatagagtggtttagaaattattttaatgaaaaaaaggatattctaaaagaaagtaacatacagttcaattaagaccatggaaatttttatttcaaacaattagagatggatattacaactaaataaaataattttactaga

SEQ ID NO: 425371 - DNA, 1042 bp, Homo sapiens
agagggcggggacgtgtttggcagcgggacgcaccatttcagttgtgttcttggttcatttcgtgtctcggcgatgtttcctagagtctcgacgttcctacctcttcgccccctttcccgccaccctttgtcctctggaagcccggagacatcagcggctgcgattatgctactcactgttcggcacggaacagtcaggtaccgcagttcagcgctgttggcccgaattgagcccctgagtcctgagttggtggcagctgcatctgctgtggcagattctctcccttttgataagcaaacaaccaagtcagagctgctgagccagctccagcagcatgaggaagagtcaagggcacagagagatgcaaagcgacctaaaattagtttcagtaacataatatcagatatgaaagttgccagatctgctacagctagagttcgttcaagaccagagcttcggattcagtttgatgaaggctatgacaattatcctggccaggagaagacggatgatcttaaaaaaaggaaaaatatattcacagggaaaagacttaatatttttgacatgatggcagttactaaagaagcacctgaaacagacacatcaccttcactttgggatgtggaatttgctaagcagttagccacagtaaatgaacaaccccttcagaatggatttgaagagctgatccagtggacaaaagaggggaaactatgggagttcccaattaacaatgaagcaggttttgatgatgatggttcagaatttcatgaacatatatttctggagaaacacctggagagctttccaaaacaaggaccaattcgccacttcatggagctggtgacttgtggcctttccaaaaacccatatcttagtgttaaacagaaggttgaacacatagagtggtttagaaattattttaatgaaaaaaaggatattctaaaagaaagtaacatacagttcaattaagaccatggaaatttttatttcaaacaattagagatggatattacaactaaataaaataattttactaga

SEQ ID NO: 425372 - DNA, 468 bp, Homo sapiens
gttgcattctgtgagacagcgggagacacatcaccttcactttgggatgtggaatttgctaagcagttagccacagtaaatgaacaaccccttcagaatggatttgaagagctgatccagtggacaaaagaggggaaactatgggagttcccaattaacaatgaagcaggttttgatgatgatggttcagaatttcatgaacatatatttctggagaaacacctggagagctttccaaaacaaggaccaattcgccacttcatggagctggtgacttgtggcctttccaaaaacccatatcttagtgttaaacagaaggttgaacacatagagtggtttagaaattattttaatgaaaaaaaggatattctaaaagaaagtaacatacagttcaattaagaccatggaaatttttatttcaaacaattagagatggatattacaactaaataaaataattttactaga

SEQ ID NO: 425373 - DNA, 561 bp, Homo sapiens
aaacagaaggttgaacacatagagtggtttagaaattattttaatgaaaaaaaggatattctaaaagaaagtaacatacagttcaattaagaccatggaaatttttatttcaaacaattagagatggatattacaactaaataaaataattttactagagtttgtatatgttatgttgattattacatttgatttggctggtataaatgttacattgttttcaaaaatatgatggtaactgaaaaatattcttgcatggagaaaaatcatcagtattcataggttcaaaagaatatctgggaattagtaatacatttaagacaacaactcctaacctttttcttttcactcggtgaccatacttctttgaaatacaatacaattactggatgatatcacagtactatgttataagagttgagatgatttatagacagatatatatgtacatacgtttatttgtttacatttatacatatattttacactaaattaactaccctcacctaagtctgggtcactatagagaaattaatcttgtagaaataaagggtttattct

SEQ ID NO: 425374 - DNA, 4109 bp, Homo sapiens
aattgatgagcatgtgttgaatcctcaagagaggagggaggaagcaagaaggaaagcttgaagggaggaggggaggggggcaggtgctgatttcagccctgtagcgtcaggattgcgtcaattcgggttccagccacgtctggagtctcggagacgagcttctcagaagagccaaaacaggaaccgaggtggcaaatcactgtgcgagggcgagtggacctccctctttgcctcctccctgttccaggagctggtgccctgggctctgcgctgttgttttcagcgctccgaaagccggcgcttgagatccaggcaagtgaatccagccaggcagttttcccttcagcacctcggacagaacacgcagtaaaaaatggctccgatcaccaccagccgggaagaatttgatgaaatccccacagtggtggggatcttcagtgcatttggcctggtcttcacagtctctctctttgcatggatctgctgtcagagaaaatcatccaagtctaacaagactcctccatacaagtttgtgcatgtgcttaagggagttgatatttaccctgaaaacctaaatagcaaaaagaagtttggagcagatgataaaaatgaagtaaagaataagccagctgtgccaaagaattcattgcatctggatcttgaaaagagagatctcaatggcaattttcccaaaaccaacctcaaacctggcagtccttctgatctggagaatgcaaccccgaagctctttttagaaggggaaaaagagtcagtttcccctgagagtttaaagtccagcacttcccttacttcagaagagaaacaagagaagctgggaactctcttcttctccttagaatacaacttcgagagaaaagcatttgtggtcaatatcaaggaagcccgtggcttgccagccatggatgagcagtcgatgacctctgacccatatatcaaaatgacgatcctcccagagaagaagcataaagtgaaaactagagtgctgaggaaaaaccttggatccagcttttgatgagacctttacattctatgggataccctacacccaaatccaagaattggccttgcacttcacaattttgagttttgacaggttttcaagagatgatatcattggggaagttctaattcctctctcgggaattgaattatctgaaggaaaaatgttaatgaatagagagatcatcaagagaaatgttaggaagtcttcaggacggggtgagttactgatctctctctgctatcagtccaccacaaacactctaactgtggttgtcttaaaagctcgacatctgcctaaatctgatgtgtccggactttcagatccctatgtcaaagtgaacctgtaccatgccaaaaagagaatctccaagaagaagactcatgtgaagaaatgcacccccaatgcagtgttcaatgagctgtttgtctttgatattccttgtgagggccttgaagatataagtgttgaatttttggttttggattctgaaagggggtcccgaaatgaggtaatcgggcagttagtcttgggtgcagcagcagaaggaactggtggagagcactggaaagagatctgtgactaccccaggagacaaattgccaagtggcacgtgctctgtgatggttagcatcctagccgtgagttggaacttaaaggtttttactaggcaaggagaaattttctttctttctatattggattgcaagcttgggaaatcaagctacctttttgttgttgttgttgttgctagaaatggattgaattagtagaccagaaagtaacttcaaatgtgtattatgataatttccctatttattagaagagttggataaattttcataagatattcaatatctccttcagattaccagtgatataactaggaatagtcagacattttatgaatactgtgccagaatcccaaattataaatgtgacaatctcattggaacatgtcacaaaaagttaatgtgattaagatttaaaaacgaaaagtatgccttgccttgtgaaaatttatccatttatcttcaggttggggaaatcaatttttctttaaatccaaagatactaaaaaaatgtcctccagtttgtatttattaattctgtcatgtgcaaatggttgtcctgcatataaaagtatctggtcatttcagtttggtttgtaattatttgatgcaattttatcataagagtaactcagattcatttcaaaaggacagtgaacaagctgagaaattattttatcaaagggctgagttgagaacactgtggctgaaatataatttttctcccccctaaggttacatgtgagtcaaaattttgtaaaatataacctcacataagaaccatggccttggattattcactgcctgtcacaagcctcagtgtggcctgagaaatccctatgtacctttgtgaaattgttgaattagttagtgaataaagaaataaacttcaactagaaatccagttagaagtgcaattttcttataggaaataggtatagtgtgcaagtgtacttttaaggccatcgtttgtacccagagtcggcatggccacctaagtcttcatttaatttattgtcccccagaaaagattaagatgctacttgaaaagactgtgaagattttttacattgccagataaaaagtgttacttaaccaacaaacaaatgtaagactacaaaatcgttcaagagcaattctaatataatttacatatgttcacgcaaaatatgcttaggctgtcaaattagcacaacaaagaatgtgtttcactatcttttctaggctaatttgtcttgagctgttgtctatagagcagtttacagacttgtgtcttgtatcattttccagtgccagggttctgaaattcattcagaacctgttagattaaagctgcaccctgtgattatttgaaaagaattagcttgagagtaatgtcactatatttgagttcttagagaagtatgagtggaacttgagtacagttgaattattaaatatgcaagttagaaattaagtctactgaaaaatttacattttgagtcaggttttgtgtcagtactttagcagtttttgagaatgtgtttgatatcacagtgtttgtaaattctatgaaaaatgcattttccaaacaacttatacatgctttttatgactatgcctaatgtaaagaaaatgtattacattctgtatgtacaaagattaaaaatcaacctcttttttgtgctttaaaatgactttgggattaaaaaagcatatttcccaatcattgtcttcattccactacaaagtcacctcacagcatcttgctccactcggcatctctgtgaaagcaacatgaaatgaactgtagtaggtgtgtagtttggggaagtcaaatggccattttatgtatgtgcatttggtatcatgggccgtggaacagaatatatgttggacctctgaaaagttgtaaggggccaattctaagtattcttcacggcagccagaagttaatggtggtagcagctgaggtatggttgttggacgaggccgattttttttttttaacatggaacaatgaaaccaacaacaaacatttttaaaattaaaatggataatttgtaaatagtttttagcttttaaaatttaaagtgtttttgagtgtgaaaagttgagtaaaactatttgcaactggttttcagaaaagagaaaagaaacaacaaaggaattgaaacaggcagggagatcttaatacctaatttcatcatttctgaaaatgtactgttttagaatgtattacaatatcaatgtgaatatcttgaatcctgttacaaatcctgcactgtattaaacatgtaaattaattgtttgtctgattagccaatctcaccacccaaatggggaggtatacatgtttgaagaactgtgtaactcagtaattgatttgttctgatgttgtaactcaatagaagtgttttggaaggaagcatggtgtgtgagacagtgtctgttcttttgtgccagctctgtatgatgtttgtaagaccatgtttgtaagacatgaataaattgctgcttttgcccaacccgtttca

SEQ ID NO: 425375 - DNA, 4355 bp, Homo sapiens
aattgatgagcatgtgttgaatcctcaagagaggagggaggaagcaagaaggaaagcttgaagggaggaggggaggggggcaggtgctgatttcagccctgtagcgtcaggattgcgtcaattcgggttccagccacgtctggagtctcggagacgagcttctcagaagagccaaaacaggaaccgaggtggcaaatcactgtgcgagggcgagtggacctccctctttgcctcctccctgttccaggagctggtgccctgggctctgcgctgttgttttcagcgctccgaaagccggcgcttgagatccaggcaagtgaatccagccaggcagttttcccttcagcacctcggacagaacacgcagtaaaaaatggctccgatcaccaccagccgggaagaatttgatgaaatccccacagtggtggggatcttcagtgcatttggcctggtcttcacagtctctctctttgcatggatctgctgtcagagaaaatcatccaagtctaacaagactcctccatacaagtttgtgcatgtgcttaagggagttgatatttaccctgaaaacctaaatagcaaaaagaagtttggagcagatgataaaaatgaagtaaagaataagccagctgtgccaaagaattcattgcatctggatcttgaaaagagagatctcaatggcaattttcccaaaaccaacctcaaacctggcagtccttctgatctggagaatgcaaccccgaagctctttttagaaggggaaaaagagtcagtttcccctgagagtttaaagtccagcacttcccttacttcagaagagaaacaagagaagctgggaactctcttcttctccttagaatacaacttcgagagaaaagcatttgtggtcaatatcaaggaagcccgtggcttgccagccatggatgagcagtcgatgacctctgacccatatatcaaaatgacgatcctcccagagaagaagcataaagtgaaaactagagtgctgaggaaaaaccttggatccagcttttgatgagacctttacattctatgggataccctacacccaaatccaagaattggccttgcacttcacaattttgagttttgacaggttttcaagagatgatatcattggggaagttctaattcctctctcgggaattgaattatctgaaggaaaaatgttaatgaatagagagatcatcaagagaaatgttaggaagtcttcaggacggggtgagttactgatctctctctgctatcagtccaccacaaacactctaactgtggttgtcttaaaagctcgacatctgcctaaatctgatgtgtccggactttcagatccctatgtcaaagtgaacctgtaccatgccaaaaagagaatctccaagaagaagactcatgtgaagaaatgcacccccaatgcagtgttcaatgagctgtttgtctttgatattccttgtgagggccttgaagatataagtgttgaatttttggttttggattctgaaagggggtcccgaaatgaggtaatcgggcagttagtcttgggtgcagcagcagaaggaactggtggagagcactggaaagagatctgtgactaccccaggagacaaattgccaagtggcacgtgctctgtgatggttagcatcctagccgtgagttggaacttaaaggtttttactaggcaaggagaaattttctttctttctatattggattgcaagcttgggaaatcaagctacctttttgttgttgttgttgttgctagaaatggattgaattagtagaccagaaagtaacttcaaatgtgtattatgataatttccctatttattagaagagttggataaattttcataagatattcaatatctccttcagattaccagtgatataactaggaatagtcagacattttatgaatactgtgccagaatcccaaattataaatgtgacaatctcattggaacatgtcacaaaaagttaatgtgattaagatttaaaaacgaaaagtatgccttgccttgtgaaaatttatccatttatcttcaggttggggaaatcaatttttctttaaatccaaagatactaaaaaaatgtcctccagtttgtatttattaattctgtcatgtgcaaatggttgtcctgcatataaaagtatctggtcatttcagtttggtttgtaattatttgatgcaattttatcataagagtaactcagattcatttcaaaaggacagtgaacaagctgagaaattattttatcaaagggctgagttgagaacactgtggctgaaatataatttttctcccccctaaggttacatgtgagtcaaaattttgtaaaatataacctcacataagaaccatggccttggattattcactgcctgtcacaagcctcagtgtggcctgagaaatccctatgtacctttgtgaaattgttgaattagttagtgaataaagaaataaacttcaactagaaatccagttagaagtgcaattttcttataggaaataggtatagtgtgcaagtgtacttttaaggccatcgtttgtacccagagtcggcatggccacctaagtcttcatttaatttattgtcccccagaaaagattaagatgctacttgaaaagactgtgaagattttttacattgccagataaaaagtgttacttaaccaacaaacaaatgtaagactacaaaatcgttcaagagcaattctaatataatttacatatgttcacgcaaaatatgcttaggctgtcaaattagcacaacaaagaatgtgtttcactatcttttctaggctaatttgtcttgagctgttgtctatagagcagtttacagacttgtgtcttgtatcattttccagtgccagggttctgaaattcattcagaacctgttagattaaagctgcaccctgtgattatttgaaaagaattagcttgagagtaatgtcactatatttgagttcttagagaagtatgagtggaacttgagtacagttgaattattaaatatgcaagttagaaattaagtctactgaaaaatttacattttgagtcaggttttgtgtcagtactttagcagtttttgagaatgtgtttgatatcacagtgtttgtaaattctatgaaaaatgcattttccaaacaacttatacatgctttttatgactatgcctaatgtaaagaaaatgtattacattctgtatgtacaaagattaaaaatcaacctcttttttgtgctttaaaatgactttgggattaaaaaagcatatttcccaatcattgtcttcattccactacaaagtcacctcacagcatcttgctccactcggcatctctgtgaaagcaacatgaaatgaactgtagtaggtgtgtagtttggggaagtcaaatggccattttatgtatgtgcatttggtatcatgggccgtggaacagaatatatgttggacctctgaaaagttgtaaggggccaattctaagtattcttcacggcagccagaagttaatggtggtagcagctgaggtatggttgttggacgaggccgattttttttttttaacatggaacaatgaaaccaacaacaaacatttttaaaattaaaatggataatttgtaaatagtttttagcttttaaaatttaaagtgtttttgagtgtgaaaagttgagtaaaactatttgcaactggttttcagaaaagagaaaagaaacaacaaaggaattgaaacaggcagggagatcttaatacctaatttcatcatttctgaaaatgtactgttttagaatgtattacaatatcaatgtgaatatcttgaatcctgttacaaatcctgcactgtattaaacatgtaaattaattgtttgtctgattagccaatctcaccacccaaatggggaggtatacatgtttgaagaactgtgtaactcagtaattgatttgttctgatgttgtaactcaatagaagtgttttggaaggaagcatggtgtgtgagacagtgtctgttcttttgtgccagctctgtatgatgtttgtaagaccatgtttgtaagacatgaataaattgctgcttttgcccaacccgtttcagaataaaaaaacgtaatgagagagatcaatttaaagcagtaaatgaaacaaacataagaattggtgaagcgaattataggtgctgctaaaagcggtgggactgtagtcagaaagtacaaggagaacgtcaagaagcaaagacacacccagaggagcggaaaaccatgccagcaagtaaaacaccaaaaacaaccgaggggagccagtacaaaggatcaacaggacaccgagggcccgagctgcgtc

SEQ ID NO: 425376 - DNA, 485 bp, Homo sapiens
cggaaattaaaaatttccttgaaagaaacaaaaatacaaacacaacatatcaaaacctaagagggaaatttatagcgttgcatgcctacatcaaaaaagtagatgatttcaaaaaaataaaacaataatgcaccttaaagaactagaaaagcaagaaaaagagccaaactcaaaattagtagaaagaaacttgaaaaatcagagcagaaataaacaacaaacagactagagatcaataaaatgaaaagttggggaggtttttgtttgtttgtttgtttttgtatttttctggggtgagcatcttactctgtcacccaggatgaagtgcagtgcctctgtcatggctcactgcagcctccagctcatgagcgccagagaccttcattcttctgagcagctgggaatacaggcatgtgccaccacacccagctaagattttttttcttcttttttaaaagatgtagtattttttttattgcccagga

SEQ ID NO: 425377 - DNA, 1028 bp, Homo sapiens
  misc_feature (750)..(750): n is a, c, g, or t
  misc_feature (803)..(803): n is a, c, g, or t
  misc_feature (808)..(808): n is a, c, g, or t
  misc_feature (825)..(825): n is a, c, g, or t
  misc_feature (832)..(832): n is a, c, g, or t
  misc_feature (837)..(837): n is a, c, g, or t
  misc_feature (843)..(843): n is a, c, g, or t
  misc_feature (845)..(845): n is a, c, g, or t
  misc_feature (849)..(849): n is a, c, g, or t
  misc_feature (851)..(851): n is a, c, g, or t
  misc_feature (863)..(863): n is a, c, g, or t
  misc_feature (878)..(878): n is a, c, g, or t
aagcatccattaatcttcaggatcaacttgagaagacaggggaaaacaaaggatggagtgatccaacgcctgggtttcctgaaccaacaaataatactccaaaaggaattcttcatttgtctcctgatgtttatcaagagatggaagccagccgccacaaagtaatctctggcactactctaggctatttgtcacccaaagatatgaaccaaccttcaagctctttcttcagtatatctcccacatcgaatagttcagctacaattgccagggaactccttatgaatggaacatcttctacagctgaagccataggtttaaaaggaagttctcctactcccccttgttctccagtacaaccttcaaaacaactggaatatttagcaaggattcaaggctttcaggttcactactgtgatagacaaagtggcaaagagtgtgtgacctgtctgacattagcccctgtgcagatgactttccatgctattggaagctccattgaagccagccatgatcaggtataatatgccactgccattttgctgtgttatggcccagctcggaaatggaaggccatcaaaatggaagctatgtgcgcacatgcagctttgctttccttaatacattatctgctagcaccatctgctagacttgatagacttcttgtttgcagttcattattattttaaatatggaattattttatatgaaaaatagttgtcccacaggttatttttatctttaatagtnatatatgagaggaagggtcaacaaaacaatatagattaacactggagtctcgnctgtnagtatactcattgggtncctgttnaacanaggttngnattnanaaatgttccggngatgcgtcacttaantgacaggatttgtgtgcagaaaaggcgtctccaggggagtgctgcgtggaactctcgatgtttctccaaccaatataaacttccaacctaggtttgtaagccgctcccaaactgtccggttgcggacacacagagcggtgtttccagcga

SEQ ID NO: 425378 - DNA, 1083 bp, Homo sapiens
  misc_feature (676)..(676): n is a, c, g, or t
  misc_feature (805)..(805): n is a, c, g, or t
  misc_feature (858)..(858): n is a, c, g, or t
  misc_feature (863)..(863): n is a, c, g, or t
  misc_feature (880)..(880): n is a, c, g, or t
  misc_feature (887)..(887): n is a, c, g, or t
  misc_feature (892)..(892): n is a, c, g, or t
  misc_feature (898)..(898): n is a, c, g, or t
  misc_feature (900)..(900): n is a, c, g, or t
  misc_feature (904)..(904): n is a, c, g, or t
  misc_feature (906)..(906): n is a, c, g, or t
  misc_feature (918)..(918): n is a, c, g, or t
  misc_feature (933)..(933): n is a, c, g, or t
aagcatccattaatcttcaggatcaacttgagaagacaggggaaaacaaaggatggagtgatccaacgcctgggtttcctgaaccaacaaataatactccaaaaggaattcttcatttgtctcctgatgtttatcaagagatggaagccagccgccacaaagtaatctctggcactactctaggctatttgtcacccaaagatatgaaccaaccttcaagctctttcttcagtatatctcccacatcgaatagttcagctacaattgccagggaactccttatgaatggaacatcttctacagctgaagccataggtttaaaaggaagttctcctactcccccttgttctccagtacaaccttcaaaacaactggaatatttagcaaggattcaaggctttcaggttcactactgtgatagacaaagtggcaaagagtgtgtgacctgtctgacattagcccctgtgcagatgactttccatgctattggaagctccattgaagccagccatgatcaggtataatatgccactgccattttgctgtgttatggcccagctcggaaatggaaggccatcaaaatggaagctatgtgcgcacatgcagctttgctttccttaatacattatctgctagcaccatctgctagacttgaaaaatcaaaattgtttgcgtngggaaattgatatcatagtagatttaaattattttagacttcttgtttgcagttcattattattttaaatatggaattattttatatgaaaaatagttgtcccacaggttatttttatctttaatagtnatatatgagaggaagggtcaacaaaacaatatagattaacactggagtctcgnctgtnagtatactcattgggtncctgttnaacanaggttngnattnanaaatgttccggngatgcgtcacttaantgacaggatttgtgtgcagaaaaggcgtctccaggggagtgctgcgtggaactctcgatgtttctccaaccaatataaacttccaacctaggtttgtaagccgctcccaaactgtccggttgcggacacacagagcggtgtttccagcga

SEQ ID NO: 425379 - DNA, 755 bp, Homo sapiens
aagcatccattaatcttcaggatcaacttgagaagacaggggaaaacaaaggatggagtgatccaacgcctgggtttcctgaaccaacaaataatactccaaaaggaattcttcatttgtctcctgatgtttatcaagagatggaagccagccgccacaaagtaatctctggcactactctaggctatttgtcacccaaagatatgaaccaaccttcaagctctttcttcagtatatctcccacatcgaatagttcagctacaattgccagggaactccttatgaatggaacatcttctacagctgaagccataggtttaaaaggaagttctcctactcccccttgttctccagtacaaccttcaaaacaactggaatatttagcaaggattcaaggctttcaggttcactactgtgatagacaaagtggcaaagagtgtgtgacctgtctgacattagcccctgtgcagatgactttccatgctattggaagctccattgaagccagccatgatcaggtataatatgccactgccattttgctgtgttatggcccagctcggaaatggaaggccatcaaaatggaagctatgtgcgcacatgcagctttgctttccttaatacattatctgctagcaccatctgctagacttgaaaaatcaaaattgtttgcgttgggatttatttaaataatggcattatcttatatgaccaaataagtgtcccacagggtatttttaacctttaatagtaat

SEQ ID NO: 425380 - DNA, 138 bp, Homo sapiens
tcaagcttctaacgatgtacggggacatgaagtttccaataatttttttttctttttttccttcttttttctgtttgtttttagataaaaattttgagaaaaaaaatgaaaaaattctaataaaagaagaaaaatggt

SEQ ID NO: 425381 - DNA, 1426 bp, Homo sapiens
agcggctttgcttccgcggcggggccggaagtaggagcggcggcggcggcggcggcggcggtcgaaagcggagtgaaagagggaggcagggagccggagagccggaaccggagtcgcagcggcggagacccctgtgcggtgcggagggggcggcggccccgactctgacccgcgccgggggtgggccatggcggagatcagcgacctggaccggcagatcgagcagctgcgtcgctgcgagctcatcaaggagagcgaagtcaaggccctgtgcgctaaggccagagagatcttggtagaggagagcaacgtgcagagggtggactcgccagtcacagtgtgcggcgacatccatggacaattctatgacctcaaagagctgttcagagtaggtggcgacgtccctgagaccaactacctcttcatgggggactttgtggaccgtggcttctatagcgtcgaaacgttcctcctgctgctggcacttaaggttcgctatcctgatcgcatcacactgatccggggcaaccatgagagtcgccagatcacgcaggtctatggcttctacgatgagtgcctgcgcaagtacggctcggtgactgtgtggcgctactgcactgagatctttgactacctcagcctgtcagccatcatcgatggcaagatcttctgcgtgcacgggggcctctccccctccatccagaccctggatcagattcggacaatcgaccgaaagcaagaggtgcctcatgatgggcccatgtgtgacctcctctggtctgacccagaagacaccacaggctggggcgtgagcccccgaggagccggctacctatttggcagtgacgtggtggcccagttcaacgcagccaatgacattgacatgatctgccgtgcccaccaactggtgatggaaggttacaagtggcacttcaatgagacggtgctcactgtgtggtcggcacccaactactgctaccgctgtgggaatgtggcagccatcttggagctggacgagcatctccagaaagatttcatcatctttgaggctgctccccaagagacacggggcatcccctccaagaagcccgtggccgactacttcctgtgaccccgcccggcccctgccccctccaacccttctggccctcgcaccactgtgactctgccatcttcctcagacggaggctgggcgtgggggggggctgtcctggctctgctgtcccccaagagggtgcttcgagggtgaggacttctctggagaggcctggagacctagctccatgttcctcctcctctctccccacttgaaccatgaagtttccaataatttttttttctttttttccttcttttttctgtttgtttttagataaaaattttgagaaaaaaaatgaaaaaattctaataaaagaagaaaaatggt

SEQ ID NO: 425382 - DNA, 1400 bp, Homo sapiens
gctggtaccggcccgaggattgtaaggatcggcggtcgaaagcggagtgaaagagggaggcagggagccggagagccggaaccggagtcgcagcggcggagacccctgtgcggtgcggagggggcggcggccccgactctgacccgcgccgggggtgggccatggcggagatcagcgacctggaccggcagatcgagcagctgcgtcgctgcgagctcatcaaggagagcgaagtcaaggccctgtgcgctaaggccagagagatcttggtagaggagagcaacgtgcagagggtggactcgccagtcacagtgtgcggcgacatccatggacaattctatgacctcaaagagctgttcagagtaggtggcgacgtccctgagaccaactacctcttcatgggggactttgtggaccgtggcttctatagcgtcgaaacgttcctcctgctgctggcacttaaggttcgctatcctgatcgcatcacactgatccggggcaaccatgagagtcgccagatcacgcaggtctatggcttctacgatgagtgcctgcgcaagtacggctcggtgactgtgtggcgctactgcactgagatctttgactacctcagcctgtcagccatcatcgatggcaagatcttctgcgtgcacgggggcctctccccctccatccagaccctggatcagattcggacaatcgaccgaaagcaagaggtgcctcatgatgggcccatgtgtgacctcctctggtctgacccagaagacaccacaggctggggcgtgagcccccgaggagccggctacctatttggcagtgacgtggtggcccagttcaacgcagccaatgacattgacatgatctgccgtgcccaccaactggtgatggaaggttacaagtggcacttcaatgagacggtgctcactgtgtggtcggcacccaactactgctaccgctgtgggaatgtggcagccatcttggagctggacgagcatctccagaaagatttcatcatctttgaggctgctccccaagagacacggggcatcccctccaagaagcccgtggccgactacttcctgtgaccccgcccggcccctgccccctccaacccttctggccctcgcaccactgtgactctgccatcttcctcagacggaggctgggcgtgggggggggctgtcctggctctgctgtcccccaagagggtgcttcgagggtgaggacttctctggagaggcctggagacctagctccatgttcctcctcctctctccccacttgaaccatgaagtttccaataatttttttttctttttttccttcttttttctgtttgtttttagataaaaattttgagaaaaaaaatgaaaaaattctaataaaagaagaaaaatggt

SEQ ID NO: 425383 - DNA, 1410 bp, Homo sapiens
agcggctttgcttccgcggcggggccggaagtaggagcggcggcggcggcggcggcggcggtcgaaagcggagtgaaagagggaggcagggagccggagagccggaaccggagtcgcagcggcggagacccctgtgcggtgcggagggggcggcggccccgactctgacccgcgccgggggtgggccatggcggagatcagcgacctggaccggcagatcgagcagctgcgtcgctgcgagctcatcaaggagagcgaagtcaaggccctgtgcgctaaggccagagagatcttggtagaggagagcaacgtgcagagggtggactcgccagtcacagtgtgcggcgacatccatggacaattctatgacctcaaagagctgttcagagtaggtggcgacgtccctgagaccaactacctcttcatgggggactttgtggaccgtggcttctatagcgtcgaaacgttcctcctgctgctggcacttaaggttcgctatcctgatcgcatcacactgatccggggcaaccatgagagtcgccagatcacgcaggtctatggcttctacgatgagtgcctgcgcaagtacggctcggtgactgtgtggcgctactgcactgagatctttgactacctcagcctgtcagccatcatcgatggcaagatcttctgcgtgcacgggggcctctccccctccatccagaccctggatcagattcggacaatcgaccgaaagcaagaggtgcctcatgatgggcccatgtgtgacctcctctggtctgacccagaagacaccacaggctggggcgtgagcccccgaggagccggctacctatttggcagtgacgtggtggcccagttcaacgcagccaatgacattgacatgatctgccgtgcccaccaactggtgatggaaggttacaagtggcacttcaatgagacggtgctcactgtgtggtcggcacccaactactgctaccgctgtgggaatgtggcagccatcttggagctggacgagcatctccagaaagatttcatcatctttgaggctgctccccaagagacacggggcatcccctccaagaagcccgtggccgactacttcctgtggccccctccaacccttctggccctcgcaccactgtgactctgccatcttcctcagacggaggctgggcgtgggggggggctgtcctggctctgctgtcccccaagagggtgcttcgagggtgaggacttctctggagaggcctggagacctagctccatgttcctcctcctctctccccacttgaaccatgaagtttccaataatttttttttctttttttccttcttttttctgtttgtttttagataaaaattttgagaaaaaaaatgaaaaaattctaataaaagaagaaaaatggt

SEQ ID NO: 425384 - DNA, 1407 bp, Homo sapiens
cgtgaacacgctgggtcgaccacgcggtgcggagtggtggacctcggactgaaatatgaaggcatgggagccggagagccgagaaccggagatcgacagcggagagagacccctgtgcggtgcggagggggcggcggccccgactctgacccgcgccgggggtgggccatggcggagatcagcgacctggaccggcagatcgagcagctgcgtcgctgcgagctcatcaaggagagcgaagtcaaggccctgtgcgctaaggccagagagatcttggtagaggagagcaacgtgcagagggtggactcgccagtcacagtgtgcggcgacatccatggacaattctatgacctcaaagagctgttcagagtaggtggcgacgtccctgagaccaactacctcttcatgggggactttgtggaccgtggcttctatagcgtcgaaacgttcctcctgctgctggcacttaaggttcgctatcctgatcgcatcacactgatccggggcaaccatgagagtcgccagatcacgcaggtctatggcttctacgatgagtgcctgcgcaagtacggctcggtgactgtgtggcgctactgcactgagatctttgactacctcagcctgtcagccatcatcgatggcaagatcttctgcgtgcacgggggcctctccccctccatccagaccctggatcagattcggacaatcgaccgaaagcaagaggtgcctcatgatgggcccatgtgtgacctcctctggtctgacccagaagacaccacaggctggggcgtgagcccccgaggagccggctacctatttggcagtgacgtggtggcccagttcaacgcagccaatgacattgacatgatctgccgtgcccaccaactggtgatggaaggttacaagtggcacttcaatgagacggtgctcactgtgtggtcggcacccaactactgctaccgctgtgggaatgtggcagccatcttggagctggacgagcatctccagaaagatttcatcatctttgaggctgctccccaagagacacggggcatcccctccaagaagcccgtggccgactacttcctgtgaccccgcccggcccctgccccctccaacccttctggccctcgcaccactgtgactctgccatcttcctcagacggaggctgggcgtgggggggggctgtcctggctctgctgtcccccaagagggtgcttcgagggtgaggacttctctggagaggcctggagacctagctccatgttcctcctcctctctccccacttgaaccatgaagtttccaataatttttttttctttttttccttcttttttctgtttgtttttagataaaaattttgagaaaaaaaatgaaaaaattctaataaaagaagaaaaatggt

SEQ ID NO: 425385 - DNA, 1485 bp, Homo sapiens
agcggctttgcttccgcggcggggccggaagtaggagcggcggcggcggcggcggcggcggtcgaaagcggagtgaaagagggaggcagggagccggagagccggaaccggagtcgcagcggcggagacccctgtgcggtgcggagggggcggcggccccgactctgacccgcgccgggggtgggccatggcggagatcagcgacctggaccggcagatcgagcagctgcgtcgctgcgagctcatcaaggagagcgaagtcaaggccctgtgcgctaaggccaggtcaggaattgggctgggctggcctggctgtggtgaccctggtcttctcctgtctccagagagatcttggtagaggagagcaacgtgcagagggtggactcgccagtcacagtgtgcggcgacatccatggacaattctatgacctcaaagagctgttcagagtaggtggcgacgtccctgagaccaactacctcttcatgggggactttgtggaccgtggcttctatagcgtcgaaacgttcctcctgctgctggcacttaaggttcgctatcctgatcgcatcacactgatccggggcaaccatgagagtcgccagatcacgcaggtctatggcttctacgatgagtgcctgcgcaagtacggctcggtgactgtgtggcgctactgcactgagatctttgactacctcagcctgtcagccatcatcgatggcaagatcttctgcgtgcacgggggcctctccccctccatccagaccctggatcagattcggacaatcgaccgaaagcaagaggtgcctcatgatgggcccatgtgtgacctcctctggtctgacccagaagacaccacaggctggggcgtgagcccccgaggagccggctacctatttggcagtgacgtggtggcccagttcaacgcagccaatgacattgacatgatctgccgtgcccaccaactggtgatggaaggttacaagtggcacttcaatgagacggtgctcactgtgtggtcggcacccaactactgctaccgctgtgggaatgtggcagccatcttggagctggacgagcatctccagaaagatttcatcatctttgaggctgctccccaagagacacggggcatcccctccaagaagcccgtggccgactacttcctgtgaccccgcccggcccctgccccctccaacccttctggccctcgcaccactgtgactctgccatcttcctcagacggaggctgggcgtgggggggggctgtcctggctctgctgtcccccaagagggtgcttcgagggtgaggacttctctggagaggcctggagacctagctccatgttcctcctcctctctccccacttgaaccatgaagtttccaataatttttttttctttttttccttcttttttctgtttgtttttagataaaaattttgagaaaaaaaatgaaaaaattctaataaaagaagaaaaatggt

SEQ ID NO: 425386 - DNA, 1393 bp, Homo sapiens
agcggctttgcttccgcggcggggccggaagtaggagcggcggcggcggcggcggcggcggtcgaaagcggagtgaaagagggaggcagggagccggagagccggaaccggagtcgcagcggcggagacccctgtgcggtgcggagggggcggcggccccgactctgacccgcgccgggggtgggccatggcggagatcagcgacctggaccggcagatcgagcagctgcgtcgctgcgagctcatcaaggagagcgaagtcaaggccctgtgcgctaaggccagagagatcttggtagaggagagcaacgtgcagagggtggactcgccagtcacagtgtgcggcgacatccatggacaattctatgacctcaaagagctgttcagagtaggtggcgacgtccctgagaccaactacctcttcatgggggactttgtggaccgtggcttctatagcgtcgaaacgttcctcctgctgctggcacttaaggttcgctatcctgatcgcatcacactgatccggggcaaccatgagagtcgccagatcacgcaggtctatggcttctacgatgagtgcctgcgcaagtacggctcggtgactgtgtggcgctactgcactgagatctttgactacctcagcctgtcagccatcatcgatggcaagatcttctgcgtgcacgggggcctctccccctccatccagaccctggatcagattcggacaatcgaccgaaagcaagaggtgcctcatgatgggcccatgtgtgacctcctctggtctgacccagaagacaccacaggctggggcgtgagcccccgaggagccggctacctatttggcagtgacgtggtggcccagttcaacgcagccaatgacattgacatgatctgccgtgcccaccaactggtgatggaaggttacaagtggcacttcaatgagacggtgctcactgtgtggtcggcacccaactactgctaccgctgtgggaatgtggcagccatcttggagctggacgagcatctccagaaagatttcatcatctttgaggctgctccccaagagacacggggcatcccaccccgcccggcccctgccccctccaacccttctggccctcgcaccactgtgactctgccatcttcctcagacggaggctgggcgtgggggggggctgtcctggctctgctgtcccccaagagggtgcttcgagggtgaggacttctctggagaggcctggagacctagctccatgttcctcctcctctctccccacttgaaccatgaagtttccaataatttttttttctttttttccttcttttttctgtttgtttttagataaaaattttgagaaaaaaaatgaaaaaattctaataaaagaagaaaaatggt

SEQ ID NO: 425387 - DNA, 1374 bp, Homo sapiens
agcggctttgcttccgcggcggggccggaagtaggagcggcggcggcggcggcggcggcggtcgaaagcggagtgaaagagggaggcagggagccggagagccggaaccggagtcgcagcggcggagacccctgtgcggtgcggagggggcggcggccccgactctgacccgcgccgggggtgggccatggcggagatcagcgacctggaccggcagatcgagcagctgcgtcgctgcgagctcatcaaggagagcgaagtcaaggccctgtgcgctaaggccaggtgtgcggcgacatccatggacaattctatgacctcaaagagctgttcagagtaggtggcgacgtccctgagaccaactacctcttcatgggggactttgtggaccgtggcttctatagcgtcgaaacgttcctcctgctgctggcacttaaggttcgctatcctgatcgcatcacactgatccggggcaaccatgagagtcgccagatcacgcaggtctatggcttctacgatgagtgcctgcgcaagtacggctcggtgactgtgtggcgctactgcactgagatctttgactacctcagcctgtcagccatcatcgatggcaagatcttctgcgtgcacgggggcctctccccctccatccagaccctggatcagattcggacaatcgaccgaaagcaagaggtgcctcatgatgggcccatgtgtgacctcctctggtctgacccagaagacaccacaggctggggcgtgagcccccgaggagccggctacctatttggcagtgacgtggtggcccagttcaacgcagccaatgacattgacatgatctgccgtgcccaccaactggtgatggaaggttacaagtggcacttcaatgagacggtgctcactgtgtggtcggcacccaactactgctaccgctgtgggaatgtggcagccatcttggagctggacgagcatctccagaaagatttcatcatctttgaggctgctccccaagagacacggggcatcccctccaagaagcccgtggccgactacttcctgtgaccccgcccggcccctgccccctccaacccttctggccctcgcaccactgtgactctgccatcttcctcagacggaggctgggcgtgggggggggctgtcctggctctgctgtcccccaagagggtgcttcgagggtgaggacttctctggagaggcctggagacctagctccatgttcctcctcctctctccccacttgaaccatgaagtttccaataatttttttttctttttttccttcttttttctgtttgtttttagataaaaattttgagaaaaaaaatgaaaaaattctaataaaagaagaaaaatggt

SEQ ID NO: 425388 - DNA, 1163 bp, Homo sapiens
agcggctttgcttccgcggcggggccggaagtaggagcggcggcggcggcggcggcggcggtcgaaagcggagtgaaagagggaggcagggagccggagagccggaaccggagtcgcagcggcggagacccctgtgcggtgcggagggggcggcggccccgactctgacccgcgccgggggtgggccatggcggagatcagcgacctggaccggcagatcgagcagctgcgtcgctgcgagctcatcaaggagagcgaagtcaaggccctgtgcgctaaggccagagagatcttggtagaggagagcaacgtgcagagggtggactcgccagtcacagtgtgcggcgacatccatggacaattctatgacctcaaagagctgttcagagtaggtggcgacgtccctgagaccaactacctcttcatgggggactttgtggaccgtggcttctatagcgtcgaaacgttcctcctgctgctggcacttaaggttcgctatcctgatcgcatcacactgatccggggcaaccatgagagtcgccagatcacgcaggtctatggcttctacgatgagtgcctgcgcaagtacggctcggtgactgtgtggcgctactgcactgagatctttgactacctcagcctgtcagccatcatcgatggcaagatcttctgcgtgcacgggggcctctccccctccatccagaccctggatcagattcggacaatcgaccgaaagcaagaggtgcctcatgatgggcccatgtgtgacctcctctggtctgacccagaagacaccacaggctggggcgtgagcccccgaggagccggctacctatttggcagtgacgtggtggcccagttcaacgcagccaatgacattgacatgatctgccgtgcccaccaactggtgatggaaggttacaagtggcacttcaatgagacggtgctcactgtgtggtcggcacccaactactgctaccgggtgaggacttctctggagaggcctggagacctagctccatgttcctcctcctctctccccacttgaaccatgaagtttccaataatttttttttctttttttccttcttttttctgtttgtttttagataaaaattttgagaaaaaaaatgaaaaaattctaataaaagaagaaaaatggt

SEQ ID NO: 425389 - DNA, 1263 bp, Homo sapiens
agcggctttgcttccgcggcggggccggaagtaggagcggcggcggcggcggcggcggcggtcgaaagcggagtgaaagagggaggcagggagccggagagccggaaccggagtcgcagcggcggagacccctgtgcggtgcggagggggcggcggccccgactctgacccgcgccgggggtgggccatggcggagatcagcgacctggaccggcagatcgagcagctgcgtcgctgcgagctcatcaaggagagcgaagtcaaggccctgtgcgctaaggccagagagatcttggtagaggagagcaacgtgcagagggtggactcgccagtcacagtgtgcggcgacatccatggacaattctatgacctcaaagagctgttcagagtaggtggcgacgtccctgagaccaactacctcttcatgggggactttgtggaccgtggcttctatagcgtcgaaacgttcctcctgctgctggcacttaaggttcgctatcctgatcgcatcacactgatccggggcaaccatgagagtcgccagatcacgcaggtctatggcttctacgatgagtgcctgcgcaagtacggctcggtgactgtgtggcgctactgcactgagatctttgactacctcagcctgtcagccatcatcgatggcaagatcttctgcgtgcacgggggcctctccccctccatccagaccctggatcagattcggacaatcgaccgaaagcaagaggtgcctcatgatgggcccatgtgtgacctcctctggtctgacccagaagacaccacaggctggggcgtgagcccccgaggagccggctacctatttggcagtgacgtggtggcccagttcaacgcagccaatgacattgacatgatctgccgtgcccaccaactggtgatggaaggttacaagtggcacttcaatgagacggtgctcactgtgtggtcggcacccaactactgctaccgctgtgggaatgtggcagccatcttggagctggacgagcatctccagaaagatttcatcatctttgaggctgtctgctgtcccccaagagggtgcttcgagggtgaggacttctctggagaggcctggagacctagctccatgttcctcctcctctctccccacttgaaccatgaagtttccaataatttttttttctttttttccttcttttttctgtttgtttttagataaaaattttgagaaaaaaaatgaaaaaattctaataaaagaagaaaaatggt

SEQ ID NO: 425390 - DNA, 1089 bp, Homo sapiens
gactagttctagatcgcgagcgatctagaactagtcaaagagctgttcagagtaggtggcgacgtccctgagaccaactacctcttcatgggggactttgtggaccgtggcttctatagcgtcgaaacgttcctcctgctgctggcacttaaggttcgctatcctgatcgcatcacactgatccggggcaaccatgagagtcgccagatcacgcaggtctatggcttctacgatgagtgcctgcgcaagtacggctcggtgactgtgtggcgctactgcactgagatctttgactacctcagcctgtcagccatcatcgatggcaagatcttctgcgtgcacgggggcctctccccctccatccagaccctggatcagattcggacaatcgaccgaaagcaagaggtgcctcatgatgggcccatgtgtgacctcctctggtctgacccagaagacaccacaggctggggcgtgagcccccgaggagccggctacctatttggcagtgacgtggtggcccagttcaacgcagccaatgacattgacatgatctgccgtgcccaccaactggtgatggaaggttacaagtggcacttcaatgagacggtgctcactgtgtggtcggcacccaactactgctaccgctgtgggaatgtggcagccatcttggagctggacgagcatctccagaaagatttcatcatctttgaggctgctccccaagagacacggggcatcccctccaagaagcccgtggccgactacttcctgtgaccccgcccggcccctgccccctccaacccttctggccctcgcaccactgtgactctgccatcttcctcagacggaggctgggcgtgggggggggctgtcctggctctgctgtcccccaagagggtgcttcgagggtgaggacttctctggagaggcctggagacctagctccatgttcctcctcctctctccccacttgaaccatgaagtttccaataatttttttttctttttttccttcttttttctgtttgtttttagataaaaattttgagaaaaaaaatgaaaaaattctaataaaagaagaaaaatggt

SEQ ID NO: 425391 - DNA, 1971 bp, Homo sapiens
agcggctttgcttccgcggcggggccggaagtaggagcggcggcggcggcggcggcggcggtcgaaagcggagtgaaagagggaggcagggagccggagagccggaaccggagtcgcagcggcggagacccctgtgcggtgcggagggggcggcggccccgactctgacccgcgccgggggtgggccatggcggagatcagcgacctggaccggcagatcgagcagctgcgtcgctgcgagctcatcaaggagagcgaagtcaaggccctgtgcgctaaggccagagagatcttggtagaggagagcaacgtgcagagggtggactcgccagtcacagtgtgcggcgacatccatggacaattctatgacctcaaagagctgttcagagtaggtggcgacgtccctgagaccaactacctcttcatgggggactttgtggaccgtggcttctatagcgtcgaaacgttcctcctgctgctggcacttaaggtggcagtccccggcttctgcacccccaacctgggcgacctcgggccgggcctgtcttagtccgttccgccctcatctcctatcgtgaccagccccaccttggagctgtgtcactggtgatggaccgattctgcttttgggggtggtcagagacttgatgggggttgaggccagcggggcagcattctgggaggggcagaggctcactgttgcgaatgtggcaggtcattgatgccactggtgggagaggcagtgtggggccagatgacaaagggcctgggtgccttgctagggacccggtctgtgtctggtaggtgaaagaagagccattaggttcatagttgagggaatgggtcagctttacattctctggaggggtcgtgtgggcctgggaggtggctgatgccacacgattcaggcaagaggtgccaggagtgtgctgggcagtggttgtgaggatggcaggctggcgggcacgaggaggtcagagagggatgtgtggagagaccgtctaggcgccagccctggcttggtggccaccccaggttcgctatcctgatcgcatcacactgatccggggcaaccatgagagtcgccagatcacgcaggtctatggcttctacgatgagtgcctgcgcaagtacggctcggtgactgtgtggcgctactgcactgagatctttgactacctcagcctgtcagccatcatcgatggcaagatcttctgcgtgcacgggggcctctccccctccatccagaccctggatcagattcggacaatcgaccgaaagcaagaggtgcctcatgatgggcccatgtgtgacctcctctggtctgacccagaagacaccacaggctggggcgtgagcccccgaggagccggctacctatttggcagtgacgtggtggcccagttcaacgcagccaatgacattgacatgatctgccgtgcccaccaactggtgatggaaggttacaagtggcacttcaatgagacggtgctcactgtgtggtcggcacccaactactgctaccgctgtgggaatgtggcagccatcttggagctggacgagcatctccagaaagatttcatcatctttgaggctgctccccaagagacacggggcatcccctccaagaagcccgtggccgactacttcctgtgaccccgcccggcccctgccccctccaacccttctggccctcgcaccactgtgactctgccatcttcctcagacggaggctgggcgtgggggggggctgtcctggctctgctgtcccccaagagggtgcttcgagggtgaggacttctctggagaggcctggagacctagctccatgttcctcctcctctctccccacttgaaccatgaagtttccaataatttttttttctttttttccttcttttttctgtttgtttttagataaaaattttgagaaaaaaaatgaaaaaattctaataaaagaagaaaaatggt

SEQ ID NO: 425392 - DNA, 1614 bp, Homo sapiens
cgacagggcaaaactttctacttccccacaggtaggtggcgacgtccctgagaccaactacctcttcatgggggactttgtggaccgtggcttctatagcgtcgaaacgttcctcctgctgctggcacttaaggtggcagtccccggcttctgcacccccaacctgggcgacctcgggccgggcctgtcttagtccgttccgccctcatctcctatcgtgaccagccccaccttggagctgtgtcactggtgatggaccgattctgcttttgggggtggtcagagacttgatgggggttgaggccagcggggcagcattctgggaggggcagaggctcactgttgcgaatgtggcaggtcattgatgccactggtgggagaggcagtgtggggccagatgacaaagggcctgggtgccttgctagggacccggtctgtgtctggtaggtgaaagaagagccattaggttcatagttgagggaatgggtcagctttacattctctggaggggtcgtgtgggcctgggaggtggctgatgccacacgattcaggcaagaggtgccaggagtgtgctgggcagtggttgtgaggatggcaggctggcgggcacgaggaggtcagagagggatgtgtggagagaccgtctaggcgccagccctggcttggtggccaccccaggttcgctatcctgatcgcatcacactgatccggggcaaccatgagagtcgccagatcacgcaggtctatggcttctacgatgagtgcctgcgcaagtacggctcggtgactgtgtggcgctactgcactgagatctttgactacctcagcctgtcagccatcatcgatggcaagatcttctgcgtgcacgggggcctctccccctccatccagaccctggatcagattcggacaatcgaccgaaagcaagaggtgcctcatgatgggcccatgtgtgacctcctctggtctgacccagaagacaccacaggctggggcgtgagcccccgaggagccggctacctatttggcagtgacgtggtggcccagttcaacgcagccaatgacattgacatgatctgccgtgcccaccaactggtgatggaaggttacaagtggcacttcaatgagacggtgctcactgtgtggtcggcacccaactactgctaccgctgtgggaatgtggcagccatcttggagctggacgagcatctccagaaagatttcatcatctttgaggctgctccccaagagacacggggcatcccctccaagaagcccgtggccgactacttcctgtgaccccgcccggcccctgccccctccaacccttctggccctcgcaccactgtgactctgccatcttcctcagacggaggctgggcgtgggggggggctgtcctggctctgctgtcccccaagagggtgcttcgagggtgaggacttctctggagaggcctggagacctagctccatgttcctcctcctctctccccacttgaaccatgaagtttccaataatttttttttctttttttccttcttttttctgtttgtttttagataaaaattttgagaaaaaaaatgaaaaaattctaataaaagaagaaaaatggt

SEQ ID NO: 425393 - DNA, 1307 bp, Homo sapiens
acgggcagtactctacggtttatggtagcgaggctgggtggcggtcgaaagcggagtgaaagagggaggcagggagccggagagccggaaccggagtcgcagcggcggagacccctgtgcggtgcggagggggcggcggccccgactctgacccgcgccgggggtgggccatggcggagatcagcgacctggaccggcagatcgagcagctgcgtcgctgcgagctcatcaaggagagcgaagtcaaggccctgtgcgctaaggccagagagatcttggtagaggagagcaacgtgcagagggtggactcgccagtcacagtgtgcggcgacatccatggacaattctatgacctcaaagagctgttcagagttcgctatcctgatcgcatcacactgatccggggcaaccatgagagtcgccagatcacgcaggtctatggcttctacgatgagtgcctgcgcaagtacggctcggtgactgtgtggcgctactgcactgagatctttgactacctcagcctgtcagccatcatcgatggcaagatcttctgcgtgcacgggggcctctccccctccatccagaccctggatcagattcggacaatcgaccgaaagcaagaggtgcctcatgatgggcccatgtgtgacctcctctggtctgacccagaagacaccacaggctggggcgtgagcccccgaggagccggctacctatttggcagtgacgtggtggcccagttcaacgcagccaatgacattgacatgatctgccgtgcccaccaactggtgatggaaggttacaagtggcacttcaatgagacggtgctcactgtgtggtcggcacccaactactgctaccgctgtgggaatgtggcagccatcttggagctggacgagcatctccagaaagatttcatcatctttgaggctgctccccaagagacacggggcatcccctccaagaagcccgtggccgactacttcctgtgaccccgcccggcccctgccccctccaacccttctggccctcgcaccactgtgactctgccatcttcctcagacggaggctgggcgtgggggggggctgtcctggctctgctgtcccccaagagggtgcttcgagggtgaggacttctctggagaggcctggagacctagctccatgttcctcctcctctctccccacttgaaccatgaagtttccaataatttttttttctttttttccttcttttttctgtttgtttttagataaaaattttgagaaaaaaaatgaaaaaattctaataaaagaagaaaaatggt

SEQ ID NO: 425394 - DNA, 1776 bp, Homo sapiens
  misc_feature (30)..(30): n is a, c, g, or t
cttctttgctcactttactatgggtgtatnttaatcttgtataaaaatatgcatgaatgagccatgcacatgtatacgttatgtatttgacaagtggtggtgaaacaaaatcaaaacagatttgatttgtgtttttgaaatgtcagtacattttgtgccactaacactgtgatgtataaaagagctgttcagagtaggtggcgacgtccctgagaccaactacctcttcatgggggactttgtggaccgtggcttctatagcgtcgaaacgttcctcctgctgctggcacttaaggtggcagtccccggcttctgcacccccaacctgggcgacctcgggccgggcctgtcttagtccgttccgccctcatctcctatcgtgaccagccccaccttggagctgtgtcactggtgatggaccgattctgcttttgggggtggtcagagacttgatgggggttgaggccagcggggcagcattctgggaggggcagaggctcactgttgcgaatgtggcaggtcattgatgccactggtgggagaggcagtgtggggccagatgacaaagggcctgggtgccttgctagggacccggtctgtgtctggtaggtgaaagaagagccattaggttcatagttgagggaatgggtcagctttacattctctggaggggtcgtgtgggcctgggaggtggctgatgccacacgattcaggcaagaggtgccaggagtgtgctgggcagtggttgtgaggatggcaggctggcgggcacgaggaggtcagagagggatgtgtggagagaccgtctaggcgccagccctggcttggtggccaccccaggttcgctatcctgatcgcatcacactgatccggggcaaccatgagagtcgccagatcacgcaggtctatggcttctacgatgagtgcctgcgcaagtacggctcggtgactgtgtggcgctactgcactgagatctttgactacctcagcctgtcagccatcatcgatggcaagatcttctgcgtgcacgggggcctctccccctccatccagaccctggatcagattcggacaatcgaccgaaagcaagaggtgcctcatgatgggcccatgtgtgacctcctctggtctgacccagaagacaccacaggctggggcgtgagcccccgaggagccggctacctatttggcagtgacgtggtggcccagttcaacgcagccaatgacattgacatgatctgccgtgcccaccaactggtgatggaaggttacaagtggcacttcaatgagacggtgctcactgtgtggtcggcacccaactactgctaccgctgtgggaatgtggcagccatcttggagctggacgagcatctccagaaagatttcatcatctttgaggctgctccccaagagacacggggcatcccctccaagaagcccgtggccgactacttcctgtgaccccgcccggcccctgccccctccaacccttctggccctcgcaccactgtgactctgccatcttcctcagacggaggctgggcgtgggggggggctgtcctggctctgctgtcccccaagagggtgcttcgagggtgaggacttctctggagaggcctggagacctagctccatgttcctcctcctctctccccacttgaaccatgaagtttccaataatttttttttctttttttccttcttttttctgtttgtttttagataaaaattttgagaaaaaaaatgaaaaaattctaataaaagaagaaaaatggt

SEQ ID NO: 425395 - DNA, 1180 bp, Homo sapiens
agcggctttgcttccgcggcggggccggaagtaggagcggcggcggcggcggcggcggcggtcgaaagcggagtgaaagagggaggcagggagccggagagccggaaccggagtcgcagcggcggagacccctgtgcggtgcggagggggcggcggccccgactctgacccgcgccgggggtgggccatggcggagatcagcgacctggaccggcagatcgagcagctgcgtcgctgcgagctcatcaaggagagcgaagtcaaggccctgtgcgctaaggccagagagatcttggtagaggagagcaacgtgcagagggtggactcgccagtcacagtgtgcggcgacatccatggacaattctatgacctcaaagagctgttcagagtaggtggcgacgtccctgagaccaactacctcttcatgggggactttgtggaccgtggcttctatagcgtcgaaacgttcctcctgctgctggcacttaaggttcgctatcctgatcgcatcacactgatccggggcaaccatgagagtcgccagatcacgcaggtctatggcttctacgatgagtgcctgcgcaagtacggctcggtgactgtggtggcccagttcaacgcagccaatgacattgacatgatctgccgtgcccaccaactggtgatggaaggttacaagtggcacttcaatgagacggtgctcactgtgtggtcggcacccaactactgctaccgctgtgggaatgtggcagccatcttggagctggacgagcatctccagaaagatttcatcatctttgaggctgctccccaagagacacggggcatcccctccaagaagcccgtggccgactacttcctgtgaccccgcccggcccctgccccctccaacccttctggccctcgcaccactgtgactctgccatcttcctcagacggaggctgggcgtgggggggggctgtcctggctctgctgtcccccaagagggtgcttcgagggtgaggacttctctggagaggcctggagacctagctccatgttcctcctcctctctccccacttgaaccatgaagtttccaataatttttttttctttttttccttcttttttctgtttgtttttagataaaaattttgagaaaaaaaatgaaaaaattctaataaaagaagaaaaatggt

SEQ ID NO: 425396 - DNA, 675 bp, Homo sapiens
  misc_feature (2)..(2): n is a, c, g, or t
  misc_feature (14)..(14): n is a, c, g, or t
  misc_feature (18)..(18): n is a, c, g, or t
  misc_feature (20)..(20): n is a, c, g, or t
  misc_feature (24)..(24): n is a, c, g, or t
gngagagagagagnagananaganagagagagagagagagagagagagagagagagagagagagagagagaggccggctacctatttggcagtgacgtggtggcccagttcaacgcagccaatgacattgacatgatctgccgtgcccaccaactggtgatggaaggttacaagtggcacttcaatgagacggtgctcactgtgtggtcggcacccaactactgctaccgctgtgggaatgtggcagccatcttggagctggacgagcatctccagaaagatttcatcatctttgaggctgctccccaagagacacggggcatcccctccaagaagcccgtggccgactacttcctgtgaccccgcccggcccctgccccctccaacccttctggccctcgcaccactgtgactctgccatcttcctcagacggaggctgggcgtgggggggggctgtcctggctctgctgtcccccaagagggtgcttcgagggtgaggacttctctggagaggcctggagacctagctccatgttcctcctcctctctccccacttgaaccatgaagtttccaataatttttttttctttttttccttcttttttctgtttgtttttagataaaaattttgagaaaaaaaatgaaaaaattctaataaaagaagaaaaatggt

SEQ ID NO: 425397 - DNA, 980 bp, Homo sapiens
agcggctttgcttccgcggcggggccggaagtaggagcggcggcggcggcggcggcggcggtcgaaagcggagtgaaagagggaggcagggagccggagagccggaaccggagtcgcagcggcggagacccctgtgcggtgcggagggggcggcggccccgactctgacccgcgccgggggtgggccatggcggagatcagcgacctggaccggcagatcgagcagctgcgtcgctgcgagctcatcaaggagagcgaagtcaaggccctgtgcgctaaggccagagagatcttggtagaggagagcaacgtgcagagggtggactcgccagtcacagtgtgcggcgacatccatggacaattctatgacctcaaagagctgttcagagtaggtggcgacgtccctgagaccaactacctcttcatgggggactttgtggaccgtggcttctatagcgtcgaaacgttcctcctgctgctggcacttaaggttcgctatcctgatcgcatcacactgatccggggcaaccatgagagtcgccagatcacgcaggtctatggcttctacgatgagtgcctgcgcaagtacggctcggtgactgtgtggcgctactgcactgagatctttgactacctcagcctgtcagccatcatcgatggcaagaccccgcccggcccctgccccctccaacccttctggccctcgcaccactgtgactctgccatcttcctcagacggaggctgggcgtgggggggggctgtcctggctctgctgtcccccaagagggtgcttcgagggtgaggacttctctggagaggcctggagacctagctccatgttcctcctcctctctccccacttgaaccatgaagtttccaataatttttttttctttttttccttcttttttctgtttgtttttagataaaaattttgagaaaaaaaatgaaaaaattctaataaaagaagaaaaatggt

SEQ ID NO: 425398 - DNA, 1525 bp, Homo sapiens
agcggctttgcttccgcggcggggccggaagtaggagcggcggcggcggcggcggcggcggtcgaaagcggagtgaaagagggaggcagggagccggagagccggaaccggagtcgcagcggcggagacccctgtgcggtgcggagggggcggcggccccgactctgacccgcgccgggggtgggccatggcggagatcagcgacctggaccggcagatcgagcagctgcgtcgctgcgagctcatcaaggagagcgaagtcaaggccctgtgcgctaaggccagagagatcttggtagaggagagcaacgtgcagagggtggactcgccagtcacagtgtgcggcgacatccatggacaattctatgacctcaaagagctgttcagagtaggtggcgacgtccctgagaccaactacctcttcatgggggactttgtggaccgtggcttctatagcgtcgaaacgttcctcctgctgctggcacttaaggtggcagtccccggcttctgcacccccaacctgggcgacctcgggccgggcctgtcttagtccgttccgccctcatctcctatcgtgaccagccccaccttggagctgtgtcactggtgatggaccgattctgcttttgggggtggtcagagacttgatgggggttgaggccagcggggcagcattctgggaggggcagaggctcactgttgcgaatgtggcaggtcattgatgccactggtgggagaggcagtgtggggccagatgacaaagggcctgggtgccttgctagggacccggtctgtgtctggtaggtgaaagaagagccattaggttcatagttgagggaatgggtcagctttacattctctggaggggtcgtgtgggcctgggaggtggctgatgccacacgattcaggcaagaggtgccaggagtgtgctgggcagtggttgtgaggatggcaggctggcgggcacgaggaggtcagagagggatgtgtggagagaccgtctaggcgccagccctggcttggtggccaccccaggttcgctatcctgatcgcatcacactgatccggggcaaccatgagagtcgccagatcacgcaggtctatggcttctacgatgagtgcctgcgcaagtacggctcggtgactgtgtggcgctactgcactgagatctttgactacctcagcctgtcagccatcatcgatggcaagaccccgcccggcccctgccccctccaacccttctggccctcgcaccactgtgactctgccatcttcctcagacggaggctgggcgtgggggggggctgtcctggctctgctgtcccccaagagggtgcttcgagggtgaggacttctctggagaggcctggagacctagctccatgttcctcctcctctctccccacttgaaccatgaagtttccaataatttttttttctttttttccttcttttttctgtttgtttttagataaaaattttgagaaaaaaaatgaaaaaattctaataaaagaagaaaaatggt

SEQ ID NO: 425399 - DNA, 550 bp, Homo sapiens
tgcgtgcacgggggcctctccccctccatccagaccctggatcagattcggacaatcgaccgaaagcaagaggtgcctcatgatgggcccatgtgtgacctcctctggtctgacccagaaggtgagggcatgtgggcaggggcaggcagggacagccaggaggggttgggaaagagagggagcagggctggtcttcactgtcactcgtcctccacctgccaaatggctggaaccctggaggaggagcagggaggcctgcatggcaggtgctttgagcacacagtggcttggggcatggcccagagggctgtggaggacaaccaagtcatggctccctgaagtgaaggggccttagaacatgacagcagcttcttcagaggtcagaaccccagaatggtagccccctgagacccctcattttgtgggttttccactagtgtagagcagagctgagatttaaagtcaggtcttctgaggaccagccagagttcctgttgtcacaggcacacacgcacaggcagcctctgctccagcgcagacacacacacac

SEQ ID NO: 425400 - DNA, 427 bp, Homo sapiens
gagcttccaggactgcctcatatcctcccctccccccaaaaaaggtcaggaattgggctgggctggcctggctgtggtgaccctggtcttctcctgtctccagagagatcttggtagaggagagcaacgtgcagagggtggactcgccagtcacagtgagtacctgctgtccctgcagagccaggcctggtctttcaggcacatgaagtttcctcttcatcttgggggctctataagcccaaccctaagctcttttatctgtcctttccctcaccttcaacggagcactgctaaaagaagtgggggttgctgtgcacgttggctcacacctgtgatcccagcattttgggagggcaaggtgggcacatcacttgaggttaggagttcgagaccagcctggccaacatggtgaaaccgtttctactaa

SEQ ID NO: 425401 - DNA, 4932 bp, Homo sapiens
tctcctcctaccggtcgggtgccccggggcgttccctctgccgctgcttctcggcgcggttcctacccggccgctccccgaggcgcgggctctggcggcctcgaccgactaggacgccccgtgcgccgcccgcgggccgccgcctccctgggcgcgcggggccagcatggagctcttccaagccaaggaccactacatcctgcagcagggcgagcgcgcgctgtggtgcagccgccgcgacggcggcctccagctccgacccgctactgatctacttcttgcctggaatcccatttgtttggggttggtagaaggtgttattgggaaaattcaacttcattcagatcttccatggtggcttattctaattcggcagaaagcattggtgggcaaactcccaggagaccatgaggtctgtaaagttaccaaaattgctgtgctctcactttctgaaatggaacctcaggatcttgagctagagctctgtaagaagcatcattttggtattaacaaaccagagaagatcataccatctcctgatgactcaaagtttctactgaagacctttacgcatattaaatccaatgtgtctgctcctaataaaaagaaagttaaggaaagtaaagagaaggagaagttggagaggagattacttgaagagttgctgaagatgttcatggactcagaatccttttattatagcttgacctatgacctgaccaattccgtgcagaggcagagcactggggagagggacggtcggcccctctggcagaaggttgatgaccgatttttttggaataaatacatgatacaagatcttactgagattggtactccagatgtggacttttggattatccccatgatccaaggttttgtgcagattgaagaacttgtggttaattataccgaatcatctgatgatgagaaaagcagcccagagaccccccctcaggagtccacctgtgtagatgatattcacccacgatttctagtggctctcatttcacgccgaagtaggcacagagcaggaatgcgctataaacgaagaggagtggataaaaatggaaatgttgccaattatgtggagactgagcagttgattcatgttcataatcataccctgtcatttgttcaaacacgaggctctgtgcctgtcttttggagccaggttgggtatcgatataacccaagaccgcggctggacagaagtgaaaaggaaactgttgcctatttctgtgcccatttcgaagaacaactgaacatttacaaaaaacaggttattattaacttggtagaccaggcaggaagagagaagattattggcgatgcttacctgaagcaagtgttgcttttcaacaactcacacctcacttacgtttcgtttgacttccatgagcactgccgaggaatgaagtttgagaatgttcagacactaacagatgccatttatgacattattcttgatatgaagtggtgttgggttgatgaagctggggtaatatgtaagcaggaagggatttttcgtgttaattgtatggactgcctggatcgcaccaacgtggtccaagctgccatcgcgagagtggtcatggaacagcagctgaaaaaattaggtgtgatgcccccggaacagccattacctgtgaaatgtaatcgcatctaccagataatgtgggccaataatggtgactccattagcagacagtatgctgggacagctgctctgaagggtgactttacaaggacaggagaaaggaagttagcaggagttatgaaagatggagtgaactcagcaaacagatattacctcaaccgatttaaggatgcttataggcaagctgttatagatttgatgcaaggcattccagtgacagaagatctttattccatatttaccaaggagaaagaacatgaagctttgcataaggaaaatcagagaagccaccaggaactaattagccagctcttacaaagttacatgaagttactactgcctgatgatgagaagttccatgggggctgggccctcattgactgtgaccctagcctcattgatgctactcacagagacgtggatgtgctgttactgctttctaactctgcctactacgtggcctattatgatgatgaagttgataaagtaaaccagtatcaacgactaagtctagaaaacctggaaaaaattgaaataggccctgaacccactctttttggtaagccaaagttctcctgcatgcgactgcactacagatacaaagaagcgagtggctatttccacacattgcgagctgtaatgcgtaatcctgaagaggatggaaaagatacccttcagtgcattgcagagatgctgcagatcaccaagcaagccatgggatcggatttacccataattgagaagaaacttgagaggaagagcagtaaacctcacgaagacatcattggtatcaggtctcaaaaccaaggttctttggcccagggaaagaattttttaatgagcaaattttcatctctaaatcaaaaagtgaagcagaccaaatccaatgtaaatattggcaacctccgaaagctaggaaactttaccaaacctgaaatgaaagttaactttctaaaaccaaacttaaaagtaaatctttggaaatcagatagtagtcttgaaactatggaaaacacaggagtgatggataaggttcaggcagagtctgatggggacatgtcttcagataatgactcataccactctgatgaattccttacaaattctaagtctgatgaagacaggcagctagctaactcattagagagtgtagggccaatagattacgttcttcctagttgtggtattattgcctcagcgcctcgattgggcagtcggtcccagtctcttagcagcacagatagtagcgttcatgctccttcagagattactgttgctcatgggagtgggcttggaaaaggccaggagtctcctttgaagaaaagtccttctgctggcgacgtacacatattgactggctttgccaagcctatggatatttactgccacagatttgtgcaagatgcacagaacaaagtgacccacctatcagagaccagatctgtgtctcagcaggctagtcaggaaagaaatcaaatgaccaatcaagtttcaaatgaaacccaatcagaatcaacagaacagacaccttctcggccatcgcaattagatgtctctctttctgcaacaggcccacagtttttgtcagttgagccagcgcattcagttgcatctcaaaaaacccccacctccgcttccagcatgcttgaacttgagacagggcttcatgtaactccttctccttcagagagcagtagcagcagagcagtctctccctttgccaagattcgaagttccatggtccaggttgctagtattacccaagctggattaacccatgggataaactttgcagtgtcaaaagttcagaagagtcctccagaacctgaaatcattaatcaagtccagcaaaatgaacttaaaaagatgtttatacaatgccagacacggataattcagatttagcttttagccataagaatccttccatggcttttatttaaaaatatgaaattttcacctcttggggtattttaattgtactgtctgaacccagggatcacaaattctgttcattggaaagggttttaaacggagtcggaacctgagtagatttccaaattttacagccaggactacagaagtgcatcattctagaatgtgtagacctgagtagcttatacactacagagcactttgcttatttgaaagtaattcagcaacaggtcactttgggatataacctgaacctttttttggagtggggtgggtagactacagtagacacaagggctggacatgcagatgcttaggggattagcgtttttcataatttgttctgtttgtcagttcattcctgtgtgttcttacctctacaaagtaaattacacatttagtttttagtgactttaacatgttactgaagcatttgaatataaagctattttagttttgatggcttaactgttccctgaggagttgagggttattgacactagagaaatgaattctcatttgatcctaattttccccgtattctacttgaacacattaaaaatactctgctgcctatacaatgtaaacctaggagcattaagacttgtcacacagtaaacctgatacatcagaggtgaataccagcacctattaggtttcattttgctgttttcaggaatgtaagaacacccatattggctactggaaattctagcagtcagtcaggttttaatttattccaggaggggcatcctcgacatcttatgtagatgatccacaacttcaaaatttagtctgggcctagtgcagtggctcacacctataatcccaacactttgggaggccaggagttttgagaccagcctgggaaacatctgcctctacaaaaaaatacaaaaattagctgggcatagtggtgcatgcctgtgtttctagctacgcaggaggattgcttgagcccatgagattgaggctgcagtgagctgtgatcgtgccactgacctccagcctgggggacagagcaagaccgtgtctcaaaaacaatttagtctgaaacacaattgtgctgaatctgtctgactataactctgaccacacagaaccagggctgcccctgtaatccccacagtaagaaagttgtatggcatattccaacaagtattggttcgtctggtgtctttagagctttactctgttgaagtgactgattctcaactgaacattatgtcgttactttgataagcattccacttttgttatttattagtgctatcttttttttttacgtgttaaatcttgtgattattaaaataaagtaccattgtaatttaaagtga

SEQ ID NO: 425402 - DNA, 774 bp, Homo sapiens
gcacctattaggtgctggtattcacctctgatgtatcaggtttactgtgtgacaagtcttaatgctcctaggtgaataccagcacctattaggtttcattttgctgttttcaggaatgtaagaacacccatattggctactggaaattctagcagtcagtcaggttttaatttattccaggaggggcatcctcgacatcttatgtagatgatccacaacttcaaaatttagtctgggcctagtgcagtggctcacacctataatcccaacactttgggaggccaggagttttgagaccagcctgggaaacatctgcctctacaaaaaaatacaaaaattagctgggcatagtggtgcatgcctgtgtttctagctacgcaggaggattgcttgagcccatgagattgaggctgcagtgagctgtgatcgtgccactgacctccagcctgggggacagagcaagaccgtgtctcaaaaacaatttagtctgaaacacaattgtgctgaatctgtctgactataactctgaccacacagaaccagggctgcccctgtaatccccacagtaagaaagttgtatggcatattccaacaagtattggttcgtctggtgtctttagagctttactctgttgaagtgactgattctcaactgaacattatgtcgttactttgataagcattccacttttgttatttattagtgctatcttttttttttacgtgttaaatcttgtgattattaaaataaagtaccattgtaatttaaagtga

SEQ ID NO: 425403 - DNA, 387 bp, Homo sapiens
tctcctcctaccggtcgggtgccccggggcgttccctctgccgctgcttctcggcgcggttcctacccggccgctccccgaggcgcgggctctggcggcctcgaccgactaggacgccccgtgcgccgcccgcgggccgccgcctccctgggcgcgcggggccagcatggagctcttccaagccaaggaccactacatcctgcagcagggcgagcgcgcgctgtggtgcagccgccgcgacggcggcctccagctccgacccgctactgatctacttcttgcctggaatcccatttgtttggggttggtagaaggtgttattgggaaaattcaacttcattcaggtatgtttctataaactccttaaacttgtcaaatttattgtag

SEQ ID NO: 425404 - DNA, 5052 bp, Homo sapiens
tctcctcctaccggtcgggtgccccggggcgttccctctgccgctgcttctcggcgcggttcctacccggccgctccccgaggcgcgggctctggcggcctcgaccgactaggacgccccgtgcgccgcccgcgggccgccgcctccctgggcgcgcggggccagcatggagctcttccaagccaaggaccactacatcctgcagcagggcgagcgcgcgctgtggtgcagccgccgcgacggcggcctccagctccgacccgctactgatctacttcttgcctggaatcccatttgtttggggttggtagaaggtgttattgggaaaattcaacttcattcagatcttccatggtggcttattctaattcggcagaaagcattggtgggcaaactcccaggagaccatgaggtctgtaaagttaccaaaattgctgtgctctcactttctgaaatggaacctcaggatcttgagctagagctctgtaagaagcatcattttggtattaacaaaccagagaagatcataccatctcctgatgactcaaagtttctactgaagacctttacgcatattaaatccaatgtgtctgctcctaataaaaagaaagttaaggaaagtaaagagaaggagaagttggagaggagattacttgaagagttgctgaagatgttcatggactcagaatccttttattatagcttgacctatgacctgaccaattccgtgcagaggcagagcactggggagagggacggtcggcccctctggcagaaggtaccactcacagctcgtagagcagggtttgcccttgggaagaagtgatggcctgttttggcttttgtaggaaaactgaaataatgtgtttctgaactattgttcctgcaccttttctaggttgatgaccgatttttttggaataaatacatgatacaagatcttactgagattggtactccagatgtggacttttggattatccccatgatccaaggttttgtgcagattgaagaacttgtggttaattataccgaatcatctgatgatgagaaaagcagcccagagaccccccctcaggagtccacctgtgtagatgatattcacccacgatttctagtggctctcatttcacgccgaagtaggcacagagcaggaatgcgctataaacgaagaggagtggataaaaatggaaatgttgccaattatgtggagactgagcagttgattcatgttcataatcataccctgtcatttgttcaaacacgaggctctgtgcctgtcttttggagccaggttgggtatcgatataacccaagaccgcggctggacagaagtgaaaaggaaactgttgcctatttctgtgcccatttcgaagaacaactgaacatttacaaaaaacaggttattattaacttggtagaccaggcaggaagagagaagattattggcgatgcttacctgaagcaagtgttgcttttcaacaactcacacctcacttacgtttcgtttgacttccatgagcactgccgaggaatgaagtttgagaatgttcagacactaacagatgccatttatgacattattcttgatatgaagtggtgttgggttgatgaagctggggtaatatgtaagcaggaagggatttttcgtgttaattgtatggactgcctggatcgcaccaacgtggtccaagctgccatcgcgagagtggtcatggaacagcagctgaaaaaattaggtgtgatgcccccggaacagccattacctgtgaaatgtaatcgcatctaccagataatgtgggccaataatggtgactccattagcagacagtatgctgggacagctgctctgaagggtgactttacaaggacaggagaaaggaagttagcaggagttatgaaagatggagtgaactcagcaaacagatattacctcaaccgatttaaggatgcttataggcaagctgttatagatttgatgcaaggcattccagtgacagaagatctttattccatatttaccaaggagaaagaacatgaagctttgcataaggaaaatcagagaagccaccaggaactaattagccagctcttacaaagttacatgaagttactactgcctgatgatgagaagttccatgggggctgggccctcattgactgtgaccctagcctcattgatgctactcacagagacgtggatgtgctgttactgctttctaactctgcctactacgtggcctattatgatgatgaagttgataaagtaaaccagtatcaacgactaagtctagaaaacctggaaaaaattgaaataggccctgaacccactctttttggtaagccaaagttctcctgcatgcgactgcactacagatacaaagaagcgagtggctatttccacacattgcgagctgtaatgcgtaatcctgaagaggatggaaaagatacccttcagtgcattgcagagatgctgcagatcaccaagcaagccatgggatcggatttacccataattgagaagaaacttgagaggaagagcagtaaacctcacgaagacatcattggtatcaggtctcaaaaccaaggttctttggcccagggaaagaattttttaatgagcaaattttcatctctaaatcaaaaagtgaagcagaccaaatccaatgtaaatattggcaacctccgaaagctaggaaactttaccaaacctgaaatgaaagttaactttctaaaaccaaacttaaaagtaaatctttggaaatcagatagtagtcttgaaactatggaaaacacaggagtgatggataaggttcaggcagagtctgatggggacatgtcttcagataatgactcataccactctgatgaattccttacaaattctaagtctgatgaagacaggcagctagctaactcattagagagtgtagggccaatagattacgttcttcctagttgtggtattattgcctcagcgcctcgattgggcagtcggtcccagtctcttagcagcacagatagtagcgttcatgctccttcagagattactgttgctcatgggagtgggcttggaaaaggccaggagtctcctttgaagaaaagtccttctgctggcgacgtacacatattgactggctttgccaagcctatggatatttactgccacagatttgtgcaagatgcacagaacaaagtgacccacctatcagagaccagatctgtgtctcagcaggctagtcaggaaagaaatcaaatgaccaatcaagtttcaaatgaaacccaatcagaatcaacagaacagacaccttctcggccatcgcaattagatgtctctctttctgcaacaggcccacagtttttgtcagttgagccagcgcattcagttgcatctcaaaaaacccccacctccgcttccagcatgcttgaacttgagacagggcttcatgtaactccttctccttcagagagcagtagcagcagagcagtctctccctttgccaagattcgaagttccatggtccaggttgctagtattacccaagctggattaacccatgggataaactttgcagtgtcaaaagttcagaagagtcctccagaacctgaaatcattaatcaagtccagcaaaatgaacttaaaaagatgtttatacaatgccagacacggataattcagatttagcttttagccataagaatccttccatggcttttatttaaaaatatgaaattttcacctcttggggtattttaattgtactgtctgaacccagggatcacaaattctgttcattggaaagggttttaaacggagtcggaacctgagtagatttccaaattttacagccaggactacagaagtgcatcattctagaatgtgtagacctgagtagcttatacactacagagcactttgcttatttgaaagtaattcagcaacaggtcactttgggatataacctgaacctttttttggagtggggtgggtagactacagtagacacaagggctggacatgcagatgcttaggggattagcgtttttcataatttgttctgtttgtcagttcattcctgtgtgttcttacctctacaaagtaaattacacatttagtttttagtgactttaacatgttactgaagcatttgaatataaagctattttagttttgatggcttaactgttccctgaggagttgagggttattgacactagagaaatgaattctcatttgatcctaattttccccgtattctacttgaacacattaaaaatactctgctgcctatacaatgtaaacctaggagcattaagacttgtcacacagtaaacctgatacatcagaggtgaataccagcacctattaggtttcattttgctgttttcaggaatgtaagaacacccatattggctactggaaattctagcagtcagtcaggttttaatttattccaggaggggcatcctcgacatcttatgtagatgatccacaacttcaaaatttagtctgggcctagtgcagtggctcacacctataatcccaacactttgggaggccaggagttttgagaccagcctgggaaacatctgcctctacaaaaaaatacaaaaattagctgggcatagtggtgcatgcctgtgtttctagctacgcaggaggattgcttgagcccatgagattgaggctgcagtgagctgtgatcgtgccactgacctccagcctgggggacagagcaagaccgtgtctcaaaaacaatttagtctgaaacacaattgtgctgaatctgtctgactataactctgaccacacagaaccagggctgcccctgtaatccccacagtaagaaagttgtatggcatattccaacaagtattggttcgtctggtgtctttagagctttactctgttgaagtgactgattctcaactgaacattatgtcgttactttgataagcattccacttttgttatttattagtgctatcttttttttttacgtgttaaatcttgtgattattaaaataaagtaccattgtaatttaaagtga

SEQ ID NO: 425405 - DNA, 5183 bp, Homo sapiens
tctcctcctaccggtcgggtgccccggggcgttccctctgccgctgcttctcggcgcggttcctacccggccgctccccgaggcgcgggctctggcggcctcgaccgactaggacgccccgtgcgccgcccgcgggccgccgcctccctgggcgcgcggggccagcatggagctcttccaagccaaggaccactacatcctgcagcagggcgagcgcgcgctgtggtgcagccgccgcgacggcggcctccagctccgacccgctactgatctacttcttgcctggaatcccatttgtttggggttggtagaaggtgttattgggaaaattcaacttcattcagatcttccatggtggcttattctaattcggcagaaagcattggtgggcaaactcccaggagaccatgaggtctgtaaagttaccaaaattgctgtgctctcactttctgaaatggaacctcaggatcttgagctagagctctgtaagaagcatcattttggtattaacaaaccagagaagatcataccatctcctgatgactcaaagtttctactgaagacctttacgcatattaaatccaatgtgtctgctcctaataaaaagaaagttaaggaaagtaaagagaaggagaagttggagaggagattacttgaagagttgctgaagatgttcatggactcagaatccttttattatagcttgacctatgacctgaccaattccgtgcagaggcagagcactggggagagggacggtcggcccctctggcagaaggtaccactcacagctcgtagagcagggtttgcccttgggaagaagtgatggcctgttttggcttttgtaggaaaactgaaataatgtgtttctgaactattgttcctgcaccttttctaggttgatgaccgatttttttggaataaatacatgatacaagatcttactgagattggtactccagatgtggacttttggattatccccatgatccaaggttttgtgcagattgaagaacttgtggttaattataccgaatcatctgatgatgagaaaagcagcccagagaccccccctcaggagtccacctgtgtagatgatattcacccacgatttctagtggctctcatttcacgccgaagtaggcacagagcaggaatgcgctataaacgaagaggagtggataaaaatggaaatgttgccaattatgtggagactgagcagttgattcatgttcataatcataccctgtcatttgttcaaacacgaggctctgtgcctgtcttttggagccaggttgggtatcgatataacccaagaccgcggctggacagaagtgaaaaggaaactgttgcctatttctgtgcccatttcgaagaacaactgaacatttacaaaaaacaggttattattaacttggtagaccaggcaggaagagagaagattattggcgatgcttacctgaagcaagtgttgcttttcaacaactcacacctcacttacgtttcgtttgacttccatgagcactgccgaggaatgaagtttgagaatgttcagacactaacagatgccatttatgacattattcttgatatgaagtggtgttgggttgatgaagctggggtaatatgtaagcaggaagggatttttcgtgttaattgtatggactgcctggatcgcaccaacgtggtccaagctgccatcgcgagagtggtcatggaacagcagctgaaaaaattaggtgtgatgcccccggaacagccattacctgtgaaatgtaatcgcatctaccagataatgtgggccaataatggtgactccattagcagacagtatgctgggacagctgctctgaagggtgactttacaaggacaggagaaaggaagttagcaggagttatgaaagatggagtgaactcagcaaacagatattacctcaaccgatttaaggatgcttataggcaagctgttatagatttgatgcaaggcattccagtgacagaagatctttattccatatttaccaaggagaaagaacatgaagctttgcataaggaaaatcagagaagccaccaggaactaattagccagctcttacaaagttacatgaagttactactgcctgatgatgagaagttccatgggggctgggccctcattgactgtgaccctagcctcattgatgctactcacagagacgtggatgtgctgttactgctttctaactctgcctactacgtggcctattatgatgatgaagttgataaagtaaaccagtatcaacgactaagtctagaaaacctggaaaaaattgaaataggccctgaacccactctttttggtaagccaaagttctcctgcatgcgactgcactacagatacaaagaagcgagtggctatttccacacattgcgagctgtaatgcgtaatcctgaagaggatggaaaagatacccttcagtgcattgcagagatgctgcagatcaccaagcaagccatgggatcggatttacccataattgagaagaaacttgagaggaagagcagtaaacctcacgaagacatcattggtatcaggtctcaaaaccaaggttctttggcccagggaaagaattttttaatgagcaaattttcatctctaaatcaaaaagtgaagcagaccaaatccaatgtaaatattggcaacctccgaaagctaggaaactttaccaaacctgaaatgaaagttaactttctaaaaccaaacttaaaagtaaatctttggaaatcagatagtagtcttgaaactatggaaaacacaggagtgatggataaggttcaggcagagtctgatggggacatgtcttcagataatgactcataccactctgatgaattccttacaaattctaagtctgatgaagacaggcagctagctaactcattagagagtgtagggccaatagattacgttcttcctagttgtggtattattgcctcagcgcctcgattgggcagtcggtcccagtctcttagcagcacagatagtagcgttcatgctccttcagagattactgttgctcatgggagtgggcttggaaaaggccaggagtctcctttgaagaaaagtccttctgctggcgacgtacacatattgactggctttgccaagcctatggatatttactgccacagatttgtgcaagatgcacagaacaaagtgacccacctatcagagaccagatctgtgtctcagcaggctagtcaggaaagaaatcaaatgaccaatcaagtttcaaatgaaacccaatcagaatcaacagaacagacaccttctcggccatcgcaattagatgtctctctttctgcaacaggcccacagtttttgtcagttgagccagcgcattcagttgcatctcaaaaaacccccacctccgcttccagcatgcttgaacttgagacagggcttcatgtaactccttctccttcagagagcagtagcagcagagcagtctctccctttgccaagattcgaagttccatggtccaggttgctagtattacccaagctggattaacccatgggataaactttgcagtgtcaaaagttcagaagagtcctccagaacctgaaatcattaatcaagtccagcaaaatgaacttaaaaagatgtttatacaatgccagacacggataattcagatttagcttttagccataagaatccttccatggcttttatttaaaaatatgaaattttcacctcttggggtattttaattgtactgtctgaacccagggatcacaaattctgttcattggaaagggttttaaacggagtcggaacctgagtagatttccaaattttacagccaggactacagaagtgcatcattctagaatgtgtagacctgagtagcttatacactacagagcactttgcttatttgaaagtaattcagcaacaggtcactttgggatataacctgaacctttttttggagtggggtgggtagactacagtagacacaagggctggacatgcagatgcttaggggattagcgtttttcataatttgttctgtttgtcagttcattcctgtgtgttcttacctctacaaagtaaattacacatttagtttttagtgactttaacatgttactgaagcatttgaatataaagctattttagttttgatggcttaactgttccctgaggagttgagggttattgacactagagaaatgaattctcatttgatcctaattttccccgtattctacttgaacacattaaaaatactctgctgcctatacaatgtaaacctaggagcattaagacttgtcacacagtaaacctgatacatcagaggtgaataccagcacctattaggtttcattttgctgttttcaggaatgtaagaacacccatattggctactggaaattctagcagtcagtcaggttttaatttattccaggaggggcatcctcgacatcttatgtagatgatccacaacttcaaaatttagtctgggcctagtgcagtggctcacacctataatcccaacactttgggaggccaggagttttgagaccagcctgggaaacatctgcctctacaaaaaaatacaaaaattagctgggcatagtggtgcatgcctgtgtttctagctacgcaggaggattgcttgagcccatgagattgaggctgcagtgagctgtgatcgtgccactgacctccagcctgggggacagagcaagaccgtgtctcaaaaacaatttagtctgaaacacaattgtgctgaatctgtctgactataactctgaccacacagaaccagggctgcccctgtaatccccacagtaagaaagttgtatggcatattccaacaagtattggttcgtctggtgtctttagagctttactctgttgaagtgactgattctcaactgaacattatgtcgttactttgataagcattccacttttgttatttattagtgctatcttttttttttacgtgttaaatcttgtgattattaaaataaagtaccattgtaatttaaagtgaaaaatgggtatgagaattccttgcataacagattaaagaatttgtaaacggcagatttgctataactgaacacttggtctagctgttgccagtatgttactcctttgaaatatactcatgatgtaaaaagg

SEQ ID NO: 425406 - DNA, 3081 bp, Homo sapiens
gcctgttacgtgccaagtgctttttgttaaggacataatgtttttgactggggatcatgtttggctgatgtaaatattaatgccaaaataggagctaggatgaaagtaacactgtaattagtagtagaatttatttcatattaaaatgtgtcatgacgtaatttttatggcttggctcaagcaacaattttcagagtgcaccctcattgatgctactcacagagacgtggatgtgctgttactgctttctaactctgcctactacgtggcctattatgatgatgaagttgataaagtaaaccagtatcaacgactaagtctagaaaacctggaaaaaattgaaataggccctgaacccactctttttggtaagccaaagttctcctgcatgcgactgcactacagatacaaagaagcgagtggctatttccacacattgcgagctgtaatgcgtaatcctgaagaggatggaaaagatacccttcagtgcattgcagagatgctgcagatcaccaagcaagccatgggatcggatttacccataattgagaagaaacttgagaggaagagcagtaaacctcacgaagacatcattggtatcaggtctcaaaaccaaggttctttggcccagggaaagaattttttaatgagcaaattttcatctctaaatcaaaaagtgaagcagaccaaatccaatgtaaatattggcaacctccgaaagctaggaaactttaccaaacctgaaatgaaagttaactttctaaaaccaaacttaaaagtaaatctttggaaatcagatagtagtcttgaaactatggaaaacacaggagtgatggataaggttcaggcagagtctgatggggacatgtcttcagataatgactcataccactctgatgaattccttacaaattctaagtctgatgaagacaggcagctagctaactcattagagagtgtagggccaatagattacgttcttcctagttgtggtattattgcctcagcgcctcgattgggcagtcggtcccagtctcttagcagcacagatagtagcgttcatgctccttcagagattactgttgctcatgggagtgggcttggaaaaggccaggagtctcctttgaagaaaagtccttctgctggcgacgtacacatattgactggctttgccaagcctatggatatttactgccacagatttgtgcaagatgcacagaacaaagtgacccacctatcagagaccagatctgtgtctcagcaggctagtcaggaaagaaatcaaatgaccaatcaagtttcaaatgaaacccaatcagaatcaacagaacagacaccttctcggccatcgcaattagatgtctctctttctgcaacaggcccacagtttttgtcagttgagccagcgcattcagttgcatctcaaaaaacccccacctccgcttccagcatgcttgaacttgagacagggcttcatgtaactccttctccttcagagagcagtagcagcagagcagtctctccctttgccaagattcgaagttccatggtccaggttgctagtattacccaagctggattaacccatgggataaactttgcagtgtcaaaagttcagaagagtcctccagaacctgaaatcattaatcaagtccagcaaaatgaacttaaaaagatgtttatacaatgccagacacggataattcagatttagcttttagccataagaatccttccatggcttttatttaaaaatatgaaattttcacctcttggggtattttaattgtactgtctgaacccagggatcacaaattctgttcattggaaagggttttaaacggagtcggaacctgagtagatttccaaattttacagccaggactacagaagtgcatcattctagaatgtgtagacctgagtagcttatacactacagagcactttgcttatttgaaagtaattcagcaacaggtcactttgggatataacctgaacctttttttggagtggggtgggtagactacagtagacacaagggctggacatgcagatgcttaggggattagcgtttttcataatttgttctgtttgtcagttcattcctgtgtgttcttacctctacaaagtaaattacacatttagtttttagtgactttaacatgttactgaagcatttgaatataaagctattttagttttgatggcttaactgttccctgaggagttgagggttattgacactagagaaatgaattctcatttgatcctaattttccccgtattctacttgaacacattaaaaatactctgctgcctatacaatgtaaacctaggagcattaagacttgtcacacagtaaacctgatacatcagaggtgaataccagcacctattaggtttcattttgctgttttcaggaatgtaagaacacccatattggctactggaaattctagcagtcagtcaggttttaatttattccaggaggggcatcctcgacatcttatgtagatgatccacaacttcaaaatttagtctgggcctagtgcagtggctcacacctataatcccaacactttgggaggccaggagttttgagaccagcctgggaaacatctgcctctacaaaaaaatacaaaaattagctgggcatagtggtgcatgcctgtgtttctagctacgcaggaggattgcttgagcccatgagattgaggctgcagtgagctgtgatcgtgccactgacctccagcctgggggacagagcaagaccgtgtctcaaaaacaatttagtctgaaacacaattgtgctgaatctgtctgactataactctgaccacacagaaccagggctgcccctgtaatccccacagtaagaaagttgtatggcatattccaacaagtattggttcgtctggtgtctttagagctttactctgttgaagtgactgattctcaactgaacattatgtcgttactttgataagcattccacttttgttatttattagtgctatcttttttttttacgtgttaaatcttgtgattattaaaataaagtaccattgtaatttaaagtga

SEQ ID NO: 425407 - DNA, 4548 bp, Homo sapiens
tctcctcctaccggtcgggtgccccggggcgttccctctgccgctgcttctcggcgcggttcctacccggccgctccccgaggcgcgggctctggcggcctcgaccgactaggacgccccgtgcgccgcccgcgggccgccgcctccctgggcgcgcggggccagcatggagctcttccaagccaaggaccactacatcctgcagcagggcgagcgcgcgctgtggtgcagccgccgcgacggcggcctccagctccgacccgctactgatctacttcttgcctggaatcccatttgtttggggttggtagaaggtgttattgggaaaattcaacttcattcagatcttccatggtggcttattctaattcggcagaaagcattggtgggcaaactcccaggagaccatgaggtctgtaaagttaccaaaattgctgtgctctcactttctgaaatggaacctcaggatcttgagctagagctctgtaagaagcatcattttggtattaacaaaccagagaagatcataccatctcctgatgactcaaagtttctactgaagacctttacgcatattaaatccaatgtgtctgctcctaataaaaagaaagttaaggaaagtaaagagaaggagaagttggagaggagattacttgaagagttgctgaagatgttcatggactcagaatccttttattatagcttgacctatgacctgaccaattccgtgcagaggcagagcactggggagagggacggtcggcccctctggcagaaggtaccactcacagctcgtagagcagggtttgcccttgggaagaagtgatggcctgttttggcttttgtaggaaaactgaaataatgtgtttctgaactattgttcctgcaccttttctaggttgatgaccgatttttttggaataaatacatgatacaagatcttactgagattggtactccagatgtggacttttggattatccccatgatccaaggttttgtgcagattgaagaacttgtggttaattataccgaatcatctgatgatgagaaaagcagcccagagaccccccctcaggagtccacctgtgtagatgatattcacccacgatttctagtggctctcatttcacgccgaagtaggcacagagcaggaatgcgctataaacgaagaggagtggataaaaatggaaatgttgccaattatgtggagactgagcagttgattcatgttcataatcataccctgtcatttgttcaaacacgaggctctgtgcctgtcttttggagccaggttgggtatcgatataacccaagaccgcggctggacagaagtgaaaaggaaactgttgcctatttctgtgcccatttcgaagaacaactgaacatttacaaaaaacaggttattattaacttggtagaccaggcaggaagagagaagattattggcgatgcttacctgaagcaagtgttgcttttcaacaactcacacctcacttacgtttcgtttgacttccatgagcactgccgaggaatgaagtttgagaatgttcagacactaacagatgccatttatgacattattcttgatatgaagtggtgttgggttgatgaagctggggtaatatgtaagcaggaagggatttttcgtgttaattgtatggactgcctggatcgcaccaacgtggtccaagctgccatcgcgagagtggtcatggaacagcagctgaaaaaattaggtgtgatgcccccggaacagccattacctgtgaaatgtaatcgcatctaccagataatgtgggccaataatggtgactccattagcagacagtatgctgggacagctgctctgaagggtgactttacaaggacaggagaaaggaagttagcaggagttatgaaagatggagtgaactcagcaaacagatattacctcaaccgatttaaggatgcttataggcaagctgttatagatttgatgcaaggcattccagtgacagaagatctttattccatatttaccaaggagaaagaacatgaagctttgcataaggaaaatcagagaagccaccaggaactaattagccagctcttacaaagttacatgaagttactactgcctgatgatgagaagttccatgggggctgggccctcattgactgtgaccctagcctcattgatgctactcacagagacgtggatgtgctgttactgctttctaactctgcctactacgtggcctattatgatgatgaagttgataaagtaaaccagtatcaacgactaagtctagaaaacctggaaaaaattgaaataggccctgaacccactctttttggtaagccaaagttctcctgcatgcgactgcactacagatacaaagaagcgagtggctatttccacacattgcgagctgtaatgcgtaatcctgaagaggatggaaaagatacccttcagtgcattgcagagatgctgcagatcaccaagcaagccatgggatcggatttacccataattgagaagaaacttgagaggaagagcagtaaacctcacgaagacatcattggtatcaggtctcaaaaccaaggttctttggcccagggaaagaattttttaatgagcaaattttcatctctaaatcaaaaagtgaagcagaccaaatccaatgtaaatattggcaacctccgaaagctaggaaactttaccaaacctgaaatgaaagttaactttctaaaaccaaacttaaaagtaaatctttggaaatcagatagtagtcttgaaactatggaaaacacaggagtgatggataaggttcaggcagagtctgatggggacatgtcttcagataatgactcataccactctgatgaattccttacaaattctaagtctgatgaagacaggcagctagctaactcattagagagtgtagggccaatagattacgttcttcctagttgtggtattattgcctcagcgcctcgattgggcagtcggtcccagtctcttagcagcacagatagtagcgttcatgctccttcagagattactgttgctcatgggagtgggcttggaaaaggccaggagtctcctttgaagaaaagtccttctgctggcgacgtacacatattgactggctttgccaagcctatggatatttactgccacagatttgtgcaagatgcacagaacaaagtgacccacctatcagagaccagatctgtgtctcagcaggctagtcaggaaagaaatcaaatgaccaatcaagtttcaaatgaaacccaatcagaatcaacagaacagacaccttctcggccatcgcaattagatgtctctctttctgcaacaggcccacagtttttgtcagttgagccagcgcattcagttgcatctcaaaaaacccccacctccgcttccagcatgcttgaacttgagacagggcttcatgtaactccttctccttcagagagcagtagcagcagagcagtctctccctttgccaagattcgaagttccatggtccaggttgctagtattacccaagctggattaacccatgggataaactttgcagtgtcaaaagttcagaagagtcctccagaacctgaaatcattaatcaagtccagcaaaatgaacttaaaaagatgtttatacaatgccagacacggataattcagatttagcttttagccataagaatccttccatggcttttatttaaaaatatgaaattttcacctcttggggtattttaattgtactgtctgaacccagggatcacaaattctgttcattggaaagggttttaaacggagtcggaacctgagtagatttccaaattttacagccaggactacagaagtgcatcattctagaatgtgtagacctgagtagcttatacactacagagcactttgcttatttgaaagtaattcagcaacaggtcactttgggatataacctgaacctttttttggagtggggtgggtagactacagtagacacaagggctggacatgcagatgcttaggggattagcgtttttcataatttgttctgtttgtcagttcattcctgtgtgttcttacctctacaaaaaaatacaaaaattagctgggcatagtggtgcatgcctgtgtttctagctacgcaggaggattgcttgagcccatgagattgaggctgcagtgagctgtgatcgtgccactgacctccagcctgggggacagagcaagaccgtgtctcaaaaacaatttagtctgaaacacaattgtgctgaatctgtctgactataactctgaccacacagaaccagggctgcccctgtaatccccacagtaagaaagttgtatggcatattccaacaagtattggttcgtctggtgtctttagagctttactctgttgaagtgactgattctcaactgaacattatgtcgttactttgataagcattccacttttgttatttattagtgctatcttttttttttacgtgttaaatcttgtgattattaaaataaagtaccattgtaatttaaagtga

SEQ ID NO: 425408 - DNA, 1654 bp, Homo sapiens
ccaaagtctgatgttgatgtcccctgaagacagcggcttttatgcgaccattgttgcagtggtcgggcttcatgtggtgctggcaattttcgtctccctttgccaagattcgaagttccatggtccaggttgctagtattacccaagctggattaacccatgggataaactttgcagtgtcaaaagttcagaagagtcctccagaacctgaaatcattaatcaagtccagcaaaatgaacttaaaaagatgtttatacaatgccagacacggataattcagatttagcttttagccataagaatccttccatggcttttatttaaaaatatgaaattttcacctcttggggtattttaattgtactgtctgaacccagggatcacaaattctgttcattggaaagggttttaaacggagtcggaacctgagtagatttccaaattttacagccaggactacagaagtgcatcattctagaatgtgtagacctgagtagcttatacactacagagcactttgcttatttgaaagtaattcagcaacaggtcactttgggatataacctgaacctttttttggagtggggtgggtagactacagtagacacaagggctggacatgcagatgcttaggggattagcgtttttcataatttgttctgtttgtcagttcattcctgtgtgttcttacctctacaaagtaaattacacatttagtttttagtgactttaacatgttactgaagcatttgaatataaagctattttagttttgatggcttaactgttccctgaggagttgagggttattgacactagagaaatgaattctcatttgatcctaattttccccgtattctacttgaacacattaaaaatactctgctgcctatacaatgtaaacctaggagcattaagacttgtcacacagtaaacctgatacatcagaggtgaataccagcacctattaggtttcattttgctgttttcaggaatgtaagaacacccatattggctactggaaattctagcagtcagtcaggttttaatttattccaggaggggcatcctcgacatcttatgtagatgatccacaacttcaaaatttagtctgggcctagtgcagtggctcacacctataatcccaacactttgggaggccaggagttttgagaccagcctgggaaacatctgcctctacaaaaaaatacaaaaattagctgggcatagtggtgcatgcctgtgtttctagctacgcaggaggattgcttgagcccatgagattgaggctgcagtgagctgtgatcgtgccactgacctccagcctgggggacagagcaagaccgtgtctcaaaaacaatttagtctgaaacacaattgtgctgaatctgtctgactataactctgaccacacagaaccagggctgcccctgtaatccccacagtaagaaagttgtatggcatattccaacaagtattggttcgtctggtgtctttagagctttactctgttgaagtgactgattctcaactgaacattatgtcgttactttgataagcattccacttttgttatttattagtgctatcttttttttttacgtgttaaatcttgtgattattaaaataaagtaccattgtaatttaaagtga

SEQ ID NO: 425409 - DNA, 1548 bp, Homo sapiens
tctcctcctaccggtcgggtgccccggggcgttccctctgccgctgcttctcggcgcggttcctacccggccgctccccgaggcgcgggctctggcggcctcgaccgactaggacgccccgtgcgccgcccgcgggccgccgcctccctgggcgcgcggggccagcatggagctcttccaagccaaggaccactacatcctgcagcagggcgagcgcgcgctgtggtgcagccgccgcgacggcggcctccagctccgacccgctactgatctacttcttgcctggaatcccatttgtttggggttggtagaaggtgttattgggaaaattcaacttcattcagatcttccatggtggcttattctaattcggcagaaagcattggtgggcaaactcccaggagaccatgaggtctgtaaagttaccaaaattgctgtgctctcactttctgaaatggaacctcaggatcttgagctagagctctgtaagaagcatcattttggtattaacaaaccagagaagatcataccatctcctgatgactcaaagtttctactgaagacctttacgcatattaaatccaatgtgtctgctcctaataaaaagaaagttaaggaaagtaaagagaaggagaagttggagaggagattacttgaagagttgctgaagatgttcatggactcagaatccttttattatagcttgacctatgacctgaccaattccgtgcagaggcagagcactggggagagggacggtcggcccctctggcagaaggtaccactcacagctcgtagagcagggtttgcccttgggaagaagtgatggcctgttttggcttttgtaggaaaactgaaataatgtgtttctgaactattgttcctgcaccttttctaggttgatgaccgatttttttggaataaatacatgatacaagatcttactgagattggtactccagatgtggacttttggattatccccatgatccaaggttttgtgcagattgaagaacttgtggttaattataccgaatcatctgatgatgagaaaagcagcccagagaccccccctcaggagtccacctgtgtagatgatattcacccacgatttctagtggctctcatttcacgccgaagtaggcacagagcaggaatgcgctataaacgaagaggagtggataaaaatggaaatgttgccaattatgtggagactgagcagttgattcatgttcataatcataccctgtcatttgttcaaacacgaggctctgtgcctgtcttttggagccaggttgggtatcgatataacccaagaccgcggctggacagaagtaagcaggtcaattattgggtttgcaaatgatgatttcagagagaatagtttttaagaaattagttacctgttaggtttggatttgctttgccagatacttctttcaaaacgataacttgtatttgaaaaatgtaatagaaagtaatgtaataatcatagtaaaaatagttgactaagtcatttatttaacaataaaaaatttctctaacagt

SEQ ID NO: 425410 - DNA, 576 bp, Homo sapiens
gcattgtggtattttcgatttcttgttattgttgtttgtttgtttttcagacagggtctcactctgttacccaggctggagctgcagtgagctgtgatcgtgccactgacctccagcctgggggacagagcaagaccgtgtctcaaaaacaatttagtctgaaacacaattgtgctgaatctgtctgactataactctgaccacacagaaccagggctgcccctgtaatccccacagtaagaaagttgtatggcatattccaacaagtattggttcgtctggtgtctttagagctttactctgttgaagtgactgattctcaactgaacattatgtcgttactttgataagcattccacttttgttatttattagtgctatcttttttttttacgtgttaaatcttgtgattattaaaataaagtaccattgtaatttaaagtgaaaaatgggtatgagaattccttgcataacagattaaagaatttgtaaacggcagatttgctataactgaacacttggtctagctgttgccagtatgttactcctttgaaatatactcatgatgtaaaaagg

SEQ ID NO: 425411 - DNA, 174 bp, Homo sapiens
ccaaagtctgatgttgatgtcccctgaagacagcggcttttatgcgaccattgttgcagtggtcgggcttcatgtggtgctggcaattttcgtcttcatagtgtggaaggagggcttgccccagtggcgggaaaacaaaaacgaatagagcagcttcttcagagctgcagacgt

SEQ ID NO: 425412 - DNA, 365 bp, Homo sapiens
cactttctgaaatggaacctcaggatcttgagctagaggtaggtgaaataaagggaaattatatggaaacctgatataaatgtaatagcaaatatgaggatttggttcagtagaccagaaacttacatttttagagctgggtaatgtttttaaaataatttaatcctaagattttccaacttagtagtggaactcttgtctcaaaatccatgaaatctagtgtagaagacacataaaggcagggctgctgtggtcgcagtagtgttgggggaatccctggggctctgtccacttgatctctcctgggaagccaccttctgtttccagggtgccctagggctctgcacagtacagtttgaaaactt

SEQ ID NO: 425413 - DNA, 3376 bp, Homo sapiens
gcctgttacgtgccaagtgctttttgttaaggacataatgtttttgactggggatcatgtttggctgatgtaaatattaatgccaaaataggagctaggatgaaagtaacactgtaattagtagtagaatttatttcatattaaaatgtgtcatgacgtaatttttatggcttggctcaagcaacaattttcagagtgcacgtaagtatcaacgcgtaaaacttaacattttacagtgttatttggtattattctctatgaagctgtctggatcggtctccttttcccattggttaattggttaatgctcagattttggctcctagaatcgatctgtgtgttcccggtcttggcatctcattatgtcatttgctgtattttttgatatattattgtacgtgcaaattgaggtgaatttgttgttttagattaagactgttggactcaagctacaacgaggtgtctctgatgtaaaaaactgcagtttaagattatgcctcattgatgctactcacagagacgtggatgtgctgttactgctttctaactctgcctactacgtggcctattatgatgatgaagttgataaagtaaaccagtatcaacgactaagtctagaaaacctggaaaaaattgaaataggccctgaacccactctttttggtaagccaaagttctcctgcatgcgactgcactacagatacaaagaagcgagtggctatttccacacattgcgagctgtaatgcgtaatcctgaagaggatggaaaagatacccttcagtgcattgcagagatgctgcagatcaccaagcaagccatgggatcggatttacccataattgagaagaaacttgagaggaagagcagtaaacctcacgaagacatcattggtatcaggtctcaaaaccaaggttctttggcccagggaaagaattttttaatgagcaaattttcatctctaaatcaaaaagtgaagcagaccaaatccaatgtaaatattggcaacctccgaaagctaggaaactttaccaaacctgaaatgaaagttaactttctaaaaccaaacttaaaagtaaatctttggaaatcagatagtagtcttgaaactatggaaaacacaggagtgatggataaggttcaggcagagtctgatggggacatgtcttcagataatgactcataccactctgatgaattccttacaaattctaagtctgatgaagacaggcagctagctaactcattagagagtgtagggccaatagattacgttcttcctagttgtggtattattgcctcagcgcctcgattgggcagtcggtcccagtctcttagcagcacagatagtagcgttcatgctccttcagagattactgttgctcatgggagtgggcttggaaaaggccaggagtctcctttgaagaaaagtccttctgctggcgacgtacacatattgactggctttgccaagcctatggatatttactgccacagatttgtgcaagatgcacagaacaaagtgacccacctatcagagaccagatctgtgtctcagcaggctagtcaggaaagaaatcaaatgaccaatcaagtttcaaatgaaacccaatcagaatcaacagaacagacaccttctcggccatcgcaattagatgtctctctttctgcaacaggcccacagtttttgtcagttgagccagcgcattcagttgcatctcaaaaaacccccacctccgcttccagcatgcttgaacttgagacagggcttcatgtaactccttctccttcagagagcagtagcagcagagcagtctctccctttgccaagattcgaagttccatggtccaggttgctagtattacccaagctggattaacccatgggataaactttgcagtgtcaaaagttcagaagagtcctccagaacctgaaatcattaatcaagtccagcaaaatgaacttaaaaagatgtttatacaatgccagacacggataattcagatttagcttttagccataagaatccttccatggcttttatttaaaaatatgaaattttcacctcttggggtattttaattgtactgtctgaacccagggatcacaaattctgttcattggaaagggttttaaacggagtcggaacctgagtagatttccaaattttacagccaggactacagaagtgcatcattctagaatgtgtagacctgagtagcttatacactacagagcactttgcttatttgaaagtaattcagcaacaggtcactttgggatataacctgaacctttttttggagtggggtgggtagactacagtagacacaagggctggacatgcagatgcttaggggattagcgtttttcataatttgttctgtttgtcagttcattcctgtgtgttcttacctctacaaagtaaattacacatttagtttttagtgactttaacatgttactgaagcatttgaatataaagctattttagttttgatggcttaactgttccctgaggagttgagggttattgacactagagaaatgaattctcatttgatcctaattttccccgtattctacttgaacacattaaaaatactctgctgcctatacaatgtaaacctaggagcattaagacttgtcacacagtaaacctgatacatcagaggtgaataccagcacctattaggtttcattttgctgttttcaggaatgtaagaacacccatattggctactggaaattctagcagtcagtcaggttttaatttattccaggaggggcatcctcgacatcttatgtagatgatccacaacttcaaaatttagtctgggcctagtgcagtggctcacacctataatcccaacactttgggaggccaggagttttgagaccagcctgggaaacatctgcctctacaaaaaaatacaaaaattagctgggcatagtggtgcatgcctgtgtttctagctacgcaggaggattgcttgagcccatgagattgaggctgcagtgagctgtgatcgtgccactgacctccagcctgggggacagagcaagaccgtgtctcaaaaacaatttagtctgaaacacaattgtgctgaatctgtctgactataactctgaccacacagaaccagggctgcccctgtaatccccacagtaagaaagttgtatggcatattccaacaagtattggttcgtctggtgtctttagagctttactctgttgaagtgactgattctcaactgaacattatgtcgttactttgataagcattccacttttgttatttattagtgctatcttttttttttacgtgttaaatcttgtgattattaaaataaagtaccattgtaatttaaagtga

SEQ ID NO: 425414 - DNA, 4998 bp, Homo sapiens
tctcctcctaccggtcgggtgccccggggcgttccctctgccgctgcttctcggcgcggttcctacccggccgctccccgaggcgcgggctctggcggcctcgaccgactaggacgccccgtgcgccgcccgcgggccgccgcctccctgggcgcgcggggccagcatggagctcttccaagccaaggaccactacatcctgcagcagggcgagcgcgcgctgtggtgcagccgccgcgacggcggcctccagctccgacccgctactgatctacttcttgcctggaatcccatttgtttggggttggtagaaggtgttattgggaaaattcaacttcattcagatcttccatggtggcttattctaattcggcagaaagcattggtgggcaaactcccaggagaccatgaggtctgtaaagttaccaaaattgctgtgctctcactttctgaaatggaacctcaggatcttgagctagagctctgtaagaagcatcattttggtattaacaaaccagagaagatcataccatctcctgatgactcaaagtttctactgaagacctttacgcatattaaatccaatgtgtctgctcctaataaaaagaaagttaaggaaagtaaagagaaggagaagttggagaggagattacttgaagagttgctgaagatgttcatggactcagaatccttttattatagcttgacctatgacctgaccaattccgtgcagaggcagagcactggggagagggacggtcggcccctctggcagaaggtaccactcacagctcgtagagcagggtttgcccttgggaagaagtgatggcctgttttggcttttgtaggaaaactgaaataatgtgtttctgaactattgttcctgcaccttttctaggttgatgaccgatttttttggaataaatacatgatacaagatcttactgagattggtactccagatgtggacttttggattatccccatgatccaaggttttgtgcagattgaagaacttgtggttaattataccgaatcatctgatgatgagaaaagcagcccagagaccccccctcaggagtccacctgtgtagatgatattcacccacgatttctagtggctctcatttcacgccgaagtaggcacagagcaggaatgcgctataaacgaagaggagtggataaaaatggaaatgttgccaattatgtggagactgagcagttgattcatgttcataatcataccctgtcatttgttcaaacacgaggctctgtgcctgtcttttggagccaggttgggtatcgatataacccaagaccgcggctggacagaagtgaaaaggaaactgttgcctatttctgtgcccatttcgaagaacaactgaacatttacaaaaaacaggttattattaacttggtagaccaggcaggaagagagaagattattggcgatgcttacctgaagcaagtgttgcttttcaacaactcacacctcacttacgtttcgtttgacttccatgagcactgccgaggaatgaagtttgagaatgttcagacactaacagatgccatttatgacattattcttgatatgaagtggtgttgggttgatgaagctggggtaatatgtaagcaggaagggatttttcgtgttaattgtatggactgcctggatcgcaccaacgtggtccaagctgccatcgcgagagtggtcatggaacagcagctgaaaaaattaggtgtgatgcccccggaacagccattacctgtgaaatgtaatcgcatctaccagataatgtgggccaataatggtgactccattagcagacagtatgctgggacagctgctctgaagggtgactttacaaggacaggagaaaggaagttagcaggagttatgaaagatggagtgaactcagcaaacagatattacctcaaccgatttaaggatgcttataggcaagctgttatagatttgatgcaaggcattccagtgacagaagatctttattccatatttaccaaggagaaagaacatgaagctttgcataaggaaaatcagagaagccaccaggaactaattagccagctcttacaaagttacatgaagttactactgcctgatgatgagaagttccatgggggctgggccctcattgactgtgaccctagcctcattgatgctactcacagagacgtggatgtgctgttactgctttctaactctgcctactacgtggcctattatgatgatgaagttgataaagtaaaccagtatcaacgactaagtctagaaaacctggaaaaaattgaaataggccctgaacccactctttttggtaagccaaagttctcctgcatgcgactgcactacagatacaaagaagcgagtggctatttccacacattgcgagctgtaatgcgtaatcctgaagaggatggaaaagatacccttcagtgcattgcagagatgctgcagatcaccaagcaagccatgggatcggatttacccataattgagaagaaacttgagaggaagagcagtaaacctcacgaagacatcattggtatcaggtctcaaaaccaaggttctttggcccagggaaagaattttttaatgagcaaattttcatctctaaatcaaaaagtgaagcagaccaaatccaatgtaaatattggcaacctccgaaagctaggaaactttaccaaacctgaaatgaaagttaactttctaaaaccaaacttaaaagtaaatctttggaaatcagatagtagtcttgaaactatggaaaacacaggagtgatggataaggttcaggcagagtctgatggggacatgtcttcagataatgactcataccactctgatgaattccttacaaattctaagtctgatgaagacaggcagctagctaactcattagagagtgtagggccaatagattacgttcttcctagttgtggtattattgcctcagcgcctcgattgggcagtcggtcccagtctcttagcagcacagatagtagcgttcatgctccttcagagattactgttgctcatgggagtgggcttggaaaaggccaggagtctcctttgaaggatatttactgccacagatttgtgcaagatgcacagaacaaagtgacccacctatcagagaccagatctgtgtctcagcaggctagtcaggaaagaaatcaaatgaccaatcaagtttcaaatgaaacccaatcagaatcaacagaacagacaccttctcggccatcgcaattagatgtctctctttctgcaacaggcccacagtttttgtcagttgagccagcgcattcagttgcatctcaaaaaacccccacctccgcttccagcatgcttgaacttgagacagggcttcatgtaactccttctccttcagagagcagtagcagcagagcagtctctccctttgccaagattcgaagttccatggtccaggttgctagtattacccaagctggattaacccatgggataaactttgcagtgtcaaaagttcagaagagtcctccagaacctgaaatcattaatcaagtccagcaaaatgaacttaaaaagatgtttatacaatgccagacacggataattcagatttagcttttagccataagaatccttccatggcttttatttaaaaatatgaaattttcacctcttggggtattttaattgtactgtctgaacccagggatcacaaattctgttcattggaaagggttttaaacggagtcggaacctgagtagatttccaaattttacagccaggactacagaagtgcatcattctagaatgtgtagacctgagtagcttatacactacagagcactttgcttatttgaaagtaattcagcaacaggtcactttgggatataacctgaacctttttttggagtggggtgggtagactacagtagacacaagggctggacatgcagatgcttaggggattagcgtttttcataatttgttctgtttgtcagttcattcctgtgtgttcttacctctacaaagtaaattacacatttagtttttagtgactttaacatgttactgaagcatttgaatataaagctattttagttttgatggcttaactgttccctgaggagttgagggttattgacactagagaaatgaattctcatttgatcctaattttccccgtattctacttgaacacattaaaaatactctgctgcctatacaatgtaaacctaggagcattaagacttgtcacacagtaaacctgatacatcagaggtgaataccagcacctattaggtttcattttgctgttttcaggaatgtaagaacacccatattggctactggaaattctagcagtcagtcaggttttaatttattccaggaggggcatcctcgacatcttatgtagatgatccacaacttcaaaatttagtctgggcctagtgcagtggctcacacctataatcccaacactttgggaggccaggagttttgagaccagcctgggaaacatctgcctctacaaaaaaatacaaaaattagctgggcatagtggtgcatgcctgtgtttctagctacgcaggaggattgcttgagcccatgagattgaggctgcagtgagctgtgatcgtgccactgacctccagcctgggggacagagcaagaccgtgtctcaaaaacaatttagtctgaaacacaattgtgctgaatctgtctgactataactctgaccacacagaaccagggctgcccctgtaatccccacagtaagaaagttgtatggcatattccaacaagtattggttcgtctggtgtctttagagctttactctgttgaagtgactgattctcaactgaacattatgtcgttactttgataagcattccacttttgttatttattagtgctatcttttttttttacgtgttaaatcttgtgattattaaaataaagtaccattgtaatttaaagtga

SEQ ID NO: 425415 - DNA, 3659 bp, Homo sapiens
tctcctcctaccggtcgggtgccccggggcgttccctctgccgctgcttctcggcgcggttcctacccggccgctccccgaggcgcgggctctggcggcctcgaccgactaggacgccccgtgcgccgcccgcgggccgccgcctccctgggcgcgcggggccagcatggagctcttccaagccaaggaccactacatcctgcagcagggcgagcgcgcgctgtggtgcagccgccgcgacggcggcctccagctccgacccgctactgatctacttcttgcctggaatcccatttgtttggggttggtagaaggtgttattgggaaaattcaacttcattcagatcttccatggtggcttattctaattcggcagaaagcattggtgggcaaactcccaggagaccatgaggtctgtaaagttaccaaaattgctgtgctctcactttctgaaatggaacctcaggatcttgagctagagctctgtaagaagcatcattttggtattaacaaaccagagaagatcataccatctcctgatgactcaaagtttctactgaagacctttacgcatattaaatccaatgtgtctgctcctaataaaaagaaagttaaggaaagtaaagagaaggagaagttggagaggagattacttgaagagttgctgaagatgttcatggactcagaatccttttattatagcttgacctatgacctgaccaattccgtgcagaggcagagcactggggagagggacggtcggcccctctggcagaaggtaccactcacagctcgtagagcagggtttgcccttgggaagaagtgatggcctgttttggcttttgtaggaaaactgaaataatgtgtttctgaactattgttcctgcaccttttctaggttgatgaccgatttttttggaataaatacatgatacaagatcttactgagattggtactccagatgtggacttttggattatccccatgatccaaggttttgtgcagattgaagaacttgtggttaattataccgaatcatctgatgatgagaaaagcagcccagagaccccccctcaggagtccacctgtgtagatgatattcacccacgatttctagtggctctcatttcacgccgaagtaggcacagagcaggaatgcgctataaacgaagaggagtggataaaaatggaaatgttgccaattatgtggagactgagcagttgattcatgttcataatcataccctgtcatttgttcaaacacgaggctctgtgcctgtcttttggagccaggttgggtatcgatataacccaagaccgcggctggacagaagtgaaaaggaaactgttgcctatttctgtgcccatttcgaagaacaactgaacatttacaaaaaacaggttattattaacttggtagaccaggcaggaagagagaagattattggcgatgcttacctgaagcaagtgttgcttttcaacaactcacacctcacttacgtttcgtttgacttccatgagcactgccgaggaatgaagtttgagaatgttcagacactaacagatgccatttatgacattattcttgatatgaagtggtgttgggttgatgaagctggggtaatatgtaagcaggaagggatttttcgtgttaattgtatggactgcctggatcgcaccaacgtggtccaagctgccatcgcgagagtggtcatggaacagcagctgaaaaaattaggtgtgatgcccccggaacagccattacctgtgaaatgtaatcgcatctaccagataatgtgggccaataatggtgactccattagcagacagtatgctgggacagctgctctgaagggtgactttacaaggacaggagaaaggaagttagcaggagttatgaaagatggagtgaactcagcaaacagatattacctcaaccgatttaaggatgcttataggcaagctgttatagatttgatgcaaggcattccagtgacagaagatctttattccatatttaccaaggagaaagaacatgaagctttgcataaggaaaatcagagaagccaccaggaactaattagccagctcttacaaagttacatgaagttactactgcctgatgatgagaagttccatgggggctgggccctcattgactgtgaccctagcctcattgatgctactcacagagacgtggatgtgctgttactgctttctaactctgcctactacgtggcctattatgatgatgaagttgataaagtaaaccagtatcaacgactaagtctagaaaacctggaaaaaattgaaataggccctgaacccactctttttggtaagccaaagttctcctgcatgcgactgcactacagatacaaagaagcgagtggctatttccacacattgcgagctgtaatgcgtaatcctgaagaggatggaaaagatacccttcagtgcattgcagagatgctgcagatcaccaagcaagccatgggatcggatttacccataattgagaagaaacttgagaggaagagcagtaaacctcacgaagacatcattggtatcaggtctcaaaaccaaggttctttggcccagggaaagaattttttaatgagcaaattttcatctctaaatcaaaaagtgaagcagaccaaatccaatgtaaatattggcaacctccgaaagctaggaaactttaccaaacctgaaatgaaagttaactttctaaaaccaaacttaaaagtaaatctttggaaatcagatagtagtcttgaaactatggaaaacacaggagtgatggataaggttcaggcagagtctgatggggacatgtcttcagataatgactcataccactctgatgaattccttacaaattctaagtctgatgaagacaggcagctagctaactcattagagagtgtagggccaatagattacgttcttcctagttgtggtattattgcctcagcgcctcgattgggcagtcggtcccagtctcttagcagcacagatagtagcgttcatgctccttcagagattactgttgctcatgggagtgggcttggaaaaggccaggagtctcctttgaagaaaagtccttctgctggcgacgtacacatattgactggctttgccaagcctatggatatttactgccacagatttgtgcaagatgcacagaacaaagtgacccacctatcagagaccagatctgtgtctcagcaggctagtcaggaaagaaatcaaatgaccaatcaagtttcaaatgaaacccaatcagaatcaacagaacagacaccttctcggccatcgcaattagatgtctctctttctgcaacaggcccacagtttttgtcagttgagccagcgcattcagttgcatctcaaaaaacccccacctccgcttccagcatgcttgaacttgagacagggcttcatgtaactccttctccttcagagagcagtagcagcagagcagtctctccctttgccaagattcgaagttccatggtccaggttgctagtattacccaagctggattaacccatgggataaactttgcagtgtcaaaagttcagaagagtcctccagaacctgaaatcattaatcaagtccagcaaaatctgcgtggggtgcgagctccattgt

SEQ ID NO: 425416 - DNA, 393 bp, Homo sapiens
agatattaacaattccaccctagatttgatgcaaggcattccagtgacagaagatctttattccatatttaccaaggagaaagaacatgaagctttgcataaggaaaatcagagaagccaccaggaactaattagccagctcttacaaagttacatgaagttactactgcctgatgatgagaagttccatgggggctgggccctcattgactgtgaccctaggtgagttggagtggtgtccaggtgaccagcttgcttaactgatgttgggaagttgtcatgattaacactggcagttgtccctaaagctgtgggcatggatgcatggcgcgtgactatttcctctatgagctggtagtgaggcaagctgactgaggcacttgccttggatgc

SEQ ID NO: 425417 - DNA, 1262 bp, Homo sapiens
tgcgccgtttcttagcgaaaaagcttttatttttttgacttgggagtacctcttcttgaaattctgtacaactccactgcctcacgttagcgggagcgcacctgaagagtacggggggagccctctctcccttaccctctcactctccaccagatgtttactaaacagggcatgttactgaaatcttcctttgcgactttctcggacatatcaactgcctttctcatgaagaattttaatgggttacagtatgaaatcagttaagataaagctgcattgtatataagtgcaatatatttttgaaggtctgtaaatgtgtacatacatgtcttatataaatatataatatataaatatggtgtctgtgtacatatagtgaagatatgcagtaagagctaccttaaagactttccctagacaaaggttaagttattttttgatcgtgtataccaagcagatagaatactgtgcttagtggaacccgctaaaaacctttttctctgtttttccaaacacaggcattctgtagcatagcaaaaccttctcaaatgacagagattctgtttgctgttgagaatgttgttatttggatttctgcactgtttaacaaatgaagtaaaagaaaaacactactgcaatcacgtcttttgttatgctagtatcagtcagatgcacttagagtgaagaaacactgtaattacagcacacagattgcaagtattgcgtaccaagtgatacaactcgaaatgcagttctcatcttcctgttttgagaaatgattattttatcacgcatcagagccttcgtgctttgattatcttgtatgttaacaattctagaaaacattcatgaattcacaaaaatacgttactatggcaggggaacattttgtacacatttaagtatataaaaatactaaaatatgtaattttataacaaagtcacgggtatctttaggttcagggaactagactaggtcattcgtgtaaatggactggtagttacagtcttaggttaaagtattctaatgaagtatgggaactaaattgctggttttctaagataagatatgggatatgggtcatataacttttgtattttttatgaagttgattttgtcttgcgtgttatttttaattgtatcattgaagatgtattttaaaccaaaggaattaaattttatatgtctatttcgtaatatgtcatttcctgtttttcaatttgactttgcactgctcagtaaaacgtgagagctgaaaagc

SEQ ID NO: 425418 - DNA, 3600 bp, Homo sapiens
ccgccgctccggacccgcagccgccgccgccgcctcctccccccggatcgggtgtactgtcctaacccgaaagtccagttctgcggcccggcagcggcgagcgggcgcgatgacacaggagtacgacaacaaacggccagtgttggctcttcagaatgaagcactttatccacagcggcggtcctacactagtgaggatgaggcctggaaatccttcctggaaaaccctctcactgcagcgaccaaagcgatgatgagcatcaatggagatgaagacagcgccgctgcgctgggcctgctctatgactactacaaggttccaagagagagaaggtcatcaacagcaaagccagaggtggagcaccctgagccagatcacagcaaaagaaacagcataccaattgtgacagagcagcccctcatctctgctggagaaaacagagtgcaagtactgaaaaatgtgccatttaacattgtccttccccatggcaaccagctgggcattgataagagaggccatctgacagctccagatacgacagtcactgtctccatagcaacgatgcctacccactccatcaagacagaaacccagccacatggcttcgctgtgggaatccccccagcagtgtatcatcctgagcccactgagcgggtggtggttttcgatcggaatctcaatactgaccagttcagctctggtgctcaagccccaaatgctcaaaggcgaactccagactcgaccttctcagagaccttcaaggaaggcgttcaggaggttttcttcccctcggatctcagtctgcggatgcctggcatgaattcagaggactatgtttttgacagtgtttctgggaacaactttgaatataccctagaagcttcaaaatcacttcgacagaagccaggagacagtaccatgacgtacctgaacaaaggccagttctatcccatcaccttgaaggaggtgagcagcagtgaaggaatccatcatcccatcagcaaagttcgaagtgtgatcatggtggtttttgctgaagacaaaagcagagaagatcagttaaggcattggaagtactggcactcccggcagcacaccgctaaacaaagatgcattgacatagctgactataaagaaagcttcaacactatcagtaacatcgaggagattgcgtataacgccatttccttcacatgggacatcaacgatgaagcaaaggttttcatctctgtgaactgcttaagcacagatttctcttcccagaagggagtgaaggggttgcctcttaacattcaagttgatacctatagttacaacaaccgcagcaacaagcctgtgcaccgggcctactgccagatcaaggtcttctgtgacaagggagctgagcggaaaatcagggatgaagaacgaaagcaaagcaaaagaaaagtttctgatgttaaagtgccactgcttccctctcacaagcgaatggatatcacagttttcaaacccttcattgatctcgatactcagcctgtcctcttcattcctgacgtgcactttgccaacttgcagcggggcactcatgtccttcccattgcctctgaagaattggagggtgaaggctctgtcttgaaaagggggccgtacggcacagaagatgactttgctgtccctccttctaccaagctggcccggatagaagaaccaaagagagtgctgctctacgttcgaaaggagtcagaagaagtctttgatgccctgatgctcaaaaccccatctttgaagggcttgatggaagctatctcagacaaatacgatgttccccatgacaagattgggaaaatattcaagaagtgtaaaaaggggatcctggtgaacatggacgacaacattgtgaagcattactccaatgaggacaccttccagctgcagattgaagaagccggggggtcttacaagctcaccctgacggagatctaaaggcctgcgggccacagctccccaggagttcagtgcaggtgtttctagatcttacggtttggcaactgcaggtaaccccagtcagccatgtcgccagcacaggtctatgtcgagggaatgggttccttgcaggttggaggcggggctgcatctggcttggtggtagcatttaatctattgcattggtgtttttcagatgaaagagaaatccatataccattatgtttgaatttcctgatatatacaggatttaaagtgaaaactttattccaagagttaacagagtctctgggaagctttaggacatctgctacgttatttatcaaaatattgggatctctgccttgtgcctacagtgtcgtgggcctgctcgctagcagaagtcagaaaaggcgataggcttggctttaaggatttcgtgcccttgcctgaattcagtacaactccactgcctcacgttagcgggagcgcacctgaagagtacggggggagccctctctcccttaccctctcactctccaccagatgtttactaaacagggcatgttactgaaatcttcctttgcgactttctcggacatatcaactgcctttctcatgaagaattttaatgggttacagtatgaaatcagttaagataaagctgcattgtatataagtgcaatatatttttgaaggtctgtaaatgtgtacatacatgtcttatataaatatataatatataaatatggtgtctgtgtacatatagtgaagatatgcagtaagagctaccttaaagactttccctagacaaaggttaagttattttttgatcgtgtataccaagcagatagaatactgtgcttagtggaacccgctaaaaacctttttctctgtttttccaaacacaggcattctgtagcatagcaaaaccttctcaaatgacagagattctgtttgctgttgagaatgttgttatttggatttctgcactgtttaacaaatgaagtaaaagaaaaacactactgcaatcacgtcttttgttatgctagtatcagtcagatgcacttagagtgaagaaacactgtaattacagcacacagattgcaagtattgcgtaccaagtgatacaactcgaaatgcagttctcatcttcctgttttgagaaatgattattttatcacgcatcagagccttcgtgctttgattatcttgtatgttaacaattctagaaaacattcatgaattcacaaaaatacgttactatggcaggggaacattttgtacacatttaagtatataaaaatactaaaatatgtaattttataacaaagtcacgggtatctttaggttcagggaactagactaggtcattcgtgtaaatggactggtagttacagtcttaggttaaagtattctaatgaagtatgggaactaaattgctggttttctaagataagatatgggatatgggtcatataacttttgtattttttatgaagttgattttgtcttgcgtgttatttttaattgtatcattgaagatgtattttaaaccaaaggaattaaattttatatgtctatttcgtaatatgtcatttcctgtttttcaatttgactttgcactgctcagtaaaacgtgagagctgaaaagc

SEQ ID NO: 425419 - DNA, 2096 bp, Homo sapiens
ccgccgctccggacccgcagccgccgccgccgcctcctccccccggatcgggtgtactgtcctaacccgaaagtccagttctgcggcccggcagcggcgagcgggcgcgatgacacaggagtacgacaacaaacggccagtgttggctcttcagaatgaagcactttatccacagcggcggtcctacactagtgaggatgaggcctggaaatccttcctggaaaaccctctcactgcagcgaccaaagcgatgatgagcatcaatggagatgaagacagcgccgctgcgctgggcctgctctatgactactacaaggttccaagagagagaaggtcatcaacagcaaagccagaggtggagcaccctgagccagatcacagcaaaagaaacagcataccaattgtgacagagcagcccctcatctctgctggagaaaacagagtgcaagtactgaaaaatgtgccatttaacattgtccttccccatggcaaccagctgggcattgataagagaggccatctgacagctccagatacgacagtcactgtctccatagcaacgatgcctacccactccatcaagacagaaacccagccacatggcttcgctgtgggaatccccccagcagtgtatcatcctgagcccactgagcgggtggtggttttcgatcggaatctcaatactgaccagttcagctctggtgctcaagccccaaatgctcaaaggcgaactccagactcgaccttctcagagaccttcaaggaaggcgttcaggaggaacaactttgaatataccctagaagcttcaaaatcacttcgacagaagccaggagacagtaccatgacgtacctgaacaaaggccagttctatcccatcaccttgaaggaggtgagcagcagtgaaggaatccatcatcccatcagcaaagttcgaagtgtgatcatggtggtttttgctgaagacaaaagcagagaagatcagttaaggcattggaagtactggcactcccggcagcacaccgctaaacaaagatgcattgacatagctgactataaagaaagcttcaacactatcagtaacatcgaggagattgcgtataacgccatttccttcacatgggacatcaacgatgaagcaaaggttttcatctctgtgaactgcttaagcacagatttctcttcccagaagggagtgaaggggttgcctcttaacattcaagttgatacctatagttacaacaaccgcagcaacaagcctgtgcaccgggcctactgccagatcaaggtcttctgtgacaagggagctgagcggaaaatcagggatgaagaacgaaagcaaagcaaaagaaaagtttctgatgttaaagtgccactgcttccctctcacaagcgaatggatatcacagttttcaaacccttcattgatctcgatactcagcctgtcctcttcattcctgacgtgcactttgccaacttgcagcggggcactcatgtaggtaaccaggatcccaggggaggttaccaggaaggaaggcatggcaaaaggaaattctttggcattattcatggggaaacagaagccaaaattgagtgaggtttgaccagttagtcagctctttgggaatattctgctggggtgacatgatgcccgtgcaataaaaatggtaagcatcgctgatttcaaggtgcagtgcagcctgtcagctttattctgtttgtattcattcattcattcgttcgttcttcatacctacatatcctagctcatttaaaagattctagaatagtagcataatttggagtttgagcctgtcatctttttaaacttaacttggggcaatacctaggttaaggagctcttataacataagaacatccgaaggcttttctcacagttccagttactgagccgtccttgccacgtgtagttaccaatggccatgtcttggcaactaaaactaaattttaaaaaatggtcacgccctgttttgtggcaaaggcttacaagggatagaaacttcagtagaatgaagcatggttttatgctgagtgcaaataaatatcaaaaagacagtctttcatgcactttgtggac

SEQ ID NO: 425420 - DNA, 2173 bp, Homo sapiens
ccgccgctccggacccgcagccgccgccgccgcctcctccccccggatcgggtgtactgtcctaacccgaaagtccagttctgcggcccggcagcggcgagcgggcgcgatgacacaggagtacgacaacaaacggccagtgttggctcttcagaatgaagcactttatccacagcggcggtcctacactagtgaggatgaggcctggaaatccttcctggaaaaccctctcactgcagcgaccaaagcgatgatgagcatcaatggagatgaagacagcgccgctgcgctgggcctgctctatgactactacaaggttccaagagagagaaggtcatcaacagcaaagccagaggtggagcaccctgagccagatcacagcaaaagaaacagcataccaattgtgacagagcagcccctcatctctgctggagaaaacagagtgcaagtactgaaaaatgtgccatttaacattgtccttccccatggcaaccagctgggcattgataagagaggccatctgacagctccagatacgacagtcactgtctccatagcaacgatgcctacccactccatcaagacagaaacccagccacatggcttcgctgtgggaatccccccagcagtgtatcatcctgagcccactgagcgggtggtggttttcgatcggaatctcaatactgaccagttcagctctggtgctcaagccccaaatgctcaaaggcgaactccagactcgaccttctcagagaccttcaaggaaggcgttcaggaggttttcttcccctcggatctcagtctgcggatgcctggcatgaattcagaggactatgtttttgacagtgtttctgggaacaactttgaatataccctagaagcttcaaaatcacttcgacagaagccaggagacagtaccatgacgtacctgaacaaaggccagttctatcccatcaccttgaaggaggtgagcagcagtgaaggaatccatcatcccatcagcaaagttcgaagtgtgatcatggtggtttttgctgaagacaaaagcagagaagatcagttaaggcattggaagtactggcactcccggcagcacaccgctaaacaaagatgcattgacatagctgactataaagaaagcttcaacactatcagtaacatcgaggagattgcgtataacgccatttccttcacatgggacatcaacgatgaagcaaaggttttcatctctgtgaactgcttaagcacagatttctcttcccagaagggagtgaaggggttgcctcttaacattcaagttgatacctatagttacaacaaccgcagcaacaagcctgtgcaccgggcctactgccagatcaaggtcttctgtgacaagggagctgagcggaaaatcagggatgaagaacgaaagcaaagcaaaagaaaagtttctgatgttaaagtgccactgcttccctctcacaagcgaatggatatcacagttttcaaacccttcattgatctcgatactcagcctgtcctcttcattcctgacgtgcactttgccaacttgcagcggggcactcatgtaggtaaccaggatcccaggggaggttaccaggaaggaaggcatggcaaaaggaaattctttggcattattcatggggaaacagaagccaaaattgagtgaggtttgaccagttagtcagctctttgggaatattctgctggggtgacatgatgcccgtgcaataaaaatggtaagcatcgctgatttcaaggtgcagtgcagcctgtcagctttattctgtttgtattcattcattcattcgttcgttcttcatacctacatatcctagctcatttaaaagattctagaatagtagcataatttggagtttgagcctgtcatctttttaaacttaacttggggcaatacctaggttaaggagctcttataacataagaacatccgaaggcttttctcacagttccagttactgagccgtccttgccacgtgtagttaccaatggccatgtcttggcaactaaaactaaattttaaaaaatggtcacgccctgttttgtggcaaaggcttacaagggatagaaacttcagtagaatgaagcatggttttatgctgagtgcaaataaatatcaaaaagacagtctttcatgcactttgtggac

SEQ ID NO: 425421 - DNA, 476 bp, Homo sapiens
cctcgttttccccctaggcagacctaaatcaagcagcttaccacaatagtgcatgctgagtagattagttccaaggaagggagactggaatgctggtgtcaaggaaaagcctccctcatcatctagtctaagaccataacgggcagaagcataagaggttccagggccataggagaatgagaagtagggcacatatagggaggaaagaaaagtgaagaagggggaaatctctgaatttttttactgctgggaaaagtgtactacatgaaggatgcttggggctttgctaacctgctcaccgctaaccctccaagtctaaccatccccagaggccacacaaaccaagtgactcctgtagttcccatttgccccactatggagtcagggcaaaagtggaatagccactccatgtgattttagcatgtttaatcattttaacaataaaccaccccacaaatggggtcatttaacctcta

SEQ ID NO: 425422 - DNA, 322 bp, Homo sapiens
ctcctcgaggattcccgccagtctgcgtccatcagctgtggaataatggcaacagaaagactggctaactacaccggaggcatctatgccgaataccaggacaccacatatataaaccatgtcgtttccgtggctgggtggggcatcagtgatgggagcaagacagtcttcgtcccatcaggagagccaccggctgcccgtggaggtggcttacaagcgcggcctcttcgatgaggagatgaacgagatcctgaccgacccctcggacgacaccaagggcttctttgaccctaacacggaggagaacctcacctacctgcag

SEQ ID NO: 425423 - DNA, 710 bp, Homo sapiens
atccacctgcctcggcctcccaaagtgctggaattacaggcgtgagccacggcgcccagccatatcagattatttctaatgacggtaaattctctcaatttaaaagtggtaattcttaactgcttgctctcagctgtggaataatggcaacagaaagactggctaactacaccggaggcatctatgccgaataccaggacaccacatatataaaccatgtcgtttccgtggctgggtggggcatcagtgatgggactgagtactggattgtccggaattcatggggtgaaccatgggtaagatgttttcattttcttaaggtcattcctagaaaaaaacgtcctggtactcctctcgcttgaatggttctgtttacgtttagctaaaaactggggccttgacagagggttccttgctccagctgtctcagccaccgcgcgagtggcttttggggccagacccttctctgacatgcgcggctgccgccatcctgtgcactttgggtgttcagcagcatccctggcccctccacccactaggtgactccccgcaatcccagtgtgaccaaaaccgtctccagatggtgcctggtgccctggggaagtccctgtgagcactgctggagaggggctctgccaccctcttcctttacaaccagctcattctttttcccatcatggtttttgggctcccctaaaatactgtgtcgg

SEQ ID NO: 425424 - DNA, 1616 bp, Homo sapiens
aaatggtgaaagggggggaggggagaaaagaaaaaaaaaaaaagaaaggggaaaggggggaaaaataagaaaaagcgagacagaggcgctgccgcgtccgctcgcggggaaggctggggtcggccgggtgctaggccggggccgaggccgaggccggggcgggatccagagcgggagccggcgcgggatctgggactcggagcgggatccggagcgggacccaggagccggcgcggggccatggcgaggcgcgggccagggtggcggccgcttctgctgctcgtgctgctggcgggcgcggcgcagggcggcctctacttccgccggggacagacctgctaccggcctctgcggggggacgggctggctccgctggggcgcagcacatacccccggcctcatgagtacctgtccccagcggatctgcccaagagctgggactggcgcaatgtggatggtgtcaactatgccagcatcacccggaaccagcacatcccccaatactgcggctcctgctgggcccacgccagcaccagcgctatggcggatcggatcaacatcaagaggaagggagcgtggccctccaccctcctgtccgtgcagaacgtcatcgactgcggtaacgctggctcctgtgaagggggtaatgacctgtccgtgtgggactacgcccaccagcacggcatccctgacgagacctgcaacaactaccaggccaaggaccaggagtgtgacaagtttaaccaatgtgggacatgcaatgaattcaaagagtgccacgccatccggaactacaccctctggagggtgggagactacggctccctctctgggagggagaagatgatggcagaaatctacgcaaatggtcccatcagctgtggaataatggcaacagaaagactggctaactacaccggaggcatctatgccgaataccaggacaccacatatataaaccatgtcgtttccgtggctgggtggggcatcagtgatgggactgagtactggattgtccggaattcatggggtgaaccatggggcgagagaggctggctgaggatcgtgaccagcacctataaggatgggaagggcgccagatacaaccttgccatcgaggagcactgtacatttggggaccccatcgtttaaggccatgtcactagaagcgcagtttaagaaaaggcatggtgacccatgaccagaggggatcctatggttatgtgtgccaggctggctggcaggaactggggtggctatcaatattggatggcgaggacagcgtggtactggctgcgagtgttcctgagagttgaaagtgggatgacttatgacacttgcacagcatggctctgcctcacaatgatgcagtcagccacctggtgaagaagtgacctgcgacacaggaaacgatgggacctcagtcttcttcagcagaggacttgatattttgtatttggcaactgtgggcaataatatggcatttaagaggtgaaagagttcagacttatcaccattcttatgtcactttagaatcaagggtgggggagggagggagggagttggcagtttcaaatcgcccaagtgatgaataaagtatctggctctgcacgaga

SEQ ID NO: 425425 - DNA, 1992 bp, Homo sapiens
  misc_feature (1545)..(1545): n is a, c, g, or t
  misc_feature (1547)..(1547): n is a, c, g, or t
  misc_feature (1551)..(1551): n is a, c, g, or t
  misc_feature (1556)..(1556): n is a, c, g, or t
aaatggtgaaagggggggaggggagaaaagaaaaaaaaaaaaagaaaggggaaaggggggaaaaataagaaaaagcgagacagaggcgctgccgcgtccgctcgcggggaaggctggggtcggccgggtgctaggccggggccgaggccgaggccggggcgggatccagagcgggagccggcgcgggatctgggactcggagcgggatccggagcgggacccaggagccggcgcggggccatggcgaggcgcgggccagggtggcggccgcttctgctgctcgtgctgctggcgggcgcggcgcagggcggcctctacttccgccggggacagacctgctaccggcctctgcggggggacgggctggctccgctggggcgcagcacatacccccggcctcatgagtacctgtccccagcggatctgcccaagagctgggactggcgcaatgtggatggtgtcaactatgccagcatcacccggaaccagcacatcccccaatactgcggctcctgctgggcccacgccagcaccagcgctatggcggatcggatcaacatcaagaggaagggagcgtggccctccaccctcctgtccgtgcagaacgtcatcgactgcggtaacgctggctcctgtgaagggggtaatgacctgtccgtgtgggactacgcccaccagcacggcatccctgacgagacctgcaacaactaccaggccaaggaccaggagtgtgacaagtttaaccaatgtgggacatgcaatgaattcaaagagtgccacgccatccggaactacaccctctggagggtgggagactacggctccctctctgggagggagaagatgatggcagaaatctacgcaaatggtcccatcagctgtggaataatggcaacagaaagactggctaactacaccggaggcatctatgccgaataccaggacaccacatatataaaccatgtcgtttccgtggctgggtggggcatcagtgatgggactgagtactggattgtccggaattcatggggtgaaccatggggcgagagaggctggctgaggatcgtgaccagcacctataaggatgggaagggcgccagatacaaccttgccatcgaggagcactgtacatttggggaccccatcgtttaaggccatgtcactagaagcgcagtttaagaaaaggcatggtgacccatgaccagaggggatcctatggttatgtgtgccaggctggctggcaggaactggggtggctatcaatattggatggcgaggacagcgtggtactggctgcgagtgttcctgagagttgaaagtgggatgacttatgacacttgcacagcatggctctgcctcacaatgatgcagtcagccacctggtgaagaagtgacctgcgacacaggaaacgatgggacctcagtcttcttcagcagaggacttgatattttgtatttggcaactgtgggcaataatatggcatttaagaggtgaaagagttcagacttatcaccattcttatgtcactttagaatcaagggtcntntgcnttatntgtgtaactgtatgactggattgccagatccagtcctgcagactatgccatgtccaaggcggaacctgaagttgacaggtcccgcttaacatatgccaactttgctgatgtgaatgctgcaaatgcttttgagggttttgatttaggcgttgatcctatcgcctagtttttcacatccattatgccttgcagttcagtccttggcacagtggcttcgataattttgagggcatcttgctttaccagttagtacctgcattgtccttgtctacgtcttacgatgcccttcttacagttattttattatgatttatattgttcttcccctcaccctatttcatctttcttgtttcattacgacactttcacttcttgaattctctatcctctactctttgctcggtcacttctccctacatctctctctatccttccc

SEQ ID NO: 425426 - DNA, 1512 bp, Homo sapiens
aaatggtgaaagggggggaggggagaaaagaaaaaaaaaaaaagaaaggggaaaggggggaaaaataagaaaaagcgagacagaggcgctgccgcgtccgctcgcggggaaggctggggtcggccgggtgctaggccggggccgaggccgaggccggggcgggatccagagcgggagccggcgcgggatctgggactcggagcgggatccggagcgggacccaggagccggcgcggggccatggcgaggcgcgggccagggtggcggccgcttctgctgctcgtgctgctggcgggcgcggcgcagggcggcctctacttccgccggggacagacctgctaccggcctctgcggggggacgggctggctccgctggggcgcagcacatacccccggcctcatgagtacctgtccccagcggatctgcccaagagctgggactggcgcaatgtggatggtgtcaactatgccagcatcacccggaaccagcacatcccccaatactgcggctcctgctgggcccacgccagcaccagcgctatggcggatcggatcaacatcaagaggaagggagcgtggccctccaccctcctgtccgtgcagaacgtcatcgactgcggtaacgctggctcctgtgaagggggtaatgacctgtccgtgtgggactacgcccaccagcacggcatccctgacgagacctgcaacaactaccaggccaaggaccaggagtgtgacaagtttaaccaatgtgggacatgcaatgaattcaaagagtgccacgccatccggaactacaccctctggagggtgggagactacggctccctctctgggagggagaagatgatggcagaaatctacgcaaatggtcccatcagctgtggaataatggcaacagaaagactggctaactacaccggaggcatctatgccgaataccaggacaccacatatataaaccatgtcgtttccgtggctgggtggggcatcagtgatgggactgagtactggattgtccggaattcatggggtgaaccatggggcgagagaggctggctgaggatcgtgaccagcacctataaggatgggaagggcgccagatacaaccttgccatcgaggagcactgtacatttggggaccccatcgtttaaggccatgtcactagaagcgcagtttaagaaaaggcatggtgacccatgaccagaggggatcctatggttatgtgtgccaggctggctggcaggaactggggtggctatcaatattggatggcgaggacagcgtggtactggctgcgagtgttcctgagagttgaaagtgggatgacttatgacacttgcacagcatggctctgcctcacaatgatgcagtcagccacctggtgaagaagtgacctgcgacacaggaaacgatgggacctcagtcttcttcagcagaggacttgatattttgtatttggcaacttttcaaatcgcccaagtgatgaataaagtatctggctctgcacgaga

SEQ ID NO: 425427 - DNA, 1455 bp, Homo sapiens
aaatggtgaaagggggggaggggagaaaagaaaaaaaaaaaaagaaaggggaaaggggggaaaaataagaaaaagcgagacagaggcgctgccgcgtccgctcgcggggaaggctggggtcggccgggtgctaggccggggccgaggccgaggccggggcgggatccagagcgggagccggcgcgggatctgggactcggagcgggatccggagcgggacccaggagccggcgcggggccatggcgaggcgcgggccagggtggcggccgcttctgctgctcgtgctgctggcgggcgcggcgcagggcggcctctacttccgccggggacagacctgctaccggcctctgcggggggacgggctggctccgctggggcgcagcacatacccccggcctcatgagtacctgtccccagcggatctgcccaagagctgggactggcgcaatgtggatggtgtcaactatgccagcatcacccggaaccagcacatcccccaatactgcggctcctgctgggcccacgccagcaccagcgctatggcggatcggatcaacatcaagaggaagggagcgtggccctccaccctcctgtccgtgcagaacgtcatcgactgcggtaacgctggctcctgtgaagggggtaatgacctgtccgtgtgggactacgcccaccagcacggcatccctgacgagacctgcaacaactaccaggccaaggaccaggagtgtgacaagtttaaccaatgtgggacatgcaatgaattcaaagagtgccacgccatccggaactacaccctctggagggtgggagactacggctccctctctgggagggagaagatgatggcagaaatctacgcaaatggtcccatcagctgtggaataatggcaacagaaagactggctaactacaccggaggcatctatgccgaataccaggacaccacatatataaaccatgtcgtttccgtggctgggtggggcatcagtgatgggactgagtactggattgtccggaattcatggggtgaaccatgggtaagatgttttcattttcttaaggtcattcctagaaaaaaacgtcctggtactcctctcgcttgaatggttctgtttacgtttagctaaaaactggggccttgacagagggttccttgctccagctgtctcagccaccgcgcgagtggcttttggggccagacccttctctgacatgcgcggctgccgccatcctgtgcactttgggtgttcagcagcatccctggcccctccacccactaggtgactccccgcaatcccagtgtgaccaaaaccgtctccagatggtgcctggtgccctggggaagtccctgtgagcactgctggagaggggctctgccaccctcttcctttacaaccagctcattctttttcccatcatggtttttgggctcccctaaaatactgtgtcgg

SEQ ID NO: 425428 - DNA, 1165 bp, Homo sapiens
aaatggtgaaagggggggaggggagaaaagaaaaaaaaaaaaagaaaggggaaaggggggaaaaataagaaaaagcgagacagaggcgctgccgcgtccgctcgcggggaaggctggggtcggccgggtgctaggccggggccgaggccgaggccggggcgggatccagagcgggagccggcgcgggatctgggactcggagcgggatccggagcgggacccaggagccggcgcggggccatggcgaggcgcgggccagggtggcggccgcttctgctgctcgtgctgctggcgggcgcggcgcagggcggcctctacttccgccggggacagacctgctaccggcctctgcggggggacgggctggctccgctggggcgcagcacatacccccggcctcatgagtacctgtccccagcggatctgcccaagagctgggactggcgcaatgtggatggtgtcaactatgccagcatcacccggaaccagcacatcccccaatactgcggctcctgctgggcccacgccagcaccagcgctatggcggatcggatcaacatcaagaggaagggagcgtggccctccaccctcctgtccgtgcagaacgtcatcgactgcggtaacgctggctcctgtgaagggggtaatgacctgtccgtgtgggactacgcccaccagcacggcatccctgacgagacctgcaacaactaccaggccaaggaccaggagtgtgacaagtttaaccaatgtgggacatgcaatgaattcaaagagtgccacgccatccggaactacaccctctggagggtgggagactacggctccctctctgggagggagaagatgatggcagaaatctacgcaaatggtcccatcagctgtggaataatggcaacagaaagactggctaactacaccggaggcatctatgccgaataccaggacaccacatatataaaccatgtcgtttccgtggctgggtggggcatcagtgatgggagcaagacagtcttcgtcccatcaggagagccaccggctgcccgtggaggtggcttacaagcgcggcctcttcgatgaggagatgaacgagatcctgaccgacccctcggacgacaccaagggcttctttgaccctaacacggaggagaacctcacctacctgcag

SEQ ID NO: 425429 - DNA, 903 bp, Homo sapiens
ataccctgaccctttttggtgtatcccaacccttacgcttgattgggagcccggctgcgcctcttgctcccctccgattctccgattccctctgccatgaaatttccgaaccaactttttttttttttttttttttctctgatgggacgaagatggtcccatcagctgtggaataatggcaacagaaagactggctaactacaccggaggcatctatgccgaataccaggacaccacatatataaaccatgtcgtttccgtggctgggtggggcatcagtgatgggactgagtactggattgtccggaattcatggggtgaaccatggggcgagagaggctggctgaggatcgtgaccagcacctataaggatgggaagggcgccagatacaaccttgccatcgaggagcactgtacatttggggaccccatcgtttaaggccatgtcactagaagcgcagtttaagaaaaggcatggtgacccatgaccagaggggatcctatggttatgtgtgccaggctggctggcaggaactggggtggctatcaatattggatggcgaggacagcgtggtactggctgcgagtgttcctgagagttgaaagtgggatgacttatgacacttgcacagcatggctctgcctcacaatgatgcagtcagccacctggtgaagaagtgacctgcgacacaggaaacgatgggacctcagtcttcttcagcagaggacttgatattttgtatttggcaactgtgggcaataatatggcatttaagaggtgaaagagttcagacttatcaccattcttatgtcactttagaatcaagggtgggggagggagggagggagttggcagtttcaaatcgcccaagtgatgaataaagtatctggctctgcacgaga

SEQ ID NO: 425430 - DNA, 890 bp, Homo sapiens
  misc_feature (146)..(146): n is a, c, g, or t
tcatcttcgtcccatcagctgtggaatatggcaacagaaagactggctaactacaccggaggcatctatccgaataccaggacaccacatattaaccatgtcgtttccgtggctgggtgggcatcactgatgggagcaagacggcncatcagctgtggaataatggcaacagaaagactggctaactacaccggaggcatctatgccgaataccaggacaccacatatataaaccatgtcgtttccgtggctgggtggggcatcagtgatgggactgagtactggattgtccggaattcatggggtgaaccatggggcgagagaggctggctgaggatcgtgaccagcacctataaggatgggaagggcgccagatacaaccttgccatcgaggagcactgtacatttggggaccccatcgtttaaggccatgtcactagaagcgcagtttaagaaaaggcatggtgacccatgaccagaggggatcctatggttatgtgtgccaggctggctggcaggaactggggtggctatcaatattggatggcgaggacagcgtggtactggctgcgagtgttcctgagagttgaaagtgggatgacttatgacacttgcacagcatggctctgcctcacaatgatgcagtcagccacctggtgaagaagtgacctgcgacacaggaaacgatgggacctcagtcttcttcagcagaggacttgatattttgtatttggcaactgtgggcaataatatggcatttaagaggtgaaagagttcagacttatcaccattcttatgtcactttagaatcaagggtgggggagggagggagggagttggcagtttcaaatcgcccaagtgatgaataaagtatctggctctgcacgaga

SEQ ID NO: 425431 - DNA, 814 bp, Homo sapiens
aagagatccctcctatacctgaaaatagattcctaatgagaaaaagtcctcctaaagctgatgggagcaagatcagctgtggaataatggcaacagaaagactggctaactacaccggaggcatctatgccgaataccaggacaccacatatataaaccatgtcgtttccgtggctgggtggggcatcagtgatgggactgagtactggattgtccggaattcatggggtgaaccatggggcgagagaggctggctgaggatcgtgaccagcacctataaggatgggaagggcgccagatacaaccttgccatcgaggagcactgtacatttggggaccccatcgtttaaggccatgtcactagaagcgcagtttaagaaaaggcatggtgacccatgaccagaggggatcctatggttatgtgtgccaggctggctggcaggaactggggtggctatcaatattggatggcgaggacagcgtggtactggctgcgagtgttcctgagagttgaaagtgggatgacttatgacacttgcacagcatggctctgcctcacaatgatgcagtcagccacctggtgaagaagtgacctgcgacacaggaaacgatgggacctcagtcttcttcagcagaggacttgatattttgtatttggcaactgtgggcaataatatggcatttaagaggtgaaagagttcagacttatcaccattcttatgtcactttagaatcaagggtgggggagggagggagggagttggcagtttcaaatcgcccaagtgatgaataaagtatctggctctgcacgaga

SEQ ID NO: 425432 - DNA, 722 bp, Homo sapiens
agctgaggggcagctgagtgggctgtctggatcccccaaggctggcctgagagatggaggcagaaagcagggggcagggggctgacggcagcaaggggagcgggagacggctgcagatgggctgacgcgcgatcccacttctcacagggcgagagaggctggctgaggatcgtgaccagcacctataaggatgggaagggcgccagatacaaccttgccatcgaggagcactgtacatttggggaccccatcgtttaaggccatgtcactagaagcgcagtttaagaaaaggcatggtgacccatgaccagaggggatcctatggttatgtgtgccaggctggctggcaggaactggggtggctatcaatattggatggcgaggacagcgtggtactggctgcgagtgttcctgagagttgaaagtgggatgacttatgacacttgcacagcatggctctgcctcacaatgatgcagtcagccacctggtgaagaagtgacctgcgacacaggaaacgatgggacctcagtcttcttcagcagaggacttgatattttgtatttggcaactgtgggcaataatatggcatttaagaggtgaaagagttcagacttatcaccattcttatgtcactttagaatcaagggtgggggagggagggagggagttggcagtttcaaatcgcccaagtgatgaataaagtatctggctctgcacgaga

SEQ ID NO: 425433 - DNA, 1152 bp, Homo sapiens
aaatggtgaaagggggggaggggagaaaagaaaaaaaaaaaaagaaaggggaaaggggggaaaaataagaaaaagcgagacagaggcgctgccgcgtccgctcgcggggaaggctggggtcggccgggtgctaggccggggccgaggccgaggccggggcgggatccagagcgggagccggcgcgggatctgggactcggagcgggatccggagcgggacccaggagccggcgcggggccatggcgaggcgcgggccagggtggcggccgcttctgctgctcgtgctgctggcgggcgcggcgcagggcggcctctacttccgccggggacagacctgctaccggcctctgcggggggacgggctggctccgctggggcgcagcacatacccccggcctcatgagtacctgtccccagcggatctgcccaagagctgggactggcgcaatgtggatggtgtcaactatgccagcatcacccggaaccagcacatcccccaatactgcggctcctgctgggcccacgccagcaccagcgctatggcgggtgagtggccgcctttgactgtgggccaggaaagcccatcccggctgcctgtttataggcccaggcagctcagcccgcggttccaggggcctgtgattcaaggccaggtcagcctgggctggggtgctaaggccgaggagcgcgggcctttgccctctgctgaggtgacccaagctgggtcattctggggcttttgggtgacaggcaggactaggactgaatcccagtgacaagtggctgccaggtgccctctctcccccaaagcttgtgacctcagccattgggatagaaacagaaatgcaaaatcactgagtccccaggctgtatttgaggatacagaagtaaactgcttctcagcacagatgaaagcctgtcctgggcttggaatattgggtgaggctagttggctacagcccatggcctaacctggtcactacctccagcctggtgggtttctatcttaggcttttggcaggaggagggtagggaggctcttagcaaagaggaaggggaaactaaggccctccctatcaacgaggctgctgcaccctgctttgggagagaaggcgggagaagggacagctgcaaaccagccccaggcccac

SEQ ID NO: 425434 - DNA, 557 bp, Homo sapiens
  misc_feature (36)..(36): n is a, c, g, or t
ccttgcggcgcgagcacttgcggccacagttgccanaatacaaatatcaagtactctgctgaagaagactgaggtggggaccccatcgtttaaggccatgtcactagaagcgcagtttaagaaaaggcatggtgacccatgaccagaggggatcctatggttatgtgtgccaggctggctggcaggaactggggtggctatcaatattggatggcgaggacagcgtggtactggctgcgagtgttcctgagagttgaaagtgggatgacttatgacacttgcacagcatggctctgcctcacaatgatgcagtcagccacctggtgaagaagtgacctgcgacacaggaaacgatgggacctcagtcttcttcagcagaggacttgatattttgtatttggcaactgtgggcaataatatggcatttaagaggtgaaagagttcagacttatcaccattcttatgtcactttagaatcaagggtgggggagggagggagggagttggcagtttcaaatcgcccaagtgatgaataaagtatctggctctgcacgaga

SEQ ID NO: 425435 - DNA, 703 bp, Homo sapiens
aaatggtgaaagggggggaggggagaaaagaaaaaaaaaaaaagaaaggggaaaggggggaaaaataagaaaaagcgagacagaggcgctgccgcgtccgctcgcggggaaggctggggtcggccgggtgctaggccggggccgaggccgaggccggggcgggatccagagcgggagccggcgcgggatctgggactcggagcgggatccggagcgggacccaggagccggcgcggggccatggcgaggcgcgggccagggtggcggccgcttctgctgctcgtgctgctggcgggcgcggcgcagggcggcctctacttccgccggggacagacctgctaccggcctctgcggggggacgggctggctccgctggggcgcagcacatacccccggcctttatgttttttgtaagataaaccgtttttaacacatagcgccgtgctgtaaataagcccagtgctgctgtaaatacaggaagaaagagcttgaggtgggagcggggctgggaggaagggatgggccccgccttcctgggcagcctttccagcctcctgctggctctctcttcctaccctccttccacatgtacataaactgtcactctaggaagaagacaaatgacagattctgacatttatatttgtgtattttcctggatttatagtatgtgacttttctgattaatatatttaatatattg

SEQ ID NO: 425436 - DNA, 502 bp, Homo sapiens
  misc_feature (8)..(8): n is a, c, g, or t
ggatcttnaggtagactaacccaggtcgtgggtgttgagcttcgacaccacatatataaaccatgtcgtttccgtggctgggtggggcatcagtgatgggactgagtactggattgtccggaattcatggggtgaaccatggggcgagagaggctggctgaggatcgtgaccagcacctataaggatgggaagggcgccagatacaaccttgccatcgaggagcactgtacatttggggaccccatcgtttaaggccatgtcactagaagcgcagtttaagaaaaggcatggtgacccatgaccagaggggatcctatggttaggtctacctggcaggtagacctaaccatcttctccttacacctagcaggtgttctcctctatcttaggggccatcaatttcatcacaacaattatcaatataaaaccccctgccataacccaatagccaaacgcccctcttcgtctgatccgtcctaatcacagcagtcctacttctcc

SEQ ID NO: 425437 - DNA, 1580 bp, Homo sapiens
aaatggtgaaagggggggaggggagaaaagaaaaaaaaaaaaagaaaggggaaaggggggaaaaataagaaaaagcgagacagaggcgctgccgcgtccgctcgcggggaaggctggggtcggccgggtgctaggccggggccgaggccgaggccggggcgggatccagagcgggagccggcgcgggatctgggactcggagcgggatccggagcgggacccaggagccggcgcggggccatggcgaggcgcgggccagggtggcggccgcttctgctgctcgtgctgctggcgggcgcggcgcagggcggcctctacttccgccggggacagacctgctaccggcctctgcggggggacgggctggctccgctggggcgcagcacatacccccggcctcatgagtacctgtccccagcggatctgcccaagagctgggactggcgcaatgtggatggtgtcaactatgccagcatcacccggaaccagcacatcccccaatactgcggctcctgctgggcccacgccagcaccagcgctatggcggatcggatcaacatcaagaggaagggagcgtggccctccaccctcctgtccgtgcagaacgtcatcgactgcggtaacgctggctcctgtgaagggggtaatgacctgtccgtgtgggactacgcccaccagcacggcatccctgacgagacctgcaacaactaccaggccaaggaccaggagtgtgacaagtttaaccaatgtgggacatgcaatgaattcaaagagtgccacgccatccggaactacaccctctggagggtgggagactacggctccctctctgggagggagaagatgatggcagaaatctacgcaaatggtcccatcagctgtggaataatggcaacagaaagactggctaactacaccggaggcatctatgccgaataccaggacaccacatatataaaccatgtcgtttccgtggctgggtggggcatcagtgatgggactgagtactggattgtccggaattcatggggtgaaccatggggcgagagaggctggctgaggatcgtgaccagcacctataaggatgggaagggcgccagatacaaccttgccatcgaggagcactgtacatttggggaccccatcgtttaaggccatgtcactagaagcgcagtttaagaaaaggcatggtgacccatgaccagaggggatcctatggttatgtgtgccaggctggctggcaggaactggggtggctatcaatattggatggcgaggacagcgtggtactggctgcgagtgttcctgagagttgaaagtgggatgacttatgacacttgcacagcatggctctgcctcacaatgatgcagtcagccacctggtgaagaagtgacctgcgacacaggaaacgatgggacctcagtcttcttcagcagaggacttgatattttgtatttggcaactgtgggcaataatatggcatttaagaggtgaaagagttcagacttatcaccattcttatgtcactttagaatcaagggtgactgatctataggagtactgatctataggagtggtg

SEQ ID NO: 425438 - DNA, 2116 bp, Homo sapiens
aaatggtgaaagggggggaggggagaaaagaaaaaaaaaaaaagaaaggggaaaggggggaaaaataagaaaaagcgagacagaggcgctgccgcgtccgctcgcggggaaggctggggtcggccgggtgctaggccggggccgaggccgaggccggggcgggatccagagcgggagccggcgcgggatctgggactcggagcgggatccggagcgggacccaggagccggcgcggggccatggcgaggcgcgggccagggtggcggccgcttctgctgctcgtgctgctggcgggcgcggcgcagggcggcctctacttccgccggggacagacctgctaccggcctctgcggggggacgggctggctccgctggggcgcaggtgggcaccggcggggaggcagccctggggggacgggaggcccatcgcccgggccaggcgcgcgctctgcctcctgggggccctgcgtcgccaacaggccttggaaggtcagatccagccgcttcgttttgggggtcgctccttctcttccacatccagggtgagccctgatgtttgtggggttggacaagccccacctggccagaaagccaggccagccccacctcctcggcctctgggggtggcccttacggcgcggcatggctgggggagcaacccggttccctcctttcgggggtgccctgcctccttcacattctgagagcgctggagcctcctagtgtgaggtgggcccacacctggctcacctctggtgattgtggccccactcccatgccctcaggtgttgggaaaggcgggagggccctaccgagggcttcctgggcccacggcccccgggagccccagcaccgatctggggggggatgatctcttctcagcacatacccccggcctcatgagtacctgtccccagcggatctgcccaagagctgggactggcgcaatgtggatggtgtcaactatgccagcatcacccggaaccagcacatcccccaatactgcggctcctgctgggcccacgccagcaccagcgctatggcggatcggatcaacatcaagaggaagggagcgtggccctccaccctcctgtccgtgcagaacgtcatcgactgcggtaacgctggctcctgtgaagggggtaatgacctgtccgtgtgggactacgcccaccagcacggcatccctgacgagacctgcaacaactaccaggccaaggaccaggagtgtgacaagtttaaccaatgtgggacatgcaatgaattcaaagagtgccacgccatccggaactacaccctctggagggtgggagactacggctccctctctgggagggagaagatgatggcagaaatctacgcaaatggtcccatcagctgtggaataatggcaacagaaagactggctaactacaccggaggcatctatgccgaataccaggacaccacatatataaaccatgtcgtttccgtggctgggtggggcatcagtgatgggactgagtactggattgtccggaattcatggggtgaaccatggggcgagagaggctggctgaggatcgtgaccagcacctataaggatgggaagggcgccagatacaaccttgccatcgaggagcactgtacatttggggaccccatcgtttaaggccatgtcactagaagcgcagtttaagaaaaggcatggtgacccatgaccagaggggatcctatggttatgtgtgccaggctggctggcaggaactggggtggctatcaatattggatggcgaggacagcgtggtactggctgcgagtgttcctgagagttgaaagtgggatgacttatgacacttgcacagcatggctctgcctcacaatgatgcagtcagccacctggtgaagaagtgacctgcgacacaggaaacgatgggacctcagtcttcttcagcagaggacttgatattttgtatttggcaactgtgggcaataatatggcatttaagaggtgaaagagttcagacttatcaccattcttatgtcactttagaatcaagggtgggggagggagggagggagttggcagtttcaaatcgcccaagtgatgaataaagtatctggctctgcacgaga

SEQ ID NO: 425439 - DNA, 1168 bp, Homo sapiens
ctcagaggaccccaaagattttgagcatcacccggaaccagcacatcccccaatactgcggctcctgctgggcccacgccagcaccagcgctatggcggatcggatcaacatcaagaggaagggagcgtggccctccaccctcctgtccgtgcagaacgtcatcgactgcggtaacgctggctcctgtgaagggggtaatgacctgtccgtgtgggactacgcccaccagcacggcatccctgacgagacctgcaacaactaccaggccaaggaccaggagtgtgacaagtttaaccaatgtgggacatgcaatgaattcaaagagtgccacgccatccggaactacaccctctggagggtgggagactacggctccctctctgggagggagaagatgatggcagaaatctacgcaaatggtcccatcagctgtggaataatggcaacagaaagactggctaactacaccggaggcatctatgccgaataccaggacaccacatatataaaccatgtcgtttccgtggctgggtggggcatcagtgatgggactgagtactggattgtccggaattcatggggtgaaccatggggcgagagaggctggctgaggatcgtgaccagcacctataaggatgggaagggcgccagatacaaccttgccatcgaggagcactgtacatttggggaccccatcgtttaaggccatgtcactagaagcgcagtttaagaaaaggcatggtgacccatgaccagaggggatcctatggttatgtgtgccaggctggctggcaggaactggggtggctatcaatattggatggcgaggacagcgtggtactggctgcgagtgttcctgagagttgaaagtgggatgacttatgacacttgcacagcatggctctgcctcacaatgatgcagtcagccacctggtgaagaagtgacctgcgacacaggaaacgatgggacctcagtcttcttcagcagaggacttgatattttgtatttggcaactgtgggcaataatatggcatttaagaggtgaaagagttcagacttatcaccattcttatgtcactttagaatcaagggtgggggagggagggagggagttggcagtttcaaatcgcccaagtgatgaataaagtatctggctctgcacgaga

SEQ ID NO: 425440 - DNA, 773 bp, Homo sapiens
ctcctcgaggattcccgccagtctgcgtccatcagctgtggaataatggcaacagaaagactggctaactacaccggaggcatctatgccgaataccaggacaccacatatataaaccatgtcgtttccgtggctgggtggggcatcagtgatgggactgagtactggattgtccggaattcatggggtgaaccatggggcgagagaggctggctgaggatcgtgaccagcacctataaggatgggaagggcgccagatacaaccttgccatcgaggagcactgtacatttggggaccccatcgtttaaggccatgtcactagaagcgcagtttaagaaaaggcatggtgacccatgaccagaggggatcctatggttatgtgtgccaggctggctggcaggaactggggtggctatcaatattggatggcgaggacagcgtggtactggctgcgagtgttcctgagagttgaaagtgggatgacttatgacacttgcacagcatggctctgcctcacaatgatgcagtcagccacctggtgaagaagtgacctgcgacacaggaaacgatgggacctcagtcttcttcagcagaggacttgatattttgtatttggcaactgtgggcaataatatggcatttaagaggtgaaagagttcagacttatcaccattcttatgtcactttagaatcaagggtgggggagggagggagggagttggcagtttcaaatcgcccaagtgatgaataaagtatctggctctgcacgaga

SEQ ID NO: 425441 - DNA, 1093 bp, Homo sapiens
  misc_feature (349)..(349): n is a, c, g, or t
tgaaactcctaacctgagttgttgatttatggcgtctcctctaccaggcttactacttttgcatttatgaatctctattatatgagattgatctgtgtcaccccaaaattcatagtttgaactcctaactgccagtacctcacatgcgatcttatttcgagatagggtctttatagaagtaatcaagtgtattagtccactctcgcactgctataaacaaatacctgaagctgggtaatttataaagaaaagaggtttaattggctcatgattctgcaggctgtacaggaatcctggctggagatgccttgggaaactcacaattatggctgatgggagcaagacggcncatcagctgtggaataatggcaacagaaagactggctaactacaccggaggcatctatgccgaataccaggacaccacatatataaaccatgtcgtttccgtggctgggtggggcatcagtgatgggactgagtactggattgtccggaattcatggggtgaaccatggggcgagagaggctggctgaggatcgtgaccagcacctataaggatgggaagggcgccagatacaaccttgccatcgaggagcactgtacatttggggaccccatcgtttaaggccatgtcactagaagcgcagtttaagaaaaggcatggtgacccatgaccagaggggatcctatggttatgtgtgccaggctggctggcaggaactggggtggctatcaatattggatggcgaggacagcgtggtactggctgcgagtgttcctgagagttgaaagtgggatgacttatgacacttgcacagcatggctctgcctcacaatgatgcagtcagccacctggtgaagaagtgacctgcgacacaggaaacgatgggacctcagtcttcttcagcagaggacttgatattttgtatttggcaactgtgggcaataatatggcatttaagaggtgaaagagttcagacttatcaccattcttatgtcactttagaatcaagggtgggggagggagggagggagttggcagtttcaaatcgcccaagtgatgaataaagtatctggctctgcacgaga

SEQ ID NO: 425442 - DNA, 896 bp, Homo sapiens
gtctagaggatccctcttcgtccatcagccagattcacacatcccttccaccatatggagaagtggcatttgaattggcgttaacggacagcacggtttggagttgggcagctgggcaatggaaataccgatcctgatgggagcaagatgcccatcagctgtggaataatggcaacagaaagactggctaactacaccggaggcatctatgccgaataccaggacaccacatatataaaccatgtcgtttccgtggctgggtggggcatcagtgatgggactgagtactggattgtccggaattcatggggtgaaccatggggcgagagaggctggctgaggatcgtgaccagcacctataaggatgggaagggcgccagatacaaccttgccatcgaggagcactgtacatttggggaccccatcgtttaaggccatgtcactagaagcgcagtttaagaaaaggcatggtgacccatgaccagaggggatcctatggttatgtgtgccaggctggctggcaggaactggggtggctatcaatattggatggcgaggacagcgtggtactggctgcgagtgttcctgagagttgaaagtgggatgacttatgacacttgcacagcatggctctgcctcacaatgatgcagtcagccacctggtgaagaagtgacctgcgacacaggaaacgatgggacctcagtcttcttcagcagaggacttgatattttgtatttggcaactgtgggcaataatatggcatttaagaggtgaaagagttcagacttatcaccattcttatgtcactttagaatcaagggtgggggagggagggagggagttggcagtttcaaatcgcccaagtgatgaataaagtatctggctctgcacgaga

SEQ ID NO: 425443 - DNA, 717 bp, Homo sapiens
  misc_feature (8)..(8): n is a, c, g, or t
ggatcttnaggtagactaacccaggtcgtgggtgttgagcttcgacaccacatatataaaccatgtcgtttccgtggctgggtggggcatcagtgatgggactgagtactggattgtccggaattcatggggtgaaccatggggcgagagaggctggctgaggatcgtgaccagcacctataaggatgggaagggcgccagatacaaccttgccatcgaggagcactgtacatttggggaccccatcgtttaaggccatgtcactagaagcgcagtttaagaaaaggcatggtgacccatgaccagaggggatcctatggttatgtgtgccaggctggctggcaggaactggggtggctatcaatattggatggcgaggacagcgtggtactggctgcgagtgttcctgagagttgaaagtgggatgacttatgacacttgcacagcatggctctgcctcacaatgatgcagtcagccacctggtgaagaagtgacctgcgacacaggaaacgatgggacctcagtcttcttcagcagaggacttgatattttgtatttggcaactgtgggcaataatatggcatttaagaggtgaaagagttcagacttatcaccattcttatgtcactttagaatcaagggtgggggagggagggagggagttggcagtttcaaatcgcccaagtgatgaataaagtatctggctctgcacgaga

SEQ ID NO: 425444 - DNA, 1123 bp, Homo sapiens
aaaggcagcctatgggctgagcgggggatggggagagaagagggatagggccagcaaggcagggatcgaacgagtgtctggcagccgggagcccagcgaagagagcgagcaagcttaggaaaacgagccatggtggctgtatggacagtctgacagaacagagactgacatctcccaatctgccggccccccacctggaacactacagtgttctgcattgcaccatgaccctggatgtgcaaactgtagtcgtttttgccgtgattgtagtcctcctgcttgtcaatgtcatactcatgtttttcctgggaacgcgctgaatggagtccagccacctgagctgtcgcgaactctcgctttgatttcatcccgagagccaccgagaaaaaaaaaaaatcacagacagagacagggaaagagagagaaagaacaagctttcttactcaggggggaaaacgttttgagcttcaacatggcctcgctgtgatatgtatgacgttggtggtagcaggccatccagtgaaatgtggagcaggcagtaggaaatatgggactggaggtgagcgagaactgatgtcatgagaaggatgattcatctgaagaactaagtggagagaacaaaaagcaaaggtccctattgacttttgaatgcggcagtcaagggtttaagtgggaagcccacttctcaattttcccaggtagtctgactgtgttgccagcaatgcttgagtgagttatcttcaggaaaaagttctcatttttttgagcagaaagcagtaaaagcatcctatcaagcacaaagaagggtgaggagaattaagctgcaataatgacatccccgtcctttgcagagtaagtgttagcctcagtagaataccagagctggaagggacttgagaggtcatctgtatggttccagtctgtcacttgacatgtaaaaaaactgagacgggctgggtgcggtggctcacgcctgtagtcccagcactttgggaggccaaggcaggcggatcacctgaggtcaggagttcaagaccagcctggccaacatggtgaaaccctgtctctacgaaaaatacaaaaaattagccaggtgtggtggaagatgcctgtaatcccagct

SEQ ID NO: 425445 - DNA, 5205 bp, Homo sapiens
aaaggcagcctatgggctgagcgggggatggggagagaagagggatagggccagcaaggcagggatcgaacgagtgtctggcagccgggagcccagcgaagagagcgagcaagcttaggaaaacgagcgaagtaaagggagtaggggagactgagactgaccggtagccaggcaggcggacggacgcacgcccggacagactgagcaggcgccggagaaccactcacagcatggtggctgtatggacagtctgacagaacagagactgacatctcccaatctgccggccccccacctggaacactacagtgttctgcattgcaccatgaccctggatgtgcaaactgtagtcgtttttgccgtgattgtagtcctcctgcttgtcaatgtcatactcatgtttttcctgggaacgcgctgaatggagtccagccacctgagctgtcgcgaactctcgctttgatttcatcccgagagccaccgagaaaaaaaaaaaatcacagacagagacagggaaagagagagaaagaacaagctttcttactcaggggggaaaacgttttgagcttcaacatggcctcgctgtgatatgtatgacgttgctgatcactggagattccatcgttagtgctgaggcagtatgggatcacgtcaccatggccaaccgggagttggcatttaaagctggcgacgtcatcaaagtcttggatgcttccaacaaggattggtggtggggccagatcgacgatgaggagggatggtttcctgccagctttgtgaggctctgggtgaaccaggaggatgaggtggaggaggggcccagcgatgtgcagaacggacacctggaccccaattcagactgcctctgtctggggcggccactacagaaccgggaccagatgcgggccaatgtcatcaatgagataatgagcactgagcgtcactacatcaagcacctcaaggatatttgtgagggctatctgaagcagtgccggaagagaagggacatgttcagtgacgagcaactgaaggtaatctttgggaacattgaagatatctacagatttcagatgggctttgtgagagacctggagaaacagtataacaatgatgacccccacctcagcgagataggaccctgcttcctagagcaccaagatggattctggatatactctgagtattgtaacaaccacctggatgcttgcatggagctctccaaactgatgaaggacagccgctaccagcacttctttgaggcctgtcgcctcttgcagcagatgattgacattgctatcgatggtttccttttgactccagtgcagaagatctgcaagtatcccttacagttggctgagctcctaaagtatactgcccaagaccacagtgactacaggtatgtggcagctgctttggctgtcatgagaaatgtgactcagcagatcaacgaacgcaagcgacgtttagagaatattgacaagattgctcagtggcaggcttctgtcctagactgggagggcgaggacatcctagacaggagctcggagctgatctacactggggagatggcctggatctaccagccctacggccgcaaccagcagcgggtcttcttcctgtttgaccaccagatggtcctctgcaagaaggacctaatccggagagacatcctgtactacaaaggccgcattgacatggataaatatgaggtagttgacattgaggatggcagagatgatgacttcaatgtcagcatgaagaatgcctttaagcttcacaacaaggagactgaggagatacatctgttctttgccaagaagctggaggaaaaaatacgctggctcagggctttcagagaagagaggaaaatggtacaggaagatgaaaaaattggctttgaaatttctgaaaaccagaagaggcaggctgcaatgactgtgagaaaagtccctaagcaaaaaggtgtcaactctgcccgctcagttcctccttcctacccaccaccgcaggacccgttaaaccacggccagtacctggtccccgacggcatcgctcagtcgcaggtctttgagttcaccgaacccaagcgcagccagtcaccattctggcaaaacttcagcaggttaacccccttcaaaaaatgatacctacagggaggcagataattttaaaataaagtaaataaaattatatttatagatggaccttttttcggagaagcactgttgaaatttatacacacacacacacacagagacccttgagtacacatacacacacacacacacagacacacacacacacacacacacacacacacacacagagagataaggaacaaaagtgttttctgttgttttggggaagtgaaatatgtggttggtaggaagaggtaccaatgacttccaaacatgtgattccgtcttaaaagttttccatttttaccctgtcccccttccctttgctttcagaagttgacatttctattcattgcttttcttgttaagataatctctttactcccctgtgagtgattcactgccttgtcattattacgatagatgtgtttgtattgttttttttctgatgatactgatgttgatgaatttttaattttatttgatgtggtagagttgggaggtttcagggttttttcccctcttttactttccattgaggaagggaatgagctcctttctcctctccttcagccaatcattatcaaatgttccttcagccctgcagttgccccaaataaccttttttcagcatcctctgtcctcagtcatgccagtctggacatgctctgttgtgccctgtgacaaaactgctcagtattcctattgcttttactgtgttttaggtactgtgaagggatcaaaaaaccaaacagaagcaagggagtatcagactatgatgatgctggagtggacttctgttcagggaacattttgcattcaggctgtttcttctatcactggggtttcccatgttgcagcacttctgggtcgttgcaattttgcatctaggagttagtttgatcgagttattctcttttttcaagtcacttttgttataggtctccccctaggcctgtctctcccttagcccaaaagatctgaactggaagcagaggttgagattctgcctcccaggagagggatttacctgccccctagtaccagataggtttagggcagtgatctctacagcaatcagttcagtgtcctggttgtccctgctcccatttacagatgtttgggcagcattgatagaagtatggaggggttcaagacagagcccacctgatcaagatcatcagctaccttcaaattattgacctggacagggtccaagtctgatagtaaccttttacaagaaagaacagggatgggaatggaaagagatagccttgatccacagtattgtacctgcattttctaccaccctaaaattgtgtgagacttctcccattgttaacagattgcatggacaatcttccctggcttctttctttccctctctctttcttctttctcctgccatcctagcacaggaggatttttggtattgatatagttaaagctgttctggcactcaaagaaggccgtgtttccaacatcctctcatcccaggacatttggggcaagtgagttaggggcccaggggcaattttccctctgaataacgtgtctgaggcagggatgctaccctcaggctcgcttttggccagctttttgcttgggaaaatctaacttctttcacaaggaggcaggcttcctatggatgttggagtacctgtttttcctccacacatagcccttttcatggatagaccttgaacaacaaaaagggtataagggaataaggatgaactctgctgtgaagagcaagccactgtagtgaggaatgtggagactgggagtctgtcctaaaccccatgggagaagacttcatcatgacaggacttcagcttaccaagcagcagccatagctgtgtggaggcttcagcatagctagcatgtttactgctctatgcctcctgatccagaccaggcattgcccagcctgggaatcttttctttgtgggaatcaaattacaagctatttaagtttatattccatcacaaccaagtcagacttgtattataagtcaaggatgagcctgatctggggagagggccggggctcgggactggccaccactgttcagcacatgacctaactacgtaagcctctttggcaagggtcctggtgcccagcacccaggctaaaatatcctgtctggcagagtgttttggtagctatgcaggcctcccttcagtgtacctctttttccaacttctcactcctccttactaggcttggccttgacatgcttcttcgagggttggcagcacaccgggaggggatgcttggacaagtttctgggcctacatttcttgactaggccctctcatttcctccctccttggggcttctgcccagggctccaggatcagggatattacttctcaacccgcacttctcctctactgaacccactggcatcacctgatgccactaatttgtgaacaacaagaaatcatttccccattggttggagtattccctcagcctatagcatcaaagcagaccagtggccaacagccccaaggggagcccaattaaatacctgggttcagtatcctaacctgttatgtcctgacagcaatggtaaccccagtaattctgtaatgttgtaatttccgcatggccctgagctcccttttcctcaactcagtgaggccaggatttgctctccaaaaggctttgctagtgtgttcaatgggacctgctgtggggagtcctaagacagacatctaattattctctctttttccccccctctctatgtgtatatttctaatggatctataagaacagcaacaagagagttctaacaattctagtgtgaagccaaatagtgatcttttagtgctttggggatggggtgggctggggtggatggatgggcaacagtgactttgattacccttgctgctctgcatttgccagtttattcttttgtttcttttatctgactgactctgtcaaacaagtgtcaaagttgtgtgttaaaaaatgtttaacaaaaaaaatgttgtaatgacacaaagccttatgaaaatatttatggagttcaataaaagaagtaaaaagaca

SEQ ID NO: 425446 - DNA, 4698 bp, Homo sapiens
tcgcacctctccctgccaagacctctaggagcagcagggcggagagacagagcctgccggttggcatggaacaaactgactgaaggcgaggtccggggcggaggggattgggttgtagggctgtggaggaggggcggcggagggggcgctggggctctcgcttgcttcagcccagcccttctagtcagcccgcgacaactcgcgccagctacggggcctcagagaagccggacttcgcaagcaccatgcagtggataaggggcggatcgggaatgctctgggtgaaccaggaggatgaggtggaggaggggcccagcgatgtgcagaacggacacctggaccccaattcagactgcctctgtctggggcggccactacagaaccgggaccagatgcgggccaatgtcatcaatgagataatgagcactgagcgtcactacatcaagcacctcaaggatatttgtgagggctatctgaagcagtgccggaagagaagggacatgttcagtgacgagcaactgaaggtaatctttgggaacattgaagatatctacagatttcagatgggctttgtgagagacctggagaaacagtataacaatgatgacccccacctcagcgagataggaccctgcttcctagagcaccaagatggattctggatatactctgagtattgtaacaaccacctggatgcttgcatggagctctccaaactgatgaaggacagccgctaccagcacttctttgaggcctgtcgcctcttgcagcagatgattgacattgctatcgatggtttccttttgactccagtgcagaagatctgcaagtatcccttacagttggctgagctcctaaagtatactgcccaagaccacagtgactacaggtatgtggcagctgctttggctgtcatgagaaatgtgactcagcagatcaacgaacgcaagcgacgtttagagaatattgacaagattgctcagtggcaggcttctgtcctagactgggagggcgaggacatcctagacaggagctcggagctgatctacactggggagatggcctggatctaccagccctacggccgcaaccagcagcgggtcttcttcctgtttgaccaccagatggtcctctgcaagaaggacctaatccggagagacatcctgtactacaaaggccgcattgacatggataaatatgaggtagttgacattgaggatggcagagatgatgacttcaatgtcagcatgaagaatgcctttaagcttcacaacaaggagactgaggagatacatctgttctttgccaagaagctggaggaaaaaatacgctggctcagggctttcagagaagagaggaaaatggtacaggaagatgaaaaaattggctttgaaatttctgaaaaccagaagaggcaggctgcaatgactgtgagaaaagtccctaagcaaaaaggtgtcaactctgcccgctcagttcctccttcctacccaccaccgcaggacccgttaaaccacggccagtacctggtccccgacggcatcgctcagtcgcaggtctttgagttcaccgaacccaagcgcagccagtcaccattctggcaaaacttcagcaggttaacccccttcaaaaaatgatacctacagggaggcagataattttaaaataaagtaaataaaattatatttatagatggaccttttttcggagaagcactgttgaaatttatacacacacacacacacagagacccttgagtacacatacacacacacacacacagacacacacacacacacacacacacacacacacacagagagataaggaacaaaagtgttttctgttgttttggggaagtgaaatatgtggttggtaggaagaggtaccaatgacttccaaacatgtgattccgtcttaaaagttttccatttttaccctgtcccccttccctttgctttcagaagttgacatttctattcattgcttttcttgttaagataatctctttactcccctgtgagtgattcactgccttgtcattattacgatagatgtgtttgtattgttttttttctgatgatactgatgttgatgaatttttaattttatttgatgtggtagagttgggaggtttcagggttttttcccctcttttactttccattgaggaagggaatgagctcctttctcctctccttcagccaatcattatcaaatgttccttcagccctgcagttgccccaaataaccttttttcagcatcctctgtcctcagtcatgccagtctggacatgctctgttgtgccctgtgacaaaactgctcagtattcctattgcttttactgtgttttaggtactgtgaagggatcaaaaaaccaaacagaagcaagggagtatcagactatgatgatgctggagtggacttctgttcagggaacattttgcattcaggctgtttcttctatcactggggtttcccatgttgcagcacttctgggtcgttgcaattttgcatctaggagttagtttgatcgagttattctcttttttcaagtcacttttgttataggtctccccctaggcctgtctctcccttagcccaaaagatctgaactggaagcagaggttgagattctgcctcccaggagagggatttacctgccccctagtaccagataggtttagggcagtgatctctacagcaatcagttcagtgtcctggttgtccctgctcccatttacagatgtttgggcagcattgatagaagtatggaggggttcaagacagagcccacctgatcaagatcatcagctaccttcaaattattgacctggacagggtccaagtctgatagtaaccttttacaagaaagaacagggatgggaatggaaagagatagccttgatccacagtattgtacctgcattttctaccaccctaaaattgtgtgagacttctcccattgttaacagattgcatggacaatcttccctggcttctttctttccctctctctttcttctttctcctgccatcctagcacaggaggatttttggtattgatatagttaaagctgttctggcactcaaagaaggccgtgtttccaacatcctctcatcccaggacatttggggcaagtgagttaggggcccaggggcaattttccctctgaataacgtgtctgaggcagggatgctaccctcaggctcgcttttggccagctttttgcttgggaaaatctaacttctttcacaaggaggcaggcttcctatggatgttggagtacctgtttttcctccacacatagcccttttcatggatagaccttgaacaacaaaaagggtataagggaataaggatgaactctgctgtgaagagcaagccactgtagtgaggaatgtggagactgggagtctgtcctaaaccccatgggagaagacttcatcatgacaggacttcagcttaccaagcagcagccatagctgtgtggaggcttcagcatagctagcatgtttactgctctatgcctcctgatccagaccaggcattgcccagcctgggaatcttttctttgtgggaatcaaattacaagctatttaagtttatattccatcacaaccaagtcagacttgtattataagtcaaggatgagcctgatctggggagagggccggggctcgggactggccaccactgttcagcacatgacctaactacgtaagcctctttggcaagggtcctggtgcccagcacccaggctaaaatatcctgtctggcagagtgttttggtagctatgcaggcctcccttcagtgtacctctttttccaacttctcactcctccttactaggcttggccttgacatgcttcttcgagggttggcagcacaccgggaggggatgcttggacaagtttctgggcctacatttcttgactaggccctctcatttcctccctccttggggcttctgcccagggctccaggatcagggatattacttctcaacccgcacttctcctctactgaacccactggcatcacctgatgccactaatttgtgaacaacaagaaatcatttccccattggttggagtattccctcagcctatagcatcaaagcagaccagtggccaacagccccaaggggagcccaattaaatacctgggttcagtatcctaacctgttatgtcctgacagcaatggtaaccccagtaattctgtaatgttgtaatttccgcatggccctgagctcccttttcctcaactcagtgaggccaggatttgctctccaaaaggctttgctagtgtgttcaatgggacctgctgtggggagtcctaagacagacatctaattattctctctttttccccccctctctatgtgtatatttctaatggatctataagaacagcaacaagagagttctaacaattctagtgtgaagccaaatagtgatcttttagtgctttggggatggggtgggctggggtggatggatgggcaacagtgactttgattacccttgctgctctgcatttgccagtttattcttttgtttcttttatctgactgactctgtcaaacaagtgtcaaagttgtgtgttaaaaaatgtttaacaaaaaaaatgttgtaatgacacaaagccttatgaaaatatttatggagttcaataaaagaagtaaaaagaca

SEQ ID NO: 425447 - DNA, 4878 bp, Homo sapiens
tcgcacctctccctgccaagacctctaggagcagcagggcggagagacagagcctgccggttggcatggaacaaactgactgaaggcgaggtccggggcggaggggattgggttgtagggctgtggaggaggggcggcggagggggcgctggggctctcgcttgcttcagcccagcccttctagtcagcccgcgacaactcgcgccagctacggggcctcagagaagccggacttcgcaagcaccatgcagtggataaggggcggatcgggaatgctgatcactggagattccatcgttagtgctgaggcagtatgggatcacgtcaccatggccaaccgggagttggcatttaaagctggcgacgtcatcaaagtcttggatgcttccaacaaggattggtggtggggccagatcgacgatgaggagggatggtttcctgccagctttgtgaggctctgggtgaaccaggaggatgaggtggaggaggggcccagcgatgtgcagaacggacacctggaccccaattcagactgcctctgtctggggcggccactacagaaccgggaccagatgcgggccaatgtcatcaatgagataatgagcactgagcgtcactacatcaagcacctcaaggatatttgtgagggctatctgaagcagtgccggaagagaagggacatgttcagtgacgagcaactgaaggtaatctttgggaacattgaagatatctacagatttcagatgggctttgtgagagacctggagaaacagtataacaatgatgacccccacctcagcgagataggaccctgcttcctagagcaccaagatggattctggatatactctgagtattgtaacaaccacctggatgcttgcatggagctctccaaactgatgaaggacagccgctaccagcacttctttgaggcctgtcgcctcttgcagcagatgattgacattgctatcgatggtttccttttgactccagtgcagaagatctgcaagtatcccttacagttggctgagctcctaaagtatactgcccaagaccacagtgactacaggtatgtggcagctgctttggctgtcatgagaaatgtgactcagcagatcaacgaacgcaagcgacgtttagagaatattgacaagattgctcagtggcaggcttctgtcctagactgggagggcgaggacatcctagacaggagctcggagctgatctacactggggagatggcctggatctaccagccctacggccgcaaccagcagcgggtcttcttcctgtttgaccaccagatggtcctctgcaagaaggacctaatccggagagacatcctgtactacaaaggccgcattgacatggataaatatgaggtagttgacattgaggatggcagagatgatgacttcaatgtcagcatgaagaatgcctttaagcttcacaacaaggagactgaggagatacatctgttctttgccaagaagctggaggaaaaaatacgctggctcagggctttcagagaagagaggaaaatggtacaggaagatgaaaaaattggctttgaaatttctgaaaaccagaagaggcaggctgcaatgactgtgagaaaagtccctaagcaaaaaggtgtcaactctgcccgctcagttcctccttcctacccaccaccgcaggacccgttaaaccacggccagtacctggtccccgacggcatcgctcagtcgcaggtctttgagttcaccgaacccaagcgcagccagtcaccattctggcaaaacttcagcaggttaacccccttcaaaaaatgatacctacagggaggcagataattttaaaataaagtaaataaaattatatttatagatggaccttttttcggagaagcactgttgaaatttatacacacacacacacacagagacccttgagtacacatacacacacacacacacagacacacacacacacacacacacacacacacacacagagagataaggaacaaaagtgttttctgttgttttggggaagtgaaatatgtggttggtaggaagaggtaccaatgacttccaaacatgtgattccgtcttaaaagttttccatttttaccctgtcccccttccctttgctttcagaagttgacatttctattcattgcttttcttgttaagataatctctttactcccctgtgagtgattcactgccttgtcattattacgatagatgtgtttgtattgttttttttctgatgatactgatgttgatgaatttttaattttatttgatgtggtagagttgggaggtttcagggttttttcccctcttttactttccattgaggaagggaatgagctcctttctcctctccttcagccaatcattatcaaatgttccttcagccctgcagttgccccaaataaccttttttcagcatcctctgtcctcagtcatgccagtctggacatgctctgttgtgccctgtgacaaaactgctcagtattcctattgcttttactgtgttttaggtactgtgaagggatcaaaaaaccaaacagaagcaagggagtatcagactatgatgatgctggagtggacttctgttcagggaacattttgcattcaggctgtttcttctatcactggggtttcccatgttgcagcacttctgggtcgttgcaattttgcatctaggagttagtttgatcgagttattctcttttttcaagtcacttttgttataggtctccccctaggcctgtctctcccttagcccaaaagatctgaactggaagcagaggttgagattctgcctcccaggagagggatttacctgccccctagtaccagataggtttagggcagtgatctctacagcaatcagttcagtgtcctggttgtccctgctcccatttacagatgtttgggcagcattgatagaagtatggaggggttcaagacagagcccacctgatcaagatcatcagctaccttcaaattattgacctggacagggtccaagtctgatagtaaccttttacaagaaagaacagggatgggaatggaaagagatagccttgatccacagtattgtacctgcattttctaccaccctaaaattgtgtgagacttctcccattgttaacagattgcatggacaatcttccctggcttctttctttccctctctctttcttctttctcctgccatcctagcacaggaggatttttggtattgatatagttaaagctgttctggcactcaaagaaggccgtgtttccaacatcctctcatcccaggacatttggggcaagtgagttaggggcccaggggcaattttccctctgaataacgtgtctgaggcagggatgctaccctcaggctcgcttttggccagctttttgcttgggaaaatctaacttctttcacaaggaggcaggcttcctatggatgttggagtacctgtttttcctccacacatagcccttttcatggatagaccttgaacaacaaaaagggtataagggaataaggatgaactctgctgtgaagagcaagccactgtagtgaggaatgtggagactgggagtctgtcctaaaccccatgggagaagacttcatcatgacaggacttcagcttaccaagcagcagccatagctgtgtggaggcttcagcatagctagcatgtttactgctctatgcctcctgatccagaccaggcattgcccagcctgggaatcttttctttgtgggaatcaaattacaagctatttaagtttatattccatcacaaccaagtcagacttgtattataagtcaaggatgagcctgatctggggagagggccggggctcgggactggccaccactgttcagcacatgacctaactacgtaagcctctttggcaagggtcctggtgcccagcacccaggctaaaatatcctgtctggcagagtgttttggtagctatgcaggcctcccttcagtgtacctctttttccaacttctcactcctccttactaggcttggccttgacatgcttcttcgagggttggcagcacaccgggaggggatgcttggacaagtttctgggcctacatttcttgactaggccctctcatttcctccctccttggggcttctgcccagggctccaggatcagggatattacttctcaacccgcacttctcctctactgaacccactggcatcacctgatgccactaatttgtgaacaacaagaaatcatttccccattggttggagtattccctcagcctatagcatcaaagcagaccagtggccaacagccccaaggggagcccaattaaatacctgggttcagtatcctaacctgttatgtcctgacagcaatggtaaccccagtaattctgtaatgttgtaatttccgcatggccctgagctcccttttcctcaactcagtgaggccaggatttgctctccaaaaggctttgctagtgtgttcaatgggacctgctgtggggagtcctaagacagacatctaattattctctctttttccccccctctctatgtgtatatttctaatggatctataagaacagcaacaagagagttctaacaattctagtgtgaagccaaatagtgatcttttagtgctttggggatggggtgggctggggtggatggatgggcaacagtgactttgattacccttgctgctctgcatttgccagtttattcttttgtttcttttatctgactgactctgtcaaacaagtgtcaaagttgtgtgttaaaaaatgtttaacaaaaaaaatgttgtaatgacacaaagccttatgaaaatatttatggagttcaataaaagaagtaaaaagaca

SEQ ID NO: 425448 - DNA, 5205 bp, Homo sapiens
aaaggcagcctatgggctgagcgggggatggggagagaagagggatagggccagcaaggcagggatcgaacgagtgtctggcagccgggagcccagcgaagagagcgagcaagcttaggaaaacgagcgaagtaaagggagtaggggagactgagactgaccggtagccaggcaggcggacggacgcacgcccggacagactgagcaggcgccggagaaccactcacaggttccccccgcctttccctttgaaagctaggattttgcctttcccgtggcgcccgagagagaatgctggactctgccgacttcagcgcaagctaagatttctcagctagggacaaacgatcagcccaatcctgagaaggggggaaccaagcaccccgtccccatccccctcccctcccccgactaaactcgggcgccaaacccagcccttctctaaccaccctacttcctcctctcctttctagcatggtggctgtatggacagtctgacagaacagagactgacatctcccaatctgccggccccccacctggaacactacagtgttctgcattgcaccatgaccctggatgtgcaaactgtagtcgtttttgccgtgattgtagtcctcctgcttgtcaatgtcatactcatgtttttcctgggaacgcgctgaatggagtccagccacctgagctgtcgcgaactctcgctttgatttcatcccgagagccaccgagaaaaaaaaaaaatcacagacagagacagggaaagagagagaaagaacaagctttcttactcaggggggaaaacgttttgagcttcaacatggcctcgctgtgatatgtatgacgttgctgatcactggagattccatcgttagtgctgaggcagtatgggatcacgtcaccatggccaaccgggagttggcatttaaagctggcgacgtcatcaaagtcttggatgcttccaacaaggattggtggtggggccagatcgacgatgaggagggatggtttcctgccagctttgtgaggctctgggtgaaccaggaggatgaggtggaggaggggcccagcgatgtgcagaacggacacctggaccccaattcagactgcctctgtctggggcggccactacagaaccgggaccagatgcgggccaatgtcatcaatgagataatgagcactgagcgtcactacatcaagcacctcaaggatatttgtgagggctatctgaagcagtgccggaagagaagggacatgttcagtgacgagcaactgaaggtaatctttgggaacattgaagatatctacagatttcagatgggctttgtgagagacctggagaaacagtataacaatgatgacccccacctcagcgagataggaccctgcttcctagagcaccaagatggattctggatatactctgagtattgtaacaaccacctggatgcttgcatggagctctccaaactgatgaaggacagccgctaccagcacttctttgaggcctgtcgcctcttgcagcagatgattgacattgctatcgatggtttccttttgactccagtgcagaagatctgcaagtatcccttacagttggctgagctcctaaagtatactgcccaagaccacagtgactacaggtatgtggcagctgctttggctgtcatgagaaatgtgactcagcagatcaacgaacgcaagcgacgtttagagaatattgacaagattgctcagtggcaggcttctgtcctagactgggagggcgaggacatcctagacaggagctcggagctgatctacactggggagatggcctggatctaccagccctacggccgcaaccagcagcgggtcttcttcctgtttgaccaccagatggtcctctgcaagaaggctttgaaatttctgaaaaccagaagaggcaggctgcaatgactgtgagaaaagtccctaagcaaaaaggtgtcaactctgcccgctcagttcctccttcctacccaccaccgcaggacccgttaaaccacggccagtacctggtccccgacggcatcgctcagtcgcaggtctttgagttcaccgaacccaagcgcagccagtcaccattctggcaaaacttcagcaggttaacccccttcaaaaaatgatacctacagggaggcagataattttaaaataaagtaaataaaattatatttatagatggaccttttttcggagaagcactgttgaaatttatacacacacacacacacagagacccttgagtacacatacacacacacacacacagacacacacacacacacacacacacacacacacacagagagataaggaacaaaagtgttttctgttgttttggggaagtgaaatatgtggttggtaggaagaggtaccaatgacttccaaacatgtgattccgtcttaaaagttttccatttttaccctgtcccccttccctttgctttcagaagttgacatttctattcattgcttttcttgttaagataatctctttactcccctgtgagtgattcactgccttgtcattattacgatagatgtgtttgtattgttttttttctgatgatactgatgttgatgaatttttaattttatttgatgtggtagagttgggaggtttcagggttttttcccctcttttactttccattgaggaagggaatgagctcctttctcctctccttcagccaatcattatcaaatgttccttcagccctgcagttgccccaaataaccttttttcagcatcctctgtcctcagtcatgccagtctggacatgctctgttgtgccctgtgacaaaactgctcagtattcctattgcttttactgtgttttaggtactgtgaagggatcaaaaaaccaaacagaagcaagggagtatcagactatgatgatgctggagtggacttctgttcagggaacattttgcattcaggctgtttcttctatcactggggtttcccatgttgcagcacttctgggtcgttgcaattttgcatctaggagttagtttgatcgagttattctcttttttcaagtcacttttgttataggtctccccctaggcctgtctctcccttagcccaaaagatctgaactggaagcagaggttgagattctgcctcccaggagagggatttacctgccccctagtaccagataggtttagggcagtgatctctacagcaatcagttcagtgtcctggttgtccctgctcccatttacagatgtttgggcagcattgatagaagtatggaggggttcaagacagagcccacctgatcaagatcatcagctaccttcaaattattgacctggacagggtccaagtctgatagtaaccttttacaagaaagaacagggatgggaatggaaagagatagccttgatccacagtattgtacctgcattttctaccaccctaaaattgtgtgagacttctcccattgttaacagattgcatggacaatcttccctggcttctttctttccctctctctttcttctttctcctgccatcctagcacaggaggatttttggtattgatatagttaaagctgttctggcactcaaagaaggccgtgtttccaacatcctctcatcccaggacatttggggcaagtgagttaggggcccaggggcaattttccctctgaataacgtgtctgaggcagggatgctaccctcaggctcgcttttggccagctttttgcttgggaaaatctaacttctttcacaaggaggcaggcttcctatggatgttggagtacctgtttttcctccacacatagcccttttcatggatagaccttgaacaacaaaaagggtataagggaataaggatgaactctgctgtgaagagcaagccactgtagtgaggaatgtggagactgggagtctgtcctaaaccccatgggagaagacttcatcatgacaggacttcagcttaccaagcagcagccatagctgtgtggaggcttcagcatagctagcatgtttactgctctatgcctcctgatccagaccaggcattgcccagcctgggaatcttttctttgtgggaatcaaattacaagctatttaagtttatattccatcacaaccaagtcagacttgtattataagtcaaggatgagcctgatctggggagagggccggggctcgggactggccaccactgttcagcacatgacctaactacgtaagcctctttggcaagggtcctggtgcccagcacccaggctaaaatatcctgtctggcagagtgttttggtagctatgcaggcctcccttcagtgtacctctttttccaacttctcactcctccttactaggcttggccttgacatgcttcttcgagggttggcagcacaccgggaggggatgcttggacaagtttctgggcctacatttcttgactaggccctctcatttcctccctccttggggcttctgcccagggctccaggatcagggatattacttctcaacccgcacttctcctctactgaacccactggcatcacctgatgccactaatttgtgaacaacaagaaatcatttccccattggttggagtattccctcagcctatagcatcaaagcagaccagtggccaacagccccaaggggagcccaattaaatacctgggttcagtatcctaacctgttatgtcctgacagcaatggtaaccccagtaattctgtaatgttgtaatttccgcatggccctgagctcccttttcctcaactcagtgaggccaggatttgctctccaaaaggctttgctagtgtgttcaatgggacctgctgtggggagtcctaagacagacatctaattattctctctttttccccccctctctatgtgtatatttctaatggatctataagaacagcaacaagagagttctaacaattctagtgtgaagccaaatagtgatcttttagtgctttggggatggggtgggctggggtggatggatgggcaacagtgactttgattacccttgctgctctgcatttgccagtttattcttttgtttcttttatctgactgactctgtcaaacaagtgtcaaagttgtgtgttaaaaaatgtttaacaaaaaaaatgttgtaatgacacaaagccttatgaaaatatttatggagttcaataaaagaagtaaaaagaca

SEQ ID NO: 425449 - DNA, 4721 bp, Homo sapiens
  misc_feature (4661)..(4661): n is a, c, g, or t
  misc_feature (4671)..(4671): n is a, c, g, or t
  misc_feature (4698)..(4698): n is a, c, g, or t
  misc_feature (4715)..(4715): n is a, c, g, or t
aaaggcagcctatgggctgagcgggggatggggagagaagagggatagggccagcaaggcagggatcgaacgagtgtctggcagccgggagcccagcgaagagagcgagcaagcttaggaaaacgagcgaagtaaagggagtaggggagactgagactgaccggtagccaggcaggcggacggacgcacgcccggacagactgagcaggcgccggagaaccactcacaggttccccccgcctttccctttgaaagctaggattttgcctttcccgtggcgcccgagagagaatgctggactctgccgacttcagcgcaagctaagatttctcagctagggacaaacgatcagcccaatcctgagaaggggggaaccaagcaccccgtccccatccccctcccctcccccgactaaactcgggcgccaaacccagcccttctctaaccaccctacttcctcctctcctttctagcatggtggctgtatggacagtctgacagaacagagactgacatctcccaatctgccggccccccacctggaacactacagtgttctgcattgcaccatgaccctggatgtgcaaactgtagtcgtttttgccgtgattgtagtcctcctgcttgtcaatgtcatactcatgtttttcctgggaacgcgctgaatggagtccagccacctgagctgtcgcgaactctcgctttgatttcatcccgagagccaccgagaaaaaaaaaaaatcacagacagagacagggaaagagagagaaagaacaagctttcttactcaggggggaaaacgttttgagcttcaacatggcctcgctgtgatatgtatgacgttgctgatcactggagattccatcgttagtgctgaggcagtatgggatcacgtcaccatggccaaccgggagttggcatttaaagctggcgacgtcatcaaagtcttggatgcttccaacaaggattggtggtggggccagatcgacgatgaggagggatggtttcctgccagctttgtgaggctctgggtgaaccaggaggatgaggtggaggaggggcccagcgatgtgcagaacggacacctggaccccaattcagactgcctctgtctggggcggccactacagaaccgggaccagatgcgggccaatgtcatcaatgagataatgagcactgagcgtcactacatcaagcacctcaaggatatttgtgagggctatctgaagcagtgccggaagagaagggacatgttcagtgacgagcaactgaaggtaatctttgggaacattgaagatatctacagatttcagatgggctttgtgagagacctggagaaacagtataacaatgatgacccccacctcagcgagataggaccctgcttcctagagcaccaagatggattctggatatactctgagtattgtaacaaccacctggatgcttgcatggagctctccaaactgatgaaggacagccgctaccagcacttctttgaggcctgtcgcctcttgcagcagatgattgacattgctatcgatggtttccttttgactccagtgcagaagatctgcaagtatcccttacagttggctgagctcctaaagtatactgcccaagaccacagtgactacaggtatgtggcagctgctttggctgtcatgagaaatgtgactcagcagatcaacgaacgcaagcgacgtttagagaatattgacaagattgctcagtggcaggcttctgtcctagactgggagggcgaggacatcctagacaggagctcggagctgatctacactggggagatggcctggatctaccagccctacggccgcaaccagcagcgggtcttcttcctgtttgaccaccagatggtcctctgcaagaaggacctaatccggagagacatcctgtactacaaaggccgcattgacatggataaatatgaggtagttgacattgaggatggcagagatgatgacttcaatgtcagcatgaagaatgcctttaagcttcacaacaaggagactgaggagatacatctgttctttgccaagaagctggaggaaaaaatacgctggctcagggctttcagagaagagaggaaaatggtacaggaagatgaaaaaattggctttgaaatttctgaaaaccagaagaggcaggctgcaatgactgtgagaaaagtccctaagcaaaaaggtgtcaactctgcccgctcagttcctccttcctacccaccaccgcaggacccgttaaaccacggccagtacctggtccccgacggcatcgctcagtcgcaggtctttgagttcaccgaacccaagcgcagccagtcaccattctggcaaaacttcagcaggttaacccccttcaaaaaatgatacctacagggaggcagataattttaaaataaagtaaataaaattatatttatagatggaccttttttcggagaagcactgttgaaatttatacacacacacacacacagagacccttgagtacacatacacacacacacacacagacacacacacacacacacacacacacacacacacagagagataaggaacaaaagtgttttctgttgttttggggaagtgaaatatgtggttggtaggaagaggtaccaatgacttccaaacatgtgattccgtcttaaaagttttccatttttaccctgtcccccttccctttgctttcagaagttgacatttctattcattgcttttcttgttaagataatctctttactcccctgtgagtgattcactgccttgtcattattacgatagatgtgtttgtattgttttttttctgatgatactgatgttgatgaatttttaattttatttgatgtggtagagttgggaggtttcagggttttttcccctcttttactttccattgaggaagggaatgagctcctttctcctctccttcagccaatcattatcaaatgttccttcagccctgcagttgccccaaataaccttttttcagcatcctctgtcctcagtcatgccagtctggacatgctctgttgtgccctgtgacaaaactgctcagtattcctattgcttttactgtgttttaggtactgtgaagggatcaaaaaaccaaacagaagcaagggagtatcagactatgatgatgctggagtggacttctgttcagggaacattttgcattcaggctgtttcttctatcactggggtttcccatgttgcagcacttctgggtcgttgcaattttgcatctaggagttagtttgatcgagttattctcttttttcaagtcacttttgttataggtctccccctaggcctgtctctcccttagcccaaaagatctgaactggaagcagaggttgagattctgcctcccaggagagggatttacctgccccctagtaccagataggtttagggcagtgatctctacagcaatcagttcagtgtcctggttgtccctgctcccatttacagatgtttgggcagcattgatagaagtatggaggggttcaagacagagcccacctgatcaagatcatcagctaccttcaaattattgacctggacagggtccaagtctgatagtaaccttttacaagaaagaacagggatgggaatggaaagagatagccttgatccacagtattgtacctgcattttctaccaccctaaaattgtgtgagacttctcccattgttaacagattgcatggacaatcttccctggcttctttctttccctctctctttcttctttctcctgccatcctagcacaggaggatttttggtattgatatagttaaagctgttctggcactcaaagaaggccgtgtttccaacatcctctcatcccaggacatttggggcaagtgagttaggggcccaggggcaattttccctctgaataacgtgtctgaggcagggatgctaccctcaggctcgcttttggccagctttttgcttgggaaaatctaacttctttcacaaggaggcaggcttcctatggatgttggagtacctgtttttcctccacacatagcccttttcatggatagaccttgaacaacaaaaagggtataagggaataaggatgaactctgctgtgaagagcaagccactgtagtgaggaatgtggagactgggagtctgtcctaaaccccatgggagaagacttcatcatgacaggacttcagcttaccaagcagcagccatagctgtgtggaggcttcagcatagctagcatgtttactgctctatgcctcctgatccagaccaggcattgcccagcctgggaatcttttctttgtgggaatcaaattacaagctatttaagtttatattccatcacaaccaagtcagacttgtattataagtcaaggatgagcctgatctggggagagggccggggctcgggactggccaccactgttcagcacatgacctaactacgtaagcctctttggcaagggtcctggtgcccagcacccaggctaaaatatcctgtctggcagagtgttttggtagctatgcaggcctcccttcagtgtacctctttttccaacttctcactcctccttacttgtccaaagacaaaatgggaagatggattaaatgagtgctgagatttctcttgttgnaacaatctgntaggcaacaagtggccacattacaagnaaccttaccttccaaanaagcca

SEQ ID NO: 425450 - DNA, 3644 bp, Homo sapiens
tgcttttggttacaaaatattttttccctatgtcatgctttatttaacgattctccattaacagactcttagcccatgttcataattctttttttggctctctattctgtgttgtgcattttgtagctaagtttttgttcaagtttgtgacaaatttccttagtgaaattcctagaaattactgggttaaagggaatgattttttttttttttgtatttcaagattttttatatgtcttagcaaatctttcttacagaaaagtttactcatttatacactcagtaagggtgtgtgtttctcatttaaaaaatcatatatttttcttttttaggctttgaaatttctgaaaaccagaagaggcaggctgcaatgactgtgagaaaagtccctaagcaaaaaggtgtcaactctgcccgctcagttcctccttcctacccaccaccgcaggacccgttaaaccacggccagtacctggtccccgacggcatcgctcagtcgcaggtctttgagttcaccgaacccaagcgcagccagtcaccattctggcaaaacttcagcaggttaacccccttcaaaaaatgatacctacagggaggcagataattttaaaataaagtaaataaaattatatttatagatggaccttttttcggagaagcactgttgaaatttatacacacacacacacacagagacccttgagtacacatacacacacacacacacagacacacacacacacacacacacacacacacacacagagagataaggaacaaaagtgttttctgttgttttggggaagtgaaatatgtggttggtaggaagaggtaccaatgacttccaaacatgtgattccgtcttaaaagttttccatttttaccctgtcccccttccctttgctttcagaagttgacatttctattcattgcttttcttgttaagataatctctttactcccctgtgagtgattcactgccttgtcattattacgatagatgtgtttgtattgttttttttctgatgatactgatgttgatgaatttttaattttatttgatgtggtagagttgggaggtttcagggttttttcccctcttttactttccattgaggaagggaatgagctcctttctcctctccttcagccaatcattatcaaatgttccttcagccctgcagttgccccaaataaccttttttcagcatcctctgtcctcagtcatgccagtctggacatgctctgttgtgccctgtgacaaaactgctcagtattcctattgcttttactgtgttttaggtactgtgaagggatcaaaaaaccaaacagaagcaagggagtatcagactatgatgatgctggagtggacttctgttcagggaacattttgcattcaggctgtttcttctatcactggggtttcccatgttgcagcacttctgggtcgttgcaattttgcatctaggagttagtttgatcgagttattctcttttttcaagtcacttttgttataggtctccccctaggcctgtctctcccttagcccaaaagatctgaactggaagcagaggttgagattctgcctcccaggagagggatttacctgccccctagtaccagataggtttagggcagtgatctctacagcaatcagttcagtgtcctggttgtccctgctcccatttacagatgtttgggcagcattgatagaagtatggaggggttcaagacagagcccacctgatcaagatcatcagctaccttcaaattattgacctggacagggtccaagtctgatagtaaccttttacaagaaagaacagggatgggaatggaaagagatagccttgatccacagtattgtacctgcattttctaccaccctaaaattgtgtgagacttctcccattgttaacagattgcatggacaatcttccctggcttctttctttccctctctctttcttctttctcctgccatcctagcacaggaggatttttggtattgatatagttaaagctgttctggcactcaaagaaggccgtgtttccaacatcctctcatcccaggacatttggggcaagtgagttaggggcccaggggcaattttccctctgaataacgtgtctgaggcagggatgctaccctcaggctcgcttttggccagctttttgcttgggaaaatctaacttctttcacaaggaggcaggcttcctatggatgttggagtacctgtttttcctccacacatagcccttttcatggatagaccttgaacaacaaaaagggtataagggaataaggatgaactctgctgtgaagagcaagccactgtagtgaggaatgtggagactgggagtctgtcctaaaccccatgggagaagacttcatcatgacaggacttcagcttaccaagcagcagccatagctgtgtggaggcttcagcatagctagcatgtttactgctctatgcctcctgatccagaccaggcattgcccagcctgggaatcttttctttgtgggaatcaaattacaagctatttaagtttatattccatcacaaccaagtcagacttgtattataagtcaaggatgagcctgatctggggagagggccggggctcgggactggccaccactgttcagcacatgacctaactacgtaagcctctttggcaagggtcctggtgcccagcacccaggctaaaatatcctgtctggcagagtgttttggtagctatgcaggcctcccttcagtgtacctctttttccaacttctcactcctccttactaggcttggccttgacatgcttcttcgagggttggcagcacaccgggaggggatgcttggacaagtttctgggcctacatttcttgactaggccctctcatttcctccctccttggggcttctgcccagggctccaggatcagggatattacttctcaacccgcacttctcctctactgaacccactggcatcacctgatgccactaatttgtgaacaacaagaaatcatttccccattggttggagtattccctcagcctatagcatcaaagcagaccagtggccaacagccccaaggggagcccaattaaatacctgggttcagtatcctaacctgttatgtcctgacagcaatggtaaccccagtaattctgtaatgttgtaatttccgcatggccctgagctcccttttcctcaactcagtgaggccaggatttgctctccaaaaggctttgctagtgtgttcaatgggacctgctgtggggagtcctaagacagacatctaattattctctctttttccccccctctctatgtgtatatttctaatggatctataagaacagcaacaagagagttctaacaattctagtgtgaagccaaatagtgatcttttagtgctttggggatggggtgggctggggtggatggatgggcaacagtgactttgattacccttgctgctctgcatttgccagtttattcttttgtttcttttatctgactgactctgtcaaacaagtgtcaaagttgtgtgttaaaaaatgtttaacaaaaaaaatgttgtaatgacacaaagccttatgaaaatatttatggagttcaataaaagaagtaaaaagaca

SEQ ID NO: 425451 - DNA, 3208 bp, Homo sapiens
ttgagatataataactcatctagattaccaattaaagtgattatatgtaaactttaggagggagataaaagtaaaaatagatatatcagaagcactagtaatttctttaattgcaaactgtgtttccagttaaaagcatcatatataataatggtaacattaatagataaatggcaggcacacagataaataggtgataaagagtttctggggtatacaaaaatgtactccatccaataaacgtaaatgcgtgtatcactgaagttggacctagagaacaccacacaaatcattaacacacacacacacacacacacacacacacacagagagataaggaacaaaagtgttttctgttgttttggggaagtgaaatatgtggttggtaggaagaggtaccaatgacttccaaacatgtgattccgtcttaaaagttttccatttttaccctgtcccccttccctttgctttcagaagttgacatttctattcattgcttttcttgttaagataatctctttactcccctgtgagtgattcactgccttgtcattattacgatagatgtgtttgtattgttttttttctgatgatactgatgttgatgaatttttaattttatttgatgtggtagagttgggaggtttcagggttttttcccctcttttactttccattgaggaagggaatgagctcctttctcctctccttcagccaatcattatcaaatgttccttcagccctgcagttgccccaaataaccttttttcagcatcctctgtcctcagtcatgccagtctggacatgctctgttgtgccctgtgacaaaactgctcagtattcctattgcttttactgtgttttaggtactgtgaagggatcaaaaaaccaaacagaagcaagggagtatcagactatgatgatgctggagtggacttctgttcagggaacattttgcattcaggctgtttcttctatcactggggtttcccatgttgcagcacttctgggtcgttgcaattttgcatctaggagttagtttgatcgagttattctcttttttcaagtcacttttgttataggtctccccctaggcctgtctctcccttagcccaaaagatctgaactggaagcagaggttgagattctgcctcccaggagagggatttacctgccccctagtaccagataggtttagggcagtgatctctacagcaatcagttcagtgtcctggttgtccctgctcccatttacagatgtttgggcagcattgatagaagtatggaggggttcaagacagagcccacctgatcaagatcatcagctaccttcaaattattgacctggacagggtccaagtctgatagtaaccttttacaagaaagaacagggatgggaatggaaagagatagccttgatccacagtattgtacctgcattttctaccaccctaaaattgtgtgagacttctcccattgttaacagattgcatggacaatcttccctggcttctttctttccctctctctttcttctttctcctgccatcctagcacaggaggatttttggtattgatatagttaaagctgttctggcactcaaagaaggccgtgtttccaacatcctctcatcccaggacatttggggcaagtgagttaggggcccaggggcaattttccctctgaataacgtgtctgaggcagggatgctaccctcaggctcgcttttggccagctttttgcttgggaaaatctaacttctttcacaaggaggcaggcttcctatggatgttggagtacctgtttttcctccacacatagcccttttcatggatagaccttgaacaacaaaaagggtataagggaataaggatgaactctgctgtgaagagcaagccactgtagtgaggaatgtggagactgggagtctgtcctaaaccccatgggagaagacttcatcatgacaggacttcagcttaccaagcagcagccatagctgtgtggaggcttcagcatagctagcatgtttactgctctatgcctcctgatccagaccaggcattgcccagcctgggaatcttttctttgtgggaatcaaattacaagctatttaagtttatattccatcacaaccaagtcagacttgtattataagtcaaggatgagcctgatctggggagagggccggggctcgggactggccaccactgttcagcacatgacctaactacgtaagcctctttggcaagggtcctggtgcccagcacccaggctaaaatatcctgtctggcagagtgttttggtagctatgcaggcctcccttcagtgtacctctttttccaacttctcactcctccttactaggcttggccttgacatgcttcttcgagggttggcagcacaccgggaggggatgcttggacaagtttctgggcctacatttcttgactaggccctctcatttcctccctccttggggcttctgcccagggctccaggatcagggatattacttctcaacccgcacttctcctctactgaacccactggcatcacctgatgccactaatttgtgaacaacaagaaatcatttccccattggttggagtattccctcagcctatagcatcaaagcagaccagtggccaacagccccaaggggagcccaattaaatacctgggttcagtatcctaacctgttatgtcctgacagcaatggtaaccccagtaattctgtaatgttgtaatttccgcatggccctgagctcccttttcctcaactcagtgaggccaggatttgctctccaaaaggctttgctagtgtgttcaatgggacctgctgtggggagtcctaagacagacatctaattattctctctttttccccccctctctatgtgtatatttctaatggatctataagaacagcaacaagagagttctaacaattctagtgtgaagccaaatagtgatcttttagtgctttggggatggggtgggctggggtggatggatgggcaacagtgactttgattacccttgctgctctgcatttgccagtttattcttttgtttcttttatctgactgactctgtcaaacaagtgtcaaagttgtgtgttaaaaaatgtttaacaaaaaaaatgttgtaatgacacaaagccttatgaaaatatttatggagttcaataaaagaagtaaaaagaca

SEQ ID NO: 425452 - DNA, 3314 bp, Homo sapiens
acgattcatcagataggatttttgcaaaatcccacccatatgctgttgagcaaaagtccctaagcaaaaaggtgtcaactctgcccgctcagttcctccttcctacccaccaccgcaggacccgttaaaccacggccagtacctggtccccgacggcatcgctcagtcgcaggtctttgagttcaccgaacccaagcgcagccagtcaccattctggcaaaacttcagcaggttaacccccttcaaaaaatgatacctacagggaggcagataattttaaaataaagtaaataaaattatatttatagatggaccttttttcggagaagcactgttgaaatttatacacacacacacacacagagacccttgagtacacatacacacacacacacacagacacacacacacacacacacacacacacacacacagagagataaggaacaaaagtgttttctgttgttttggggaagtgaaatatgtggttggtaggaagaggtaccaatgacttccaaacatgtgattccgtcttaaaagttttccatttttaccctgtcccccttccctttgctttcagaagttgacatttctattcattgcttttcttgttaagataatctctttactcccctgtgagtgattcactgccttgtcattattacgatagatgtgtttgtattgttttttttctgatgatactgatgttgatgaatttttaattttatttgatgtggtagagttgggaggtttcagggttttttcccctcttttactttccattgaggaagggaatgagctcctttctcctctccttcagccaatcattatcaaatgttccttcagccctgcagttgccccaaataaccttttttcagcatcctctgtcctcagtcatgccagtctggacatgctctgttgtgccctgtgacaaaactgctcagtattcctattgcttttactgtgttttaggtactgtgaagggatcaaaaaaccaaacagaagcaagggagtatcagactatgatgatgctggagtggacttctgttcagggaacattttgcattcaggctgtttcttctatcactggggtttcccatgttgcagcacttctgggtcgttgcaattttgcatctaggagttagtttgatcgagttattctcttttttcaagtcacttttgttataggtctccccctaggcctgtctctcccttagcccaaaagatctgaactggaagcagaggttgagattctgcctcccaggagagggatttacctgccccctagtaccagataggtttagggcagtgatctctacagcaatcagttcagtgtcctggttgtccctgctcccatttacagatgtttgggcagcattgatagaagtatggaggggttcaagacagagcccacctgatcaagatcatcagctaccttcaaattattgacctggacagggtccaagtctgatagtaaccttttacaagaaagaacagggatgggaatggaaagagatagccttgatccacagtattgtacctgcattttctaccaccctaaaattgtgtgagacttctcccattgttaacagattgcatggacaatcttccctggcttctttctttccctctctctttcttctttctcctgccatcctagcacaggaggatttttggtattgatatagttaaagctgttctggcactcaaagaaggccgtgtttccaacatcctctcatcccaggacatttggggcaagtgagttaggggcccaggggcaattttccctctgaataacgtgtctgaggcagggatgctaccctcaggctcgcttttggccagctttttgcttgggaaaatctaacttctttcacaaggaggcaggcttcctatggatgttggagtacctgtttttcctccacacatagcccttttcatggatagaccttgaacaacaaaaagggtataagggaataaggatgaactctgctgtgaagagcaagccactgtagtgaggaatgtggagactgggagtctgtcctaaaccccatgggagaagacttcatcatgacaggacttcagcttaccaagcagcagccatagctgtgtggaggcttcagcatagctagcatgtttactgctctatgcctcctgatccagaccaggcattgcccagcctgggaatcttttctttgtgggaatcaaattacaagctatttaagtttatattccatcacaaccaagtcagacttgtattataagtcaaggatgagcctgatctggggagagggccggggctcgggactggccaccactgttcagcacatgacctaactacgtaagcctctttggcaagggtcctggtgcccagcacccaggctaaaatatcctgtctggcagagtgttttggtagctatgcaggcctcccttcagtgtacctctttttccaacttctcactcctccttactaggcttggccttgacatgcttcttcgagggttggcagcacaccgggaggggatgcttggacaagtttctgggcctacatttcttgactaggccctctcatttcctccctccttggggcttctgcccagggctccaggatcagggatattacttctcaacccgcacttctcctctactgaacccactggcatcacctgatgccactaatttgtgaacaacaagaaatcatttccccattggttggagtattccctcagcctatagcatcaaagcagaccagtggccaacagccccaaggggagcccaattaaatacctgggttcagtatcctaacctgttatgtcctgacagcaatggtaaccccagtaattctgtaatgttgtaatttccgcatggccctgagctcccttttcctcaactcagtgaggccaggatttgctctccaaaaggctttgctagtgtgttcaatgggacctgctgtggggagtcctaagacagacatctaattattctctctttttccccccctctctatgtgtatatttctaatggatctataagaacagcaacaagagagttctaacaattctagtgtgaagccaaatagtgatcttttagtgctttggggatggggtgggctggggtggatggatgggcaacagtgactttgattacccttgctgctctgcatttgccagtttattcttttgtttcttttatctgactgactctgtcaaacaagtgtcaaagttgtgtgttaaaaaatgtttaacaaaaaaaatgttgtaatgacacaaagccttatgaaaatatttatggagttcaataaaagaagtaaaaagaca

SEQ ID NO: 425453 - DNA, 2910 bp, Homo sapiens
aaaggcagcctatgggctgagcgggggatggggagagaagagggatagggccagcaaggcagggatcgaacgagtgtctggcagccgggagcccagcgaagagagcgagcaagcttaggaaaacgagcgaagtaaagggagtaggggagactgagactgaccggtagccaggcaggcggacggacgcacgcccggacagactgagcaggcgccggagaaccactcacaggttccccccgcctttccctttgaaagctaggattttgcctttcccgtggcgcccgagagagaatgctggactctgccgacttcagcgcaagctaagatttctcagctagggacaaacgatcagcccaatcctgagaaggggggaaccaagcaccccgtccccatccccctcccctcccccgactaaactcgggcgccaaacccagcccttctctaaccaccctacttcctcctctcctttctagcatggtggctgtatggacagtctgacagaacagagactgacatctcccaatctgccggccccccacctggaacactacagtgttctgcattgcaccatgaccctggatgtgcaaactgtagtcgtttttgccgtgattgtagtcctcctgcttgtcaatgtcatactcatgtttttcctgggaacgcgctgaatggagtccagccacctgagctgtcgcgaactctcgctttgatttcatcccgagagccaccgagaaaaaaaaaaaatcacagacagagacagggaaagagagagaaagaacaagctttcttactcaggggggaaaacgttttgagcttcaacatggcctcgctgtgatatgtatgacgttgctgatcactggagattccatcgttagtgctgaggcagtatgggatcacgtcaccatggccaaccgggagttggcatttaaagctggcgacgtcatcaaagtcttggatgcttccaacaaggattggtggtggggccagatcgacgatgaggagggatggtttcctgccagctttgtgaggctctgggtgaaccaggaggatgaggtggaggaggggcccagcgatgtgcagaacggacacctggaccccaattcagactgcctctgtctggggcggccactacagaaccgggaccagatgcgggccaatgtcatcaatgagataatgagcactgagcgtcactacatcaagcacctcaaggatatttgtgagggctatctgaagcagtgccggaagagaagggacatgttcagtgacgagcaactgaaggtaatctttgggaacattgaagatatctacagatttcagatgggctttgtgagagacctggagaaacagtataacaatgatgacccccacctcagcgagataggaccctgcttcctagagcaccaagatggattctggatatactctgagtattgtaacaaccacctggatgcttgcatggagctctccaaactgatgaaggacagccgctaccagcacttctttgaggcctgtcgcctcttgcagcagatgattgacattgctatcgatggtttccttttgactccagtgcagaagatctgcaagtatcccttacagttggctgagctcctaaagtatactgcccaagaccacagtgactacaggtatgtggcagctgctttggctgtcatgagaaatgtgactcagcagatcaacgaacgcaagcgacgtttagagaatattgacaagattgctcagtggcaggcttctgtcctagactgggagggcgaggacatcctagacaggagctcggagctgatctacactggggagatggcctggatctaccagccctacggccgcaaccagcagcgggtcttcttcctgtttgaccaccagatggtcctctgcaagaaggacctaatccggagagacatcctgtactacaaaggccgcattgacatggataaatatgaggtagttgacattgaggatggcagagatgatgacttcaatgtcagcatgaagaatgcctttaagcttcacaacaaggagactgaggagatacatctgttctttgccaagaagctggaggaaaaaatacgctggctcagggctttcagagaagagaggaaaatggtacaggaagatgaaaaaattggctttgaaatttctgaaaaccagaagaggcaggctgcaatgactgtgagaaaagtccctaagcaaaaaggtgtcaactctgcccgctcagttcctccttcctacccaccaccgcaggacccgttaaaccacggccagtacctggtccccgacggcatcgctcagtcgcaggtctttgagttcaccgaacccaagcgcagccagtcaccattctggcaaaacttcagcaggttaacccccttcaaaaaatgatacctacagggaggcagataattttaaaataaagtaaataaaattatatttatagatggaccttttttcggagaagcactgttgaaatttatacacacacacacacacagagacccttgagtacacatacacacacacacacacagacacacacacacacacacacacacacacacacacagagagataaggaacaaaagtgttttctgttgttttggggaagtgaaatatgtggttggtaggaagaggtaccaatgacttccaaacatgtgattccgtcttaaaagttttccatttttaccctgtcccccttccctttgctttcagaagttgacatttctattcattgcttttcttgttaagataatctctttactcccctgtgagtgattcactggccacaggagatccagtacctgaaagatttgactagaagaggtccgcaaggcaagggggaagaaaaagggtcccctagttgaggatagtcagagcgtcaatgtgctgtacatagagtgctgcatc

SEQ ID NO: 425454 - DNA, 1684 bp, Homo sapiens
aaaggcagcctatgggctgagcgggggatggggagagaagagggatagggccagcaaggcagggatcgaacgagtgtctggcagccgggagcccagcgaagagagcgagcaagcttaggaaaacgagcgaagtaaagggagtaggggagactgagactgaccggtagccaggcaggcggacggacgcacgcccggacagactgagcaggcgccggagaaccactcacaggttccccccgcctttccctttgaaagctaggattttgcctttcccgtggcgcccgagagagaatgctggactctgccgacttcagcgcaagctaagatttctcagctagggacaaacgatcagcccaatcctgagaaggggggaaccaagcaccccgtccccatccccctcccctcccccgactaaactcgggcgccaaacccagcccttctctaaccaccctacttcctcctctcctttctagcatggtggctgtatggacagtctgacagaacagagactgacatctcccaatctgccggccccccacctggaacactacagtgttctgcattgcaccatgaccctggatgtgcaaactgtagtcgtttttgccgtgattgtagtcctcctgcttgtcaatgtcatactcatgtttttcctgggaacgcgctgaatggagtccagccacctgagctgtcgcgaactctcgctttgatttcatcccgagagccaccgagaaaaaaaaaaaatcacagacagagacagggaaagagagagaaagaacaagctttcttactcaggggggaaaacgttttgagcttcaacatggcctcgctgtgatatgtatgacgttgctgatcactggagattccatcgttagtgctgaggcagtatgggatcacgtcaccatggccaaccgggagttggcatttaaagctggcgacgtcatcaaagtcttggatgcttccaacaaggattggtggtggggccagatcgacgatgaggagggatggtttcctgccagctttgtgaggctctgggtgaaccaggaggatgaggtggaggaggggcccagcgatgtgcagaacggacacctggaccccaattcagactgcctctgtctggggcggccactacagaaccgggaccagatgcgggccaatgtcatcaatgagataatgagcactgagcgtcactacatcaagcacctcaaggatatttgtgagggctatctgaagcagtgccggaagagaagggacatgttcagtgacgagcaactgaaggtaatctttgggaacattgaagatatctacagatttcagatgggctttgtgagagacctggagaaacagtataacaatgatgacccccacctcagcgagataggaccctgcttcctagagcaccaagatggattctggatatactctgagtattgtaacaaccacctggatgcttgcatggagctctccaaactgatgaaggacagccgctaccagcacttctttgaggcctgtcgcctcttgcagcagatgattgacattgctatcgatggtttccttttgactccagtgcagaagatctgcaagtatcccttacagttggctgagctcctaaagtatactgcccaagaccacagcgactaccgcgttgtggcatgctgctttggcttgcaagaaaaaatgggatctc

SEQ ID NO: 425455 - DNA, 1468 bp, Homo sapiens
aaaggcagcctatgggctgagcgggggatggggagagaagagggatagggccagcaaggcagggatcgaacgagtgtctggcagccgggagcccagcgaagagagcgagcaagcttaggaaaacgagcgaagtaaagggagtaggggagactgagactgaccggtagccaggcaggcggacggacgcacgcccggacagactgagcaggcgccggagaaccactcacaggttccccccgcctttccctttgaaagctaggattttgcctttcccgtggcgcccgagagagaatgctggactctgccgacttcagcgcaagctaagatttctcagctagggacaaacgatcagcccaatcctgagaaggggggaaccaagcaccccgtccccatccccctcccctcccccgactaaactcgggcgccaaacccagcccttctctaaccaccctacttcctcctctcctttctagcatggtggctgtatggacagtctgacagaacagagactgacatctcccaatctgccggccccccacctggaacactacagtgttctgcattgcaccatgaccctggatgtgcaaactgtagtcgtttttgccgtgattgtagtcctcctgcttgtcaatgtcatactcatgtttttcctgggaacgcgctgaatggagtccagccacctgagctgtcgcgaactctcgctttgatttcatcccgagagccaccgagaaaaaaaaaaaatcacagacagagacagggaaagagagagaaagaacaagctttcttactcaggggggaaaacgttttgagcttcaacatggcctcgctgtgatatgtatgacgttggtggtagcaggccatccagtgaaatgtggagcaggcagtaggaaatatgggactggaggtgagcgagaactgatgtcatgagaaggatgattcatctgaagaactaagtggagagaacaaaaagcaaaggtccctattgacttttgaatgcggcagtcaagggtttaagtgggaagcccacttctcaattttcccaggtagtctgactgtgttgccagcaatgcttgagtgagttatcttcaggaaaaagttctcatttttttgagcagaaagcagtaaaagcatcctatcaagcacaaagaagggtgaggagaattaagctgcaataatgacatccccgtcctttgcagagtaagtgttagcctcagtagaataccagagctggaagggacttgagaggtcatctgtatggttccagtctgtcacttgacatgtaaaaaaactgagacgggctgggtgcggtggctcacgcctgtagtcccagcactttgggaggccaaggcaggcggatcacctgaggtcaggagttcaagaccagcctggccaacatggtgaaaccctgtctctacgaaaaatacaaaaaattagccaggtgtggtggaagatgcctgtaatcccagct

SEQ ID NO: 425456 - DNA, 5449 bp, Homo sapiens
aaaggcagcctatgggctgagcgggggatggggagagaagagggatagggccagcaaggcagggatcgaacgagtgtctggcagccgggagcccagcgaagagagcgagcaagcttaggaaaacgagcgaagtaaagggagtaggggagactgagactgaccggtagccaggcaggcggacggacgcacgcccggacagactgagcaggcgccggagaaccactcacaggttccccccgcctttccctttgaaagctaggattttgcctttcccgtggcgcccgagagagaatgctggactctgccgacttcagcgcaagctaagatttctcagctagggacaaacgatcagcccaatcctgagaaggggggaaccaagcaccccgtccccatccccctcccctcccccgactaaactcgggcgccaaacccagcccttctctaaccaccctacttcctcctctcctttctagcatggtggctgtatggacagtctgacagaacagagactgacatctcccaatctgccggccccccacctggaacactacagtgttctgcattgcaccatgaccctggatgtgcaaactgtagtcgtttttgccgtgattgtagtcctcctgcttgtcaatgtcatactcatgtttttcctgggaacgcgctgaatggagtccagccacctgagctgtcgcgaactctcgctttgatttcatcccgagagccaccgagaaaaaaaaaaaatcacagacagagacagggaaagagagagaaagaacaagctttcttactcaggggggaaaacgttttgagcttcaacatggcctcgctgtgatatgtatgacgttgctgatcactggagattccatcgttagtgctgaggcagtatgggatcacgtcaccatggccaaccgggagttggcatttaaagctggcgacgtcatcaaagtcttggatgcttccaacaaggattggtggtggggccagatcgacgatgaggagggatggtttcctgccagctttgtgaggctctgggtgaaccaggaggatgaggtggaggaggggcccagcgatgtgcagaacggacacctggaccccaattcagactgcctctgtctggggcggccactacagaaccgggaccagatgcgggccaatgtcatcaatgagataatgagcactgagcgtcactacatcaagcacctcaaggatatttgtgagggctatctgaagcagtgccggaagagaagggacatgttcagtgacgagcaactgaaggtaatctttgggaacattgaagatatctacagatttcagatgggctttgtgagagacctggagaaacagtataacaatgatgacccccacctcagcgagataggaccctgcttcctagagcaccaagatggattctggatatactctgagtattgtaacaaccacctggatgcttgcatggagctctccaaactgatgaaggacagccgctaccagcacttctttgaggcctgtcgcctcttgcagcagatgattgacattgctatcgatggtttccttttgactccagtgcagaagatctgcaagtatcccttacagttggctgagctcctaaagtatactgcccaagaccacagtgactacaggtatgtggcagctgctttggctgtcatgagaaatgtgactcagcagatcaacgaacgcaagcgacgtttagagaatattgacaagattgctcagtggcaggcttctgtcctagactgggagggcgaggacatcctagacaggagctcggagctgatctacactggggagatggcctggatctaccagccctacggccgcaaccagcagcgggtcttcttcctgtttgaccaccagatggtcctctgcaagaaggacctaatccggagagacatcctgtactacaaaggccgcattgacatggataaatatgaggtagttgacattgaggatggcagagatgatgacttcaatgtcagcatgaagaatgcctttaagcttcacaacaaggagactgaggagatacatctgttctttgccaagaagctggaggaaaaaatacgctggctcagggctttcagagaagagaggaaaatggtacaggaagatgaaaaaattggctttgaaatttctgaaaaccagaagaggcaggctgcaatgactgtgagaaaagtccctaagcaaaaaggtgtcaactctgcccgctcagttcctccttcctacccaccaccgcaggacccgttaaaccacggccagtacctggtccccgacggcatcgctcagtcgcaggtctttgagttcaccgaacccaagcgcagccagtcaccattctggcaaaacttcagcaggttaacccccttcaaaaaatgatacctacagggaggcagataattttaaaataaagtaaataaaattatatttatagatggaccttttttcggagaagcactgttgaaatttatacacacacacacacacagagacccttgagtacacatacacacacacacacacagacacacacacacacacacacacacacacacacacagagagataaggaacaaaagtgttttctgttgttttggggaagtgaaatatgtggttggtaggaagaggtaccaatgacttccaaacatgtgattccgtcttaaaagttttccatttttaccctgtcccccttccctttgctttcagaagttgacatttctattcattgcttttcttgttaagataatctctttactcccctgtgagtgattcactgccttgtcattattacgatagatgtgtttgtattgttttttttctgatgatactgatgttgatgaatttttaattttatttgatgtggtagagttgggaggtttcagggttttttcccctcttttactttccattgaggaagggaatgagctcctttctcctctccttcagccaatcattatcaaatgttccttcagccctgcagttgccccaaataaccttttttcagcatcctctgtcctcagtcatgccagtctggacatgctctgttgtgccctgtgacaaaactgctcagtattcctattgcttttactgtgttttaggtactgtgaagggatcaaaaaaccaaacagaagcaagggagtatcagactatgatgatgctggagtggacttctgttcagggaacattttgcattcaggctgtttcttctatcactggggtttcccatgttgcagcacttctgggtcgttgcaattttgcatctaggagttagtttgatcgagttattctcttttttcaagtcacttttgttataggtctccccctaggcctgtctctcccttagcccaaaagatctgaactggaagcagaggttgagattctgcctcccaggagagggatttacctgccccctagtaccagataggtttagggcagtgatctctacagcaatcagttcagtgtcctggttgtccctgctcccatttacagatgtttgggcagcattgatagaagtatggaggggttcaagacagagcccacctgatcaagatcatcagctaccttcaaattattgacctggacagggtccaagtctgatagtaaccttttacaagaaagaacagggatgggaatggaaagagatagccttgatccacagtattgtacctgcattttctaccaccctaaaattgtgtgagacttctcccattgttaacagattgcatggacaatcttccctggcttctttctttccctctctctttcttctttctcctgccatcctagcacaggaggatttttggtattgatatagttaaagctgttctggcactcaaagaaggccgtgtttccaacatcctctcatcccaggacatttggggcaagtgagttaggggcccaggggcaattttccctctgaataacgtgtctgaggcagggatgctaccctcaggctcgcttttggccagctttttgcttgggaaaatctaacttctttcacaaggaggcaggcttcctatggatgttggagtacctgtttttcctccacacatagcccttttcatggatagaccttgaacaacaaaaagggtataagggaataaggatgaactctgctgtgaagagcaagccactgtagtgaggaatgtggagactgggagtctgtcctaaaccccatgggagaagacttcatcatgacaggacttcagcttaccaagcagcagccatagctgtgtggaggcttcagcatagctagcatgtttactgctctatgcctcctgatccagaccaggcattgcccagcctgggaatcttttctttgtgggaatcaaattacaagctatttaagtttatattccatcacaaccaagtcagacttgtattataagtcaaggatgagcctgatctggggagagggccggggctcgggactggccaccactgttcagcacatgacctaactacgtaagcctctttggcaagggtcctggtgcccagcacccaggctaaaatatcctgtctggcagagtgttttggtagctatgcaggcctcccttcagtgtacctctttttccaacttctcactcctccttactaggcttggccttgacatgcttcttcgagggttggcagcacaccgggaggggatgcttggacaagtttctgggcctacatttcttgactaggccctctcatttcctccctccttggggcttctgcccagggctccaggatcagggatattacttctcaacccgcacttctcctctactgaacccactggcatcacctgatgccactaatttgtgaacaacaagaaatcatttccccattggttggagtattccctcagcctatagcatcaaagcagaccagtggccaacagccccaaggggagcccaattaaatacctgggttcagtatcctaacctgttatgtcctgacagcaatggtaaccccagtaattctgtaatgttgtaatttccgcatggccctgagctcccttttcctcaactcagtgaggccaggatttgctctccaaaaggctttgctagtgtgttcaatgggacctgctgtggggagtcctaagacagacatctaattattctctctttttccccccctctctatgtgtatatttctaatggatctataagaacagcaacaagagagttctaacaattctagtgtgaagccaaatagtgatcttttagtgctttggggatggggtgggctggggtggatggatgggcaacagtgactttgattacccttgctgctctgcatttgccagtttattcttttgtttcttttatctgactgactctgtcaaacaagtgtcaaagttgtgtgttaaaaaatgtttaacaaaaaaaatgttgtaatgacacaaagccttatgaaaatatttatggagttcaataaaagaagtaaaaagaca

SEQ ID NO: 425457 - DNA, 5154 bp, Homo sapiens
aaaggcagcctatgggctgagcgggggatggggagagaagagggatagggccagcaaggcagggatcgaacgagtgtctggcagccgggagcccagcgaagagagcgagcaagcttaggaaaacgagcgccaaacccagcccttctctaaccaccctacttcctcctctcctttctagcatggtggctgtatggacagtctgacagaacagagactgacatctcccaatctgccggccccccacctggaacactacagtgttctgcattgcaccatgaccctggatgtgcaaactgtagtcgtttttgccgtgattgtagtcctcctgcttgtcaatgtcatactcatgtttttcctgggaacgcgctgaatggagtccagccacctgagctgtcgcgaactctcgctttgatttcatcccgagagccaccgagaaaaaaaaaaaatcacagacagagacagggaaagagagagaaagaacaagctttcttactcaggggggaaaacgttttgagcttcaacatggcctcgctgtgatatgtatgacgttgctgatcactggagattccatcgttagtgctgaggcagtatgggatcacgtcaccatggccaaccgggagttggcatttaaagctggcgacgtcatcaaagtcttggatgcttccaacaaggattggtggtggggccagatcgacgatgaggagggatggtttcctgccagctttgtgaggctctgggtgaaccaggaggatgaggtggaggaggggcccagcgatgtgcagaacggacacctggaccccaattcagactgcctctgtctggggcggccactacagaaccgggaccagatgcgggccaatgtcatcaatgagataatgagcactgagcgtcactacatcaagcacctcaaggatatttgtgagggctatctgaagcagtgccggaagagaagggacatgttcagtgacgagcaactgaaggtaatctttgggaacattgaagatatctacagatttcagatgggctttgtgagagacctggagaaacagtataacaatgatgacccccacctcagcgagataggaccctgcttcctagagcaccaagatggattctggatatactctgagtattgtaacaaccacctggatgcttgcatggagctctccaaactgatgaaggacagccgctaccagcacttctttgaggcctgtcgcctcttgcagcagatgattgacattgctatcgatggtttccttttgactccagtgcagaagatctgcaagtatcccttacagttggctgagctcctaaagtatactgcccaagaccacagtgactacaggtatgtggcagctgctttggctgtcatgagaaatgtgactcagcagatcaacgaacgcaagcgacgtttagagaatattgacaagattgctcagtggcaggcttctgtcctagactgggagggcgaggacatcctagacaggagctcggagctgatctacactggggagatggcctggatctaccagccctacggccgcaaccagcagcgggtcttcttcctgtttgaccaccagatggtcctctgcaagaaggacctaatccggagagacatcctgtactacaaaggccgcattgacatggataaatatgaggtagttgacattgaggatggcagagatgatgacttcaatgtcagcatgaagaatgcctttaagcttcacaacaaggagactgaggagatacatctgttctttgccaagaagctggaggaaaaaatacgctggctcagggctttcagagaagagaggaaaatggtacaggaagatgaaaaaattggctttgaaatttctgaaaaccagaagaggcaggctgcaatgactgtgagaaaagtccctaagcaaaaaggtgtcaactctgcccgctcagttcctccttcctacccaccaccgcaggacccgttaaaccacggccagtacctggtccccgacggcatcgctcagtcgcaggtctttgagttcaccgaacccaagcgcagccagtcaccattctggcaaaacttcagcaggttaacccccttcaaaaaatgatacctacagggaggcagataattttaaaataaagtaaataaaattatatttatagatggaccttttttcggagaagcactgttgaaatttatacacacacacacacacagagacccttgagtacacatacacacacacacacacagacacacacacacacacacacacacacacacacacagagagataaggaacaaaagtgttttctgttgttttggggaagtgaaatatgtggttggtaggaagaggtaccaatgacttccaaacatgtgattccgtcttaaaagttttccatttttaccctgtcccccttccctttgctttcagaagttgacatttctattcattgcttttcttgttaagataatctctttactcccctgtgagtgattcactgccttgtcattattacgatagatgtgtttgtattgttttttttctgatgatactgatgttgatgaatttttaattttatttgatgtggtagagttgggaggtttcagggttttttcccctcttttactttccattgaggaagggaatgagctcctttctcctctccttcagccaatcattatcaaatgttccttcagccctgcagttgccccaaataaccttttttcagcatcctctgtcctcagtcatgccagtctggacatgctctgttgtgccctgtgacaaaactgctcagtattcctattgcttttactgtgttttaggtactgtgaagggatcaaaaaaccaaacagaagcaagggagtatcagactatgatgatgctggagtggacttctgttcagggaacattttgcattcaggctgtttcttctatcactggggtttcccatgttgcagcacttctgggtcgttgcaattttgcatctaggagttagtttgatcgagttattctcttttttcaagtcacttttgttataggtctccccctaggcctgtctctcccttagcccaaaagatctgaactggaagcagaggttgagattctgcctcccaggagagggatttacctgccccctagtaccagataggtttagggcagtgatctctacagcaatcagttcagtgtcctggttgtccctgctcccatttacagatgtttgggcagcattgatagaagtatggaggggttcaagacagagcccacctgatcaagatcatcagctaccttcaaattattgacctggacagggtccaagtctgatagtaaccttttacaagaaagaacagggatgggaatggaaagagatagccttgatccacagtattgtacctgcattttctaccaccctaaaattgtgtgagacttctcccattgttaacagattgcatggacaatcttccctggcttctttctttccctctctctttcttctttctcctgccatcctagcacaggaggatttttggtattgatatagttaaagctgttctggcactcaaagaaggccgtgtttccaacatcctctcatcccaggacatttggggcaagtgagttaggggcccaggggcaattttccctctgaataacgtgtctgaggcagggatgctaccctcaggctcgcttttggccagctttttgcttgggaaaatctaacttctttcacaaggaggcaggcttcctatggatgttggagtacctgtttttcctccacacatagcccttttcatggatagaccttgaacaacaaaaagggtataagggaataaggatgaactctgctgtgaagagcaagccactgtagtgaggaatgtggagactgggagtctgtcctaaaccccatgggagaagacttcatcatgacaggacttcagcttaccaagcagcagccatagctgtgtggaggcttcagcatagctagcatgtttactgctctatgcctcctgatccagaccaggcattgcccagcctgggaatcttttctttgtgggaatcaaattacaagctatttaagtttatattccatcacaaccaagtcagacttgtattataagtcaaggatgagcctgatctggggagagggccggggctcgggactggccaccactgttcagcacatgacctaactacgtaagcctctttggcaagggtcctggtgcccagcacccaggctaaaatatcctgtctggcagagtgttttggtagctatgcaggcctcccttcagtgtacctctttttccaacttctcactcctccttactaggcttggccttgacatgcttcttcgagggttggcagcacaccgggaggggatgcttggacaagtttctgggcctacatttcttgactaggccctctcatttcctccctccttggggcttctgcccagggctccaggatcagggatattacttctcaacccgcacttctcctctactgaacccactggcatcacctgatgccactaatttgtgaacaacaagaaatcatttccccattggttggagtattccctcagcctatagcatcaaagcagaccagtggccaacagccccaaggggagcccaattaaatacctgggttcagtatcctaacctgttatgtcctgacagcaatggtaaccccagtaattctgtaatgttgtaatttccgcatggccctgagctcccttttcctcaactcagtgaggccaggatttgctctccaaaaggctttgctagtgtgttcaatgggacctgctgtggggagtcctaagacagacatctaattattctctctttttccccccctctctatgtgtatatttctaatggatctataagaacagcaacaagagagttctaacaattctagtgtgaagccaaatagtgatcttttagtgctttggggatggggtgggctggggtggatggatgggcaacagtgactttgattacccttgctgctctgcatttgccagtttattcttttgtttcttttatctgactgactctgtcaaacaagtgtcaaagttgtgtgttaaaaaatgtttaacaaaaaaaatgttgtaatgacacaaagccttatgaaaatatttatggagttcaataaaagaagtaaaaagaca

SEQ ID NO: 425458 - DNA, 5395 bp, Homo sapiens
aaaggcagcctatgggctgagcgggggatggggagagaagagggatagggccagcaaggcagggatcgaacgagtgtctggcagccgggagcccagcgaagagagcgagcaagcttaggaaaacgagcgaagtaaagggagtaggggagactgagactgaccggtagccaggcaggcggacggacgcacgcccggacagactgagcaggcgccggagaaccactcacaggttccccccgcctttccctttgaaagctaggattttgcctttcccgtggcgcccgagagagaatgctggactctgccgacttcagcgcaagctaagatttctcagctagggacaaacgatcagcccaatcctgagaaggggggaaccaagcaccccgtccccatccccctcccctcccccgactaaactcgggcgccaaacccagcccttctctaaccaccctacttcctcctctcctttctagcatggtggctgtatggacagtctgacagaacagagactgacatctcccaatctgccggccccccacctggaacactacagtgttctgcattgcaccatgaccctggatgtgcaaactgtagtcgtttttgccgtgattgtagtcctcctgcttgtcaatgtcatactcatgtttttcctgggaacgcgctgaatggagtccagccacctgagctgtcgcgaactctcgctttgatttcatcccgagagccaccgagaaaaaaaaaaaatcacagacagagacagggaaagagagagaaagaacaagctttcttactcaggggggaaaacgttttgagcttcaacatggcctcgctgtgatatgtatgacgttgctgatcactggagattccatcgttagtgctgaggcagtatgggatcacgtcaccatggccaaccgggagttggcatttaaagctggcgacgtcatcaaagtcttggatgcttccaacaaggattggtggtggggccagatcgacgatgaggagggatggtttcctgccagctttgtgaggctctgggtgaaccaggaggatgaggtggaggaggggcccagcgatgtgcagaacggacacctggaccccaattcagactgcctctgtctggggcggccactacagaaccgggaccagatgcgggccaatgtcatcaatgagataatgagcactgagcgtcactacatcaagcacctcaaggatatttgtgagggctatctgaagcagtgccggaagagaagggacatgttcagtgacgagcaactgaaggtaatctttgggaacattgaagatatctacagatttcagatgggctttgtgagagacctggagaaacagtataacaatgatgacccccacctcagcgagataggaccctgcttcctagagcaccaagatggattctggatatactctgagtattgtaacaaccacctggatgcttgcatggagctctccaaactgatgaaggacagccgctaccagcacttctttgaggcctgtcgcctcttgcagcagatgattgacattgctatcgatggtttccttttgactccagtgcagaagatctgcaagtatcccttacagttggctgagctcctaaagtatactgcccaagaccacagtgactacaggtatgtggcagctgctttggctgtcatgagaaatgtgactcagcagatcaacgaacgcaagcgacgtttagagaatattgacaagattgctcagtggcaggcttctgtcctagactgggagggcgaggacatcctagacaggagctcggagctgatctacactggggagatggcctggatctaccagccctacggccgcaaccagcagcgggtcttcttcctgtttgaccaccagatggtcctctgcaagaaggacctaatccggagagacatcctgtactacaaaggccgcattgacatggataaatatgaggtagttgacattgaggatggcagagatgatgacttcaatgtcagcatgaagaatgcctttaagcttcacaacaaggagactgaggagatacatctgttctttgccaagaagctggaggaaaaaatacgctggctcagggctttcagagaagagaggaaaatggtacaggaagatgaaaaaattggctttgaaatttctgaaaaccagaagaggcaggctgcaatgactgtgagaaaagtccctaagcaaaaaggtgtcaactctgcccgctcagttcctccttcctacccaccaccgcaggacccgttaaaccacggccagtacctggtccccgacggcatcgctcagtcgcaggtctttgagttcaccgaacccaagcgcagccagtcaccattctggcaaaacttcagcaggttaacccccttcaaaaaatgatacctacagggaggcagataattttaaaataaagtaaataaaattatatttatagatggaccttttttcggagaagcactgttgaaatttatacacacacacacacacagagacccttgagtacacatacacacacacacacacagacacacacacacacacacacacacacacacacacagagagataaggaacaaaagtgttttctgttgttttggggaagtgaaatatgtggttggtaggaagaggtaccaatgacttccaaacatgtgattccgtcttaaaagttttccatttttaccctgtcccccttccctttgctttcagaagttgacatttctattcattgcttttcttgttaagataatctctttactcccctgtgagtgattcactgccttgtcattattacgatagatgtgtttgtattgttttttttctgatgatactgatgttgatgaatttttaattttatttgatgtggtagagttgggaggtttcagggttttttcccctcttttactttccattgaggaagggaatgagctcctttctcctctccttcagccaatcattatcaaatgttccttcagccctgcagttgccccaaataaccttttttcagcatcctctgtcctcagtcatgccagtctggacatgctctgttgtgccctgtgacaaaactgctcagtattcctattgcttttactgtgttttaggtactgtgaagggatcaaaaaaccaaacagaagcaagggagtatcagactatgatgatgctggagtggacttctgttcagggaacattttgcattcaggctgtttcttctatcactggggtttcccatgttgcagcacttctgggtcgttgcaattttgcatctaggagttagtttgatcgagttattctcttttttcaagtcacttttgttataggtctccccctaggcctgtctctcccttagcccaaaagatctgaactggaagcagaggttgagattctgcctcccaggagagggatttacctgccccctagtaccagataggtttagggcagtgatctctacagcaatcagttcagtgtcctggttgtccctgctcccatttacagatgtttgggcagcattgatagaagtatggaggggttcaagacagagcccacctgatcaagatcatcagctaccttcaaattattgacctggacagggtccaagtctgatagtaaccttttacaagaaagaacagggatgggaatggaaagagatagccttgatccacagtattgtacctgcattttctaccaccctaaaattgtgtgagacttctcccattgttaacagattgcatggacaatcttccctggcttctttctttccctctctctttcttctttctcctgccatcctagcacaggaggatttttggtattgatatagttaaagctgttctggcactcaaagaaggccgtgtttccaacatcctctcatcccaggacatttggggcaagtgagttaggggcccaggggcaattttccctctgaataacgtgtctgaggcagggatgctaccctcaggctcgcttttggccagctttttgcttgggaaaatctaacttctttcacaaggaggcaggcttcctatggatgttggagtacctgtttttcctccacacatagcccttttcatggatagaccttgaacaacaaaaagggtataagggaataaggatgaactctgctgtgaagagcaagccactgtagtgaggaatgtggagactgggagtctgtcctaaaccccatgggagaagacttcatcatgacaggacttcagcttaccaagcagcagccatagctgtgtggaggcttcagcatagctagcatgtttactgctctatgcctcctgatccagaccaggcattgcccagcctgggaatcttttctttgtgggaatcaaattacaagctatttaagtttatattccatcacaaccaagtcagacttgtattataagtcaaggatgagcctgatctggggagagggccggggctcgggactggccaccactgttcagcacatgacctaactacgtaagcctctttggcaagggtcctggtgcccagcacccaggctaaaatatcctgtctggcagagtgttttggtagctatgcaggcctcccttcagtgtacctctttttccaacttctcactcctccttactaggcttggccttgacatgcttcttcgagggttggcagcacaccgggaggggatgcttggacaagtttctgggcctacatttcttgactaggccctctcatttcctccctccttggggcttctgcccagggctccaggatcagggatattacttctcaacccgcacttctcctctactgaacccactggcatcacctgatgccactaatttgtgaacaacaagaaatcatttccccattggttggagtattccctcagcctatagcatcaaagcagaccagtggccaacagccccaaggggagcccaattaaatacctgggttcagtatcctaacctgttatgtcctgacagcaatggtaaccccagtaattctgtaatgttgtaatttccgcatggccctgagctcccttttcctcaactcagtgaggccaggatttgctctccacatctaattattctctctttttccccccctctctatgtgtatatttctaatggatctataagaacagcaacaagagagttctaacaattctagtgtgaagccaaatagtgatcttttagtgctttggggatggggtgggctggggtggatggatgggcaacagtgactttgattacccttgctgctctgcatttgccagtttattcttttgtttcttttatctgactgactctgtcaaacaagtgtcaaagttgtgtgttaaaaaatgtttaacaaaaaaaatgttgtaatgacacaaagccttatgaaaatatttatggagttcaataaaagaagtaaaaagaca

SEQ ID NO: 425459 - DNA, 3603 bp, Homo sapiens
  misc_feature (3)..(4): n is a, c, g, or t
ttnncgctctcggaagcaggtcctatctcgctgaggtgggggtcatcattgttatactgtttctccaggtctctcacaaaggccgcattgacatggataaatatgaggtagttgacattgaggatggcagagatgatgacttcaatgtcagcatgaagaatgcctttaagcttcacaacaaggagactgaggagatacatctgttctttgccaagaagctggaggaaaaaatacgctggctcagggctttcagagaagagaggaaaatggtacaggaagatgaaaaaattggctttgaaatttctgaaaaccagaagaggcaggctgcaatgactgtgagaaaagtccctaagcaaaaaggtgtcaactctgcccgctcagttcctccttcctacccaccaccgcaggacccgttaaaccacggccagtacctggtccccgacggcatcgctcagtcgcaggtctttgagttcaccgaacccaagcgcagccagtcaccattctggcaaaacttcagcaggttaacccccttcaaaaaatgatacctacagggaggcagataattttaaaataaagtaaataaaattatatttatagatggaccttttttcggagaagcactgttgaaatttatacacacacacacacacagagacccttgagtacacatacacacacacacacacagacacacacacacacacacacacacacacacacacagagagataaggaacaaaagtgttttctgttgttttggggaagtgaaatatgtggttggtaggaagaggtaccaatgacttccaaacatgtgattccgtcttaaaagttttccatttttaccctgtcccccttccctttgctttcagaagttgacatttctattcattgcttttcttgttaagataatctctttactcccctgtgagtgattcactgccttgtcattattacgatagatgtgtttgtattgttttttttctgatgatactgatgttgatgaatttttaattttatttgatgtggtagagttgggaggtttcagggttttttcccctcttttactttccattgaggaagggaatgagctcctttctcctctccttcagccaatcattatcaaatgttccttcagccctgcagttgccccaaataaccttttttcagcatcctctgtcctcagtcatgccagtctggacatgctctgttgtgccctgtgacaaaactgctcagtattcctattgcttttactgtgttttaggtactgtgaagggatcaaaaaaccaaacagaagcaagggagtatcagactatgatgatgctggagtggacttctgttcagggaacattttgcattcaggctgtttcttctatcactggggtttcccatgttgcagcacttctgggtcgttgcaattttgcatctaggagttagtttgatcgagttattctcttttttcaagtcacttttgttataggtctccccctaggcctgtctctcccttagcccaaaagatctgaactggaagcagaggttgagattctgcctcccaggagagggatttacctgccccctagtaccagataggtttagggcagtgatctctacagcaatcagttcagtgtcctggttgtccctgctcccatttacagatgtttgggcagcattgatagaagtatggaggggttcaagacagagcccacctgatcaagatcatcagctaccttcaaattattgacctggacagggtccaagtctgatagtaaccttttacaagaaagaacagggatgggaatggaaagagatagccttgatccacagtattgtacctgcattttctaccaccctaaaattgtgtgagacttctcccattgttaacagattgcatggacaatcttccctggcttctttctttccctctctctttcttctttctcctgccatcctagcacaggaggatttttggtattgatatagttaaagctgttctggcactcaaagaaggccgtgtttccaacatcctctcatcccaggacatttggggcaagtgagttaggggcccaggggcaattttccctctgaataacgtgtctgaggcagggatgctaccctcaggctcgcttttggccagctttttgcttgggaaaatctaacttctttcacaaggaggcaggcttcctatggatgttggagtacctgtttttcctccacacatagcccttttcatggatagaccttgaacaacaaaaagggtataagggaataaggatgaactctgctgtgaagagcaagccactgtagtgaggaatgtggagactgggagtctgtcctaaaccccatgggagaagacttcatcatgacaggacttcagcttaccaagcagcagccatagctgtgtggaggcttcagcatagctagcatgtttactgctctatgcctcctgatccagaccaggcattgcccagcctgggaatcttttctttgtgggaatcaaattacaagctatttaagtttatattccatcacaaccaagtcagacttgtattataagtcaaggatgagcctgatctggggagagggccggggctcgggactggccaccactgttcagcacatgacctaactacgtaagcctctttggcaagggtcctggtgcccagcacccaggctaaaatatcctgtctggcagagtgttttggtagctatgcaggcctcccttcagtgtacctctttttccaacttctcactcctccttactaggcttggccttgacatgcttcttcgagggttggcagcacaccgggaggggatgcttggacaagtttctgggcctacatttcttgactaggccctctcatttcctccctccttggggcttctgcccagggctccaggatcagggatattacttctcaacccgcacttctcctctactgaacccactggcatcacctgatgccactaatttgtgaacaacaagaaatcatttccccattggttggagtattccctcagcctatagcatcaaagcagaccagtggccaacagccccaaggggagcccaattaaatacctgggttcagtatcctaacctgttatgtcctgacagcaatggtaaccccagtaattctgtaatgttgtaatttccgcatggccctgagctcccttttcctcaactcagtgaggccaggatttgctctccaaaaggctttgctagtgtgttcaatgggacctgctgtggggagtcctaagacagacatctaattattctctctttttccccccctctctatgtgtatatttctaatggatctataagaacagcaacaagagagttctaacaattctagtgtgaagccaaatagtgatcttttagtgctttggggatggggtgggctggggtggatggatgggcaacagtgactttgattacccttgctgctctgcatttgccagtttattcttttgtttcttttatctgactgactctgtcaaacaagtgtcaaagttgtgtgttaaaaaatgtttaacaaaaaaaatgttgtaatgacacaaagccttatgaaaatatttatggagttcaataaaagaagtaaaaagaca

SEQ ID NO: 425460 - DNA, 2805 bp, Homo sapiens
aaaggcagcctatgggctgagcgggggatggggagagaagagggatagggccagcaaggcagggatcgaacgagtgtctggcagccgggagcccagcgaagagagcgagcaagcttaggaaaacgagcgaagtaaagggagtaggggagactgagactgaccggtagccaggcaggcggacggacgcacgcccggacagactgagcaggcgccggagaaccactcacaggttccccccgcctttccctttgaaagctaggattttgcctttcccgtggcgcccgagagagaatgctggactctgccgacttcagcgcaagctaagatttctcagctagggacaaacgatcagcccaatcctgagaaggggggaaccaagcaccccgtccccatccccctcccctcccccgactaaactcgggcgccaaacccagcccttctctaaccaccctacttcctcctctcctttctagcatggtggctgtatggacagtctgacagaacagagactgacatctcccaatctgccggccccccacctggaacactacagtgttctgcattgcaccatgaccctggatgtgcaaactgtagtcgtttttgccgtgattgtagtcctcctgcttgtcaatgtcatactcatgtttttcctgggaacgcgctgaatggagtccagccacctgagctgtcgcgaactctcgctttgatttcatcccgagagccaccgagaaaaaaaaaaaatcacagacagagacagggaaagagagagaaagaacaagctttcttactcaggggggaaaacgttttgagcttcaacatggcctcgctgtgatatgtatgacgttgctgatcactggagattccatcgttagtgctgaggcagtatgggatcacgtcaccatggccaaccgggagttggcatttaaagctggcgacgtcatcaaagtcttggatgcttccaacaaggattggtggtggggccagatcgacgatgaggagggatggtttcctgccagctttgtgaggctctgggtgaaccaggaggatgaggtggaggaggggcccagcgatgtgcagaacggacacctggaccccaattcagactgcctctgtctggggcggccactacagaaccgggaccagatgcgggccaatgtcatcaatgagataatgagcactgagcgtcactacatcaagcacctcaaggatatttgtgagggctatctgaagcagtgccggaagagaagggacatgttcagtgacgagcaactgaaggtaatctttgggaacattgaagatatctacagatttcagatgggctttgtgagagacctggagaaacagtataacaatgatgacccccacctcagcgagataggaccctgcttcctagagcaccaagatggattctggatatactctgagtattgtaacaaccacctggatgcttgcatggagctctccaaactgatgaactctgctgtgaagagcaagccactgtagtgaggaatgtggagactgggagtctgtcctaaaccccatgggagaagacttcatcatgacaggacttcagcttaccaagcagcagccatagctgtgtggaggcttcagcatagctagcatgtttactgctctatgcctcctgatccagaccaggcattgcccagcctgggaatcttttctttgtgggaatcaaattacaagctatttaagtttatattccatcacaaccaagtcagacttgtattataagtcaaggatgagcctgatctggggagagggccggggctcgggactggccaccactgttcagcacatgacctaactacgtaagcctctttggcaagggtcctggtgcccagcacccaggctaaaatatcctgtctggcagagtgttttggtagctatgcaggcctcccttcagtgtacctctttttccaacttctcactcctccttactaggcttggccttgacatgcttcttcgagggttggcagcacaccgggaggggatgcttggacaagtttctgggcctacatttcttgactaggccctctcatttcctccctccttggggcttctgcccagggctccaggatcagggatattacttctcaacccgcacttctcctctactgaacccactggcatcacctgatgccactaatttgtgaacaacaagaaatcatttccccattggttggagtattccctcagcctatagcatcaaagcagaccagtggccaacagccccaaggggagcccaattaaatacctgggttcagtatcctaacctgttatgtcctgacagcaatggtaaccccagtaattctgtaatgttgtaatttccgcatggccctgagctcccttttcctcaactcagtgaggccaggatttgctctccaaaaggctttgctagtgtgttcaatgggacctgctgtggggagtcctaagacagacatctaattattctctctttttccccccctctctatgtgtatatttctaatggatctataagaacagcaacaagagagttctaacaattctagtgtgaagccaaatagtgatcttttagtgctttggggatggggtgggctggggtggatggatgggcaacagtgactttgattacccttgctgctctgcatttgccagtttattcttttgtttcttttatctgactgactctgtcaaacaagtgtcaaagttgtgtgttaaaaaatgtttaacaaaaaaaatgttgtaatgacacaaagccttatgaaaatatttatggagttcaataaaagaagtaaaaagaca

SEQ ID NO: 425461 - DNA, 1101 bp, Homo sapiens
tgtacggcggctgacccataaaatctacctagttctaaaattctttaacccacccacttaacaaaaacggaggtaataggtaaacaaaacgccaggaaagatcgcacttaaaggaacaaaagcacccaaggaggaaaaagaggcctgagatttccacgaattacaagtgaacttcctgtcctgggtaaacttccggaatcaacaacaggaagacccaatcagaatcttcctccgggagccaatgggagagcacattacaaagagccaatcccagcgccgctgtcactgttatggtcctgtcagggtgccggcgtcgtggtgcttgggtggtcgccaccaagaagactttggtggggtagtctcggggcagctcagcggcccgctgtgcccgtttctggcctcgctcgcagcttgcacgtcgagactcgtaggccgcaccgtagggcgagcgtgcgggtcgccgccgcggccgcctcggggtctgggcccagccgcagcctcttctaccgcggccggttgggagtcgccgcgagatgcagcctccgggcccgcccccggcctatgcccccactaacggggacttcacctttgtctcctcagcagacgcggaagatctcagtggttcaatagcatccccagatgtcaaattaaatcttggtggagattttatcaaagaatctacagctactacatttctgagacaaagaggttatggctggcttctggaagttgaagatgatgatcctgaagataacaagccactcttgtggtctcatggattataaccatttggatatttggttcactaacaattttcttactggccagagttcttggtggagaagttgcatatggccaagtccttggagttataggatattcattacttcctctcattgtaatagcccctgtacttttggtggttggatcatttgaagtggtgtctacacttataaaaactaaactgaaacattagctcttcctggattttggacctgttggtcttcagattcacactgaagttcttgggacttgtcagcctctatattcaagtaagccaattccgtataataaatctctttctttctttatacattccat

SEQ ID NO: 425462 - DNA, 559 bp, Homo sapiens
gagaatttttattttaaaattatagggaagaattggacattgatctaaaggatatttactacaaaatccgatgtgttttgatgccaatgccatcacttggttttaatagacaagtggtgagagacaatcctgacttttggggtcctctggctgttgttcttttcttttccatgatatcattatatggacagtttagggtaagtatatcttattttatacaaattctaaatattttgagagtttcaaaaattaaatataataagatattaacaaaaaaaaaaaaaaaaaaaaaaaaaaaattttgggggggccgggcccgaaaagagtattttctgaaacctttcccgtgggggcggcgggggccccaattgggtaaggtggacatgggggcaaggacttggtgcccaggagaaaccggggcagaggaacacgtgtggggttttccaccgaataaaaaaaggccgcgggggacaccgagcttttttggacaaatccccaaggggagtccggaggaacacaggggttcttaccaggggtccaaggaatcgtataattagca

SEQ ID NO: 425463 - DNA, 3806 bp, Homo sapiens
tgtacggcggctgacccataaaatctacctagttctaaaattctttaacccacccacttaacaaaaacggaggtaataggtaaacaaaacgccaggaaagatcgcacttaaaggaacaaaagcacccaaggaggaaaaagaggcctgagatttccacgaattacaagtgaacttcctgtcctgggtaaacttccggaatcaacaacaggaagacccaatcagaatcttcctccgggagccaatgggagagcacattacaaagagccaatcccagcgccgctgtcactgttatggtcctgtcagggtgccggcgtcgtggtgcttgggtggtcgccaccaagaagactttggtggggtagtctcggggcagctcagcggcccgctgtgcccgtttctggcctcgctcgcagcttgcacgtcgagactcgtaggccgcaccgtagggcgagcgtgcgggtcgccgccgcggccgcctcggggtctgggcccagccgcagcctcttctaccgcggccggttgggagtcgccgcgagatgcagcctccgggcccgcccccggcctatgcccccactaacggggacttcacctttgtctcctcagcagacgcggaagatctcagtggttcaatagcatccccagatgtcaaattaaatcttggtggagattttatcaaagaatctacagctactacatttctgagacaaagaggttatggctggcttctggaagttgaagatgatgatcctgaagataacaagccactcttggaagaattggacattgatctaaaggatatttactacaaaatccgatgtgttttgatgccaatgccatcacttggttttaatagacaagtggtgagagacaatcctgacttttggggtcctctggctgttgttcttttcttttccatgatatcattatatggacagtttagggttgcatatggccaagtccttggagttataggatattcattacttcctctcattgtaatagcccctgtacttttggtggttggatcatttgaagtggtgtctacacttataaaactgtttggtgtgttttgggctgcctacagtgctgcttcattgttagtgggtgaagaattcaagaccaaaaagcctcttctgatttatccaatctttttattatacatttattttttgtcgttatatactggtgtgtgatccaagttatacatgaatagaaaaagatggtgttaaatttgtgtgtaggctgggaattcttgctgaaggaattggagaaaacctgttgctgcaaaattttacatgttccagatggaaagggaagtctaagcgctttttaaaacaatttttttttgtatttaattaagcaattgcagttatctgggatttttgggtcagaattttaaattctgtttgattctccatattccagtgaataaaatacaaaagcattgtgtttttaagattgtgtcgatattcacctaaaaacttgtgccaaaagcacctggattggtaattatatttcacttaaagggtaaatttgacaatatcttgataatcaaaagtgcaatttttttcttcaaaatgttttctccagcatcacagatcctgcagatatatatttatatttatacatatatatttatgaaataattcttactcacaaaatatatttctgataaacattaagatattaaatctgatgcacaaactttttaatttggccattaatcttttttatttaaaaaatttaaatttgtttttaaaattgtatatagtttttaaaatctcacacatgcttcgatacttccttgttaagaattcttaataactactaaaactgatttttaatagttgctgatatatatttggtttgtttgggtatacttttcaaaaccatttttgaatgtccaaacatctgatttaaagtttctgtttatctttctgaccaaaggagcaagaggtataatggatatggcattcattaaaatctttactatgtacaaaaacagtaatatttacagcatcagtaaatatttttaagtggtacttctaaatcataaaagttggggaaagagacctttaaaatcttgtggtgttgaacaatgttatatgaagtagaaaaaataaaatacttcccagttgtgtgttttgttttacagcaccatgtcctgtattacttgatattttaacaagtatcaggtactctctaacaaatgtacagtttttgctaagggaaatattaagaaatttttatcagtgaaatatttgttgcaaataatttcataggtttttagatacacctgtagttaatattactttgtaaagtaggtaaatcattttatttatgtccataaaatatcaaatgtctgttaactattagcaaattattgtattatcctttctggtctcacctggaagagtttcctgctgtcctcagtatgataacatggcgacctcttggtatgtatttctttagcaaacttacccatcaggaaatatccagcacctctgaagcaaacctacaaatgagtgtgttatcaagcccagccgtcttcctttcccctaatcccaaaaggaaagaaagaaaaacttattttaagctgcagaaaaagtgtggagcacttttgagctagaataatgtagaaaattacatgtactgatttttttaaaaacaggtgagaagcaccagagggacaggacttctagaagttagaataatatgaagtaatcaggaaatatctatgcctacagaagcagcaaccgtaagataaacatttgttacacttaagaaattgctgaggttaatactttgttataatggattataatatttgacattcatagtgttgaccctggaatctttcacagaaagcttgggggtcaggaccaggaggtagaattttacaaggcaataaatgaaggtattttaagatcacctctattaaaaaatggtttaatttttaaaaactatcattgctttaaggtatgaattttaaaaatcacttatatggatcatgtttactcctaatgatataagataaaatgaggtatttttgttccaaaaagtattttaaaatagcatttaatcttgggaactatcttacttagggtttctataaatacaaattacaatgtttcgaactcaaccagtatcattttcgtgtgctaatgagcaaagtagttagaacagattgtcagtttaaaaacaggatttgtaggccaggcacagtggctcacgcctgtaatcccagcactttgggaggccaaagtggatgagcagcttgagtcaggagtttgagaccagcctggccaacatggcgaaaccccgtctctactaaaaatacaaaaattagccgggcgtggtggcaggcgcctgtataatcccagctactcaggaggctgaggcagggagaatcgcttgaacccttggaggtggaggttgcagtgagccaagattgtgccattgcactccagcctgggtaacagagcaagactgtgccattgcactccagcctgggtaacagagcaagactctctcaaaaaaaaaaaaaaaaaaaaaaaaaaccatgatttgtagatgtgtgcaagacacagtactgctatggctaataatggtaagatgaccctaataatgtcctctccttgaatttttatataataatattttctgagtcataactaattttttaaataatgatttccaatctaattattaattagaattttgttgttgttgtttgagacagagtcactctgtcacccaaatcgtgccactgcactccagcctaggtgacagagtgagactccgtctca

SEQ ID NO: 425464 - DNA, 3830 bp, Homo sapiens
tgtacggcggctgacccataaaatctacctagttctaaaattctttaacccacccacttaacaaaaacggaggtaataggtaaacaaaacgccaggaaagatcgcacttaaaggaacaaaagcacccaaggaggaaaaagaggcctgagatttccacgaattacaagtgaacttcctgtcctgggtaaacttccggaatcaacaacaggaagacccaatcagaatcttcctccgggagccaatgggagagcacattacaaagagccaatcccagcgccgctgtcactgttatggtcctgtcagggtgccggcgtcgtggtgcttgggtggtcgccaccaagaagactttggtggggtagtctcggggcagctcagcggcccgctgtgcccgtttctggcctcgctcgcagcttgcacgtcgagactcgtaggccgcaccgtagggcgagcgtgcgggtcgccgccgcggccgcctcggggtctgggcccagccgcagcctcttctaccgcggccggttgggagtcgccgcgagatgcagcctccgggcccgcccccggcctatgcccccactaacggggacttcacctttgtctcctcagcagacgcggaagatctcagtggttcaatagcatccccagatgtcaaattaaatcttggtggagattttatcaaagaatctacagctactacatttctgagacaaagaggttatggctggcttctggaagttgaagatgatgatcctgaagataacaagccactcttggaagaattggacattgatctaaaggatatttactacgtgagagacaatcctgacttttggggtcctctggctgttgttcttttcttttccatgatatcattatatggacagtttagggtggtctcatggattataaccatttggatatttggttcactaacaattttcttactggccagagttcttggtggagaagttgcatatggccaagtccttggagttataggatattcattacttcctctcattgtaatagcccctgtacttttggtggttggatcatttgaagtggtgtctacacttataaaactgtttggtgtgttttgggctgcctacagtgctgcttcattgttagtgggtgaagaattcaagaccaaaaagcctcttctgatttatccaatctttttattatacatttattttttgtcgttatatactggtgtgtgatccaagttatacatgaatagaaaaagatggtgttaaatttgtgtgtaggctgggaattcttgctgaaggaattggagaaaacctgttgctgcaaaattttacatgttccagatggaaagggaagtctaagcgctttttaaaacaatttttttttgtatttaattaagcaattgcagttatctgggatttttgggtcagaattttaaattctgtttgattctccatattccagtgaataaaatacaaaagcattgtgtttttaagattgtgtcgatattcacctaaaaacttgtgccaaaagcacctggattggtaattatatttcacttaaagggtaaatttgacaatatcttgataatcaaaagtgcaatttttttcttcaaaatgttttctccagcatcacagatcctgcagatatatatttatatttatacatatatatttatgaaataattcttactcacaaaatatatttctgataaacattaagatattaaatctgatgcacaaactttttaatttggccattaatcttttttatttaaaaaatttaaatttgtttttaaaattgtatatagtttttaaaatctcacacatgcttcgatacttccttgttaagaattcttaataactactaaaactgatttttaatagttgctgatatatatttggtttgtttgggtatacttttcaaaaccatttttgaatgtccaaacatctgatttaaagtttctgtttatctttctgaccaaaggagcaagaggtataatggatatggcattcattaaaatctttactatgtacaaaaacagtaatatttacagcatcagtaaatatttttaagtggtacttctaaatcataaaagttggggaaagagacctttaaaatcttgtggtgttgaacaatgttatatgaagtagaaaaaataaaatacttcccagttgtgtgttttgttttacagcaccatgtcctgtattacttgatattttaacaagtatcaggtactctctaacaaatgtacagtttttgctaagggaaatattaagaaatttttatcagtgaaatatttgttgcaaataatttcataggtttttagatacacctgtagttaatattactttgtaaagtaggtaaatcattttatttatgtccataaaatatcaaatgtctgttaactattagcaaattattgtattatcctttctggtctcacctggaagagtttcctgctgtcctcagtatgataacatggcgacctcttggtatgtatttctttagcaaacttacccatcaggaaatatccagcacctctgaagcaaacctacaaatgagtgtgttatcaagcccagccgtcttcctttcccctaatcccaaaaggaaagaaagaaaaacttattttaagctgcagaaaaagtgtggagcacttttgagctagaataatgtagaaaattacatgtactgatttttttaaaaacaggtgagaagcaccagagggacaggacttctagaagttagaataatatgaagtaatcaggaaatatctatgcctacagaagcagcaaccgtaagataaacatttgttacacttaagaaattgctgaggttaatactttgttataatggattataatatttgacattcatagtgttgaccctggaatctttcacagaaagcttgggggtcaggaccaggaggtagaattttacaaggcaataaatgaaggtattttaagatcacctctattaaaaaatggtttaatttttaaaaactatcattgctttaaggtatgaattttaaaaatcacttatatggatcatgtttactcctaatgatataagataaaatgaggtatttttgttccaaaaagtattttaaaatagcatttaatcttgggaactatcttacttagggtttctataaatacaaattacaatgtttcgaactcaaccagtatcattttcgtgtgctaatgagcaaagtagttagaacagattgtcagtttaaaaacaggatttgtaggccaggcacagtggctcacgcctgtaatcccagcactttgggaggccaaagtggatgagcagcttgagtcaggagtttgagaccagcctggccaacatggcgaaaccccgtctctactaaaaatacaaaaattagccgggcgtggtggcaggcgcctgtataatcccagctactcaggaggctgaggcagggagaatcgcttgaacccttggaggtggaggttgcagtgagccaagattgtgccattgcactccagcctgggtaacagagcaagactgtgccattgcactccagcctgggtaacagagcaagactctctcaaaaaaaaaaaaaaaaaaaaaaaaaaccatgatttgtagatgtgtgcaagacacagtactgctatggctaataatggtaagatgaccctaataatgtcctctccttgaatttttatataataatattttctgagtcataactaattttttaaataatgatttccaatctaattattaattagaattttgttgttgttgtttgagacagagtcactctgtcacccaaatcgtgccactgcactccagcctaggtgacagagtgagactccgtctca

SEQ ID NO: 425465 - DNA, 3712 bp, Homo sapiens
tgtacggcggctgacccataaaatctacctagttctaaaattctttaacccacccacttaacaaaaacggaggtaataggtaaacaaaacgccaggaaagatcgcacttaaaggaacaaaagcacccaaggaggaaaaagaggcctgagatttccacgaattacaagtgaacttcctgtcctgggtaaacttccggaatcaacaacaggaagacccaatcagaatcttcctccgggagccaatgggagagcacattacaaagagccaatcccagcgccgctgtcactgttatggtcctgtcagggtgccggcgtcgtggtgcttgggtggtcgccaccaagaagactttggtggggtagtctcggggcagctcagcggcccgctgtgcccgtttctggcctcgctcgcagcttgcacgtcgagactcgtaggccgcaccgtagggcgagcgtgcgggtcgccgccgcggccgcctcggggtctgggcccagccgcagcctcttctaccgcggccggttgggagtcgccgcgagatgcagcctccgggcccgcccccggcctatgcccccactaacggggacttcacctttgtctcctcagcagacgcggaagatctcagtggttcaatagcatccccagatgtcaaattaaatcttggtggagattttatcaaagaatctacagctactacatttctgagacaaagaggttatggctggcttctggaagttgaagatgatgatcctgaagataacaagccactcttgtggtctcatggattataaccatttggatatttggttcactaacaattttcttactggccagagttcttggtggagaagttgcatatggccaagtccttggagttataggatattcattacttcctctcattgtaatagcccctgtacttttggtggttggatcatttgaagtggtgtctacacttataaaactgtttggtgtgttttgggctgcctacagtgctgcttcattgttagtgggtgaagaattcaagaccaaaaagcctcttctgatttatccaatctttttattatacatttattttttgtcgttatatactggtgtgtgatccaagttatacatgaatagaaaaagatggtgttaaatttgtgtgtaggctgggaattcttgctgaaggaattggagaaaacctgttgctgcaaaattttacatgttccagatggaaagggaagtctaagcgctttttaaaacaatttttttttgtatttaattaagcaattgcagttatctgggatttttgggtcagaattttaaattctgtttgattctccatattccagtgaataaaatacaaaagcattgtgtttttaagattgtgtcgatattcacctaaaaacttgtgccaaaagcacctggattggtaattatatttcacttaaagggtaaatttgacaatatcttgataatcaaaagtgcaatttttttcttcaaaatgttttctccagcatcacagatcctgcagatatatatttatatttatacatatatatttatgaaataattcttactcacaaaatatatttctgataaacattaagatattaaatctgatgcacaaactttttaatttggccattaatcttttttatttaaaaaatttaaatttgtttttaaaattgtatatagtttttaaaatctcacacatgcttcgatacttccttgttaagaattcttaataactactaaaactgatttttaatagttgctgatatatatttggtttgtttgggtatacttttcaaaaccatttttgaatgtccaaacatctgatttaaagtttctgtttatctttctgaccaaaggagcaagaggtataatggatatggcattcattaaaatctttactatgtacaaaaacagtaatatttacagcatcagtaaatatttttaagtggtacttctaaatcataaaagttggggaaagagacctttaaaatcttgtggtgttgaacaatgttatatgaagtagaaaaaataaaatacttcccagttgtgtgttttgttttacagcaccatgtcctgtattacttgatattttaacaagtatcaggtactctctaacaaatgtacagtttttgctaagggaaatattaagaaatttttatcagtgaaatatttgttgcaaataatttcataggtttttagatacacctgtagttaatattactttgtaaagtaggtaaatcattttatttatgtccataaaatatcaaatgtctgttaactattagcaaattattgtattatcctttctggtctcacctggaagagtttcctgctgtcctcagtatgataacatggcgacctcttggtatgtatttctttagcaaacttacccatcaggaaatatccagcacctctgaagcaaacctacaaatgagtgtgttatcaagcccagccgtcttcctttcccctaatcccaaaaggaaagaaagaaaaacttattttaagctgcagaaaaagtgtggagcacttttgagctagaataatgtagaaaattacatgtactgatttttttaaaaacaggtgagaagcaccagagggacaggacttctagaagttagaataatatgaagtaatcaggaaatatctatgcctacagaagcagcaaccgtaagataaacatttgttacacttaagaaattgctgaggttaatactttgttataatggattataatatttgacattcatagtgttgaccctggaatctttcacagaaagcttgggggtcaggaccaggaggtagaattttacaaggcaataaatgaaggtattttaagatcacctctattaaaaaatggtttaatttttaaaaactatcattgctttaaggtatgaattttaaaaatcacttatatggatcatgtttactcctaatgatataagataaaatgaggtatttttgttccaaaaagtattttaaaatagcatttaatcttgggaactatcttacttagggtttctataaatacaaattacaatgtttcgaactcaaccagtatcattttcgtgtgctaatgagcaaagtagttagaacagattgtcagtttaaaaacaggatttgtaggccaggcacagtggctcacgcctgtaatcccagcactttgggaggccaaagtggatgagcagcttgagtcaggagtttgagaccagcctggccaacatggcgaaaccccgtctctactaaaaatacaaaaattagccgggcgtggtggcaggcgcctgtataatcccagctactcaggaggctgaggcagggagaatcgcttgaacccttggaggtggaggttgcagtgagccaagattgtgccattgcactccagcctgggtaacagagcaagactgtgccattgcactccagcctgggtaacagagcaagactctctcaaaaaaaaaaaaaaaaaaaaaaaaaaccatgatttgtagatgtgtgcaagacacagtactgctatggctaataatggtaagatgaccctaataatgtcctctccttgaatttttatataataatattttctgagtcataactaattttttaaataatgatttccaatctaattattaattagaattttgttgttgttgtttgagacagagtcactctgtcacccaaatcgtgccactgcactccagcctaggtgacagagtgagactccgtctca

SEQ ID NO: 425466 - DNA, 3558 bp, Homo sapiens
tgtacggcggctgacccataaaatctacctagttctaaaattctttaacccacccacttaacaaaaacggaggtaataggtaaacaaaacgccaggaaagatcgcacttaaaggaacaaaagcacccaaggaggaaaaagaggcctgagatttccacgaattacaagtgaacttcctgtcctgggtaaacttccggaatcaacaacaggaagacccaatcagaatcttcctccgggagccaatgggagagcacattacaaagagccaatcccagcgccgctgtcactgttatggtcctgtcagggtgccggcgtcgtggtgcttgggtggtcgccaccaagaagactttggtggggtagtctcggggcagctcagcggcccgctgtgcccgtttctggcctcgctcgcagcttgcacgtcgagactcgtaggccgcaccgtagggcgagcgtgcgggtcgccgccgcggccgcctcggggtctgggcccagccgcagcctcttctaccgcggccggttgggagtcgccgcgagatgcagcctccgggcccgcccccggcctatgcccccactaacggggacttcacctttgtctcctcagcagacgcggaaggtggtctcatggattataaccatttggatatttggttcactaacaattttcttactggccagagttcttggtggagaagttgcatatggccaagtccttggagttataggatattcattacttcctctcattgtaatagcccctgtacttttggtggttggatcatttgaagtggtgtctacacttataaaactgtttggtgtgttttgggctgcctacagtgctgcttcattgttagtgggtgaagaattcaagaccaaaaagcctcttctgatttatccaatctttttattatacatttattttttgtcgttatatactggtgtgtgatccaagttatacatgaatagaaaaagatggtgttaaatttgtgtgtaggctgggaattcttgctgaaggaattggagaaaacctgttgctgcaaaattttacatgttccagatggaaagggaagtctaagcgctttttaaaacaatttttttttgtatttaattaagcaattgcagttatctgggatttttgggtcagaattttaaattctgtttgattctccatattccagtgaataaaatacaaaagcattgtgtttttaagattgtgtcgatattcacctaaaaacttgtgccaaaagcacctggattggtaattatatttcacttaaagggtaaatttgacaatatcttgataatcaaaagtgcaatttttttcttcaaaatgttttctccagcatcacagatcctgcagatatatatttatatttatacatatatatttatgaaataattcttactcacaaaatatatttctgataaacattaagatattaaatctgatgcacaaactttttaatttggccattaatcttttttatttaaaaaatttaaatttgtttttaaaattgtatatagtttttaaaatctcacacatgcttcgatacttccttgttaagaattcttaataactactaaaactgatttttaatagttgctgatatatatttggtttgtttgggtatacttttcaaaaccatttttgaatgtccaaacatctgatttaaagtttctgtttatctttctgaccaaaggagcaagaggtataatggatatggcattcattaaaatctttactatgtacaaaaacagtaatatttacagcatcagtaaatatttttaagtggtacttctaaatcataaaagttggggaaagagacctttaaaatcttgtggtgttgaacaatgttatatgaagtagaaaaaataaaatacttcccagttgtgtgttttgttttacagcaccatgtcctgtattacttgatattttaacaagtatcaggtactctctaacaaatgtacagtttttgctaagggaaatattaagaaatttttatcagtgaaatatttgttgcaaataatttcataggtttttagatacacctgtagttaatattactttgtaaagtaggtaaatcattttatttatgtccataaaatatcaaatgtctgttaactattagcaaattattgtattatcctttctggtctcacctggaagagtttcctgctgtcctcagtatgataacatggcgacctcttggtatgtatttctttagcaaacttacccatcaggaaatatccagcacctctgaagcaaacctacaaatgagtgtgttatcaagcccagccgtcttcctttcccctaatcccaaaaggaaagaaagaaaaacttattttaagctgcagaaaaagtgtggagcacttttgagctagaataatgtagaaaattacatgtactgatttttttaaaaacaggtgagaagcaccagagggacaggacttctagaagttagaataatatgaagtaatcaggaaatatctatgcctacagaagcagcaaccgtaagataaacatttgttacacttaagaaattgctgaggttaatactttgttataatggattataatatttgacattcatagtgttgaccctggaatctttcacagaaagcttgggggtcaggaccaggaggtagaattttacaaggcaataaatgaaggtattttaagatcacctctattaaaaaatggtttaatttttaaaaactatcattgctttaaggtatgaattttaaaaatcacttatatggatcatgtttactcctaatgatataagataaaatgaggtatttttgttccaaaaagtattttaaaatagcatttaatcttgggaactatcttacttagggtttctataaatacaaattacaatgtttcgaactcaaccagtatcattttcgtgtgctaatgagcaaagtagttagaacagattgtcagtttaaaaacaggatttgtaggccaggcacagtggctcacgcctgtaatcccagcactttgggaggccaaagtggatgagcagcttgagtcaggagtttgagaccagcctggccaacatggcgaaaccccgtctctactaaaaatacaaaaattagccgggcgtggtggcaggcgcctgtataatcccagctactcaggaggctgaggcagggagaatcgcttgaacccttggaggtggaggttgcagtgagccaagattgtgccattgcactccagcctgggtaacagagcaagactgtgccattgcactccagcctgggtaacagagcaagactctctcaaaaaaaaaaaaaaaaaaaaaaaaaaccatgatttgtagatgtgtgcaagacacagtactgctatggctaataatggtaagatgaccctaataatgtcctctccttgaatttttatataataatattttctgagtcataactaattttttaaataatgatttccaatctaattattaattagaattttgttgttgttgtttgagacagagtcactctgtcacccaaatcgtgccactgcactccagcctaggtgacagagtgagactccgtctca

SEQ ID NO: 425467 - DNA, 1050 bp, Homo sapiens
tgtacggcggctgacccataaaatctacctagttctaaaattctttaacccacccacttaacaaaaacggaggtaataggtaaacaaaacgccaggaaagatcgcacttaaaggaacaaaagcacccaaggaggaaaaagaggcctgagatttccacgaattacaagtgaacttcctgtcctgggtaaacttccggaatcaacaacaggaagacccaatcagaatcttcctccgggagccaatgggagagcacattacaaagagccaatcccagcgccgctgtcactgttatggtcctgtcagggtgccggcgtcgtggtgcttgggtggtcgccaccaagaagactttggtggggtagtctcggggcagctcagcggcccgctgtgcccgtttctggcctcgctcgcagcttgcacgtcgagactcgtaggccgcaccgtagggcgagcgtgcgggtcgccgccgcggccgcctcggggtctgggcccagccgcagcctcttctaccgcggccggttgggagtcgccgcgagatgcagcctccgggcccgcccccggcctatgcccccactaacggggacttcacctttgtctcctcagcagacgcggaagatctcagtggttcaatagcatccccagatgtcaaattaaatcttggtggagattttatcaaagaatctacagctactacatttctgagacaaagaggttatggctggcttctggaagttgaagatgatgatcctgaagataacaagccactcttgtatgtaaaaataataatatatattttttgttttttgagctagtctgtgggatgattatattcttcttgttatttagagagaaagcattaaccttttttggtcaaaagctatagtgattgtcaattttactagtaatttaaaaaactgaaataataatgagagaatattttttaaccaattaaaagacaaaaattaaaagaatggtaatcctgtatctcacacacatgtgtgtctactccagcttacctgggtctgtcagctatctgaagtaatcatgcaattt

SEQ ID NO: 425468 - DNA, 2215 bp, Homo sapiens
tgtacggcggctgacccataaaatctacctagttctaaaattctttaacccacccacttaacaaaaacggaggtaataggtaaacaaaacgccaggaaagatcgcacttaaaggaacaaaagcacccaaggaggaaaaagaggcctgagatttccacgaattacaagtgaacttcctgtcctgggtaaacttccggaatcaacaacaggaagacccaatcagaatcttcctccgggagccaatgggagagcacattacaaagagccaatcccagcgccgctgtcactgttatggtcctgtcagggtgccggcgtcgtggtgcttgggtggtcgccaccaagaagactttggtggggtagtctcggggcagctcagcggcccgctgtgcccgtttctggcctcgctcgcagcttgcacgtcgagactcgtaggccgcaccgtagggcgagcgtgcgggtcgccgccgcggccgcctcggggtctgggcccagccgcagcctcttctaccgcggccggttgggagtcgccgcgagatgcagcctccgggcccgcccccggcctatgcccccactaacggggacttcacctttgtctcctcagcagacgcggaagatctcagtggttcaatagcatccccagatgtcaaattaaatcttggtggagattttatcaaagaatctacagctactacatttctgagacaaagaggttatggctggcttctggaagttgaagatgatgatcctgaagataacaagccactcttggaagaattggacattgatctaaaggatatttactacaaaatccgatgtgttttgatgccaatgccatcacttggttttaatagacaagtggtgagagacaatcctgacttttggggtcctctggctgttgttcttttcttttccatgatatcattatatggacagtttagggtggtctcatggattataaccatttggatatttggttcactaacaattttcttactggccagagttcttggtggagaagttgcatatggccaagtccttggagttataggatattcattacttcctctcattgtaatagcccctgtacttttggtggttggatcatttgaagtggtgtctacacttataaaactgtttggtgtgttttgggctgcctacagtgctgcttcattgttagtgggtgaagaattcaagaccaaaaagcctcttctgatttatccaatctttttattatacatttattttttgtcgttatatactggtgtgtgatccaagttatacatgaatagaaaaagatggtgttaaatttgtgtgtaggctgggaattcttgctgaaggaattggagaaaacctgttgctgcaaaattttacatgttccagatggaaagggaagtctaagcgctttttaaaacaatttttttttgtatttaattaagcaattgcagttatctgggatttttgggtcagaattttaaattctgtttgattctccatattccagtgaataaaatacaaaagcattgtgtttttaagattgtgtcgatattcacctaaaaacttgtgccaaaagcacctggattggtaattatatttcacttaaagggtaaatttgacaatatcttgataatcaaaagtgcaatttttttcttcaaaatgttttctccagcatcacagatcctgcagatatatatttatatttatacatatatatttatgaaataattcttactcacaaaatatatttctgataaacattaagatattaaatctgatgcacaaactttttaatttggccattaatcttttttatttaaaaaatttaaatttgtttttaaaattgtatatagtttttaaaatctcacacatgcttcgatacttccttgttaagaattcttaataactactaaaactgatttttaatagttgctgatatatatttggtttgtttgggtatacttttcaaaaccatttttgaatgtccaaacatctgatttaaagtttctgtttatctttctgaccaaaggagcaagaggtataatggatatggcattcattaaaatctttactatgtacaaaaacagtaatatttacagcatcagtaaatatttttaagtggtacttctaaatcataaaagttggggaaagagacctttaaaatcttgtggtgttgaacaatgttatatgaagtagaaaaaataaaatacttcccagttgtg

SEQ ID NO: 425469 - DNA, 3884 bp, Homo sapiens
tgtacggcggctgacccataaaatctacctagttctaaaattctttaacccacccacttaacaaaaacggaggtaataggtaaacaaaacgccaggaaagatcgcacttaaaggaacaaaagcacccaaggaggaaaaagaggcctgagatttccacgaattacaagtgaacttcctgtcctgggtaaacttccggaatcaacaacaggaagacccaatcagaatcttcctccgggagccaatgggagagcacattacaaagagccaatcccagcgccgctgtcactgttatggtcctgtcagggtgccggcgtcgtggtgcttgggtggtcgccaccaagaagactttggtggggtagtctcggggcagctcagcggcccgctgtgcccgtttctggcctcgctcgcagcttgcacgtcgagactcgtaggccgcaccgtagggcgagcgtgcgggtcgccgccgcggccgcctcggggtctgggcccagccgcagcctcttctaccgcggccggttgggagtcgccgcgagatgcagcctccgggcccgcccccggcctatgcccccactaacggggacttcacctttgtctcctcagcagacgcggaagatctcagtggttcaatagcatccccagatgtcaaattaaatcttggtggagattttatcaaagaatctacagctactacatttctgagacaaagaggttatggctggcttctggaagttgaagatgatgatcctgaagataacaagccactcttggaagaattggacattgatctaaaggatatttactacaaaatccgatgtgttttgatgccaatgccatcacttggttttaatagacaagtggtgagagacaatcctgacttttggggtcctctggctgttgttcttttcttttccatgatatcattatatggacagtttagggtggtctcatggattataaccatttggatatttggttcactaacaattttcttactggccagagttcttggtggagaagttgcatatggccaagtccttggagttataggatattcattacttcctctcattgtaatagcccctgtacttttggtggttggatcatttgaagtggtgtctacacttataaaactgtttggtgtgttttgggctgcctacagtgctgcttcattgttagtgggtgaagaattcaagaccaaaaagcctcttctgatttatccaatctttttattatacatttattttttgtcgttatatactggtgtgtgatccaagttatacatgaatagaaaaagatggtgttaaatttgtgtgtaggctgggaattcttgctgaaggaattggagaaaacctgttgctgcaaaattttacatgttccagatggaaagggaagtctaagcgctttttaaaacaatttttttttgtatttaattaagcaattgcagttatctgggatttttgggtcagaattttaaattctgtttgattctccatattccagtgaataaaatacaaaagcattgtgtttttaagattgtgtcgatattcacctaaaaacttgtgccaaaagcacctggattggtaattatatttcacttaaagggtaaatttgacaatatcttgataatcaaaagtgcaatttttttcttcaaaatgttttctccagcatcacagatcctgcagatatatatttatatttatacatatatatttatgaaataattcttactcacaaaatatatttctgataaacattaagatattaaatctgatgcacaaactttttaatttggccattaatcttttttatttaaaaaatttaaatttgtttttaaaattgtatatagtttttaaaatctcacacatgcttcgatacttccttgttaagaattcttaataactactaaaactgatttttaatagttgctgatatatatttggtttgtttgggtatacttttcaaaaccatttttgaatgtccaaacatctgatttaaagtttctgtttatctttctgaccaaaggagcaagaggtataatggatatggcattcattaaaatctttactatgtacaaaaacagtaatatttacagcatcagtaaatatttttaagtggtacttctaaatcataaaagttggggaaagagacctttaaaatcttgtggtgttgaacaatgttatatgaagtagaaaaaataaaatacttcccagttgtgtgttttgttttacagcaccatgtcctgtattacttgatattttaacaagtatcaggtactctctaacaaatgtacagtttttgctaagggaaatattaagaaatttttatcagtgaaatatttgttgcaaataatttcataggtttttagatacacctgtagttaatattactttgtaaagtaggtaaatcattttatttatgtccataaaatatcaaatgtctgttaactattagcaaattattgtattatcctttctggtctcacctggaagagtttcctgctgtcctcagtatgataacatggcgacctcttggtatgtatttctttagcaaacttacccatcaggaaatatccagcacctctgaagcaaacctacaaatgagtgtgttatcaagcccagccgtcttcctttcccctaatcccaaaaggaaagaaagaaaaacttattttaagctgcagaaaaagtgtggagcacttttgagctagaataatgtagaaaattacatgtactgatttttttaaaaacaggtgagaagcaccagagggacaggacttctagaagttagaataatatgaagtaatcaggaaatatctatgcctacagaagcagcaaccgtaagataaacatttgttacacttaagaaattgctgaggttaatactttgttataatggattataatatttgacattcatagtgttgaccctggaatctttcacagaaagcttgggggtcaggaccaggaggtagaattttacaaggcaataaatgaaggtattttaagatcacctctattaaaaaatggtttaatttttaaaaactatcattgctttaaggtatgaattttaaaaatcacttatatggatcatgtttactcctaatgatataagataaaatgaggtatttttgttccaaaaagtattttaaaatagcatttaatcttgggaactatcttacttagggtttctataaatacaaattacaatgtttcgaactcaaccagtatcattttcgtgtgctaatgagcaaagtagttagaacagattgtcagtttaaaaacaggatttgtaggccaggcacagtggctcacgcctgtaatcccagcactttgggaggccaaagtggatgagcagcttgagtcaggagtttgagaccagcctggccaacatggcgaaaccccgtctctactaaaaatacaaaaattagccgggcgtggtggcaggcgcctgtataatcccagctactcaggaggctgaggcagggagaatcgcttgaacccttggaggtggaggttgcagtgagccaagattgtgccattgcactccagcctgggtaacagagcaagactgtgccattgcactccagcctgggtaacagagcaagactctctcaaaaaaaaaaaaaaaaaaaaaaaaaaccatgatttgtagatgtgtgcaagacacagtactgctatggctaataatggtaagatgaccctaataatgtcctctccttgaatttttatataataatattttctgagtcataactaattttttaaataatgatttccaatctaattattaattagaattttgttgttgttgtttgagacagagtcactctgtcacccaaatcgtgccactgcactccagcctaggtgacagagtgagactccgtctca

SEQ ID NO: 425470 - DNA, 1782 bp, Homo sapiens
tgtacggcggctgacccataaaatctacctagttctaaaattctttaacccacccacttaacaaaaacggaggtaataggtaaacaaaacgccaggaaagatcgcacttaaaggaacaaaagcacccaaggaggaaaaagaggcctgagatttccacgaattacaagtgaacttcctgtcctgggtaaacttccggaatcaacaacaggaagacccaatcagaatcttcctccgggagccaatgggagagcacattacaaagagccaatcccagcgccgctgtcactgttatggtcctgtcagggtgccggcgtcgtggtgcttgggtggtcgccaccaagaagactttggtggggtagtctcggggcagctcagcggcccgctgtgcccgtttctggcctcgctcgcagcttgcacgtcgagactcgtaggccgcaccgtagggcgagcgtgcgggtcgccgccgcggccgcctcggggtctgggcccagccgcagcctcttctaccgcggccggttgggagtcgccgcgagatgcagcctccgggcccgcccccggcctatgcccccactaacggggacttcacctttgtctcctcagcagacgcggaagatctcagtggttcaatagcatccccagatgtcaaattaaatcttggtggagattttatcaaagaatctacagctactacatttctgagacaaagaggttatggctggcttctggaagttgaagatgatgatcctgaagataacaagccactcttggaagaattggacattgatctaaaggatatttactacaaaatccgatgtgttttgatgccaatgccatcacttggttttaatagacaagtggtgagagacaatcctgacttttggggtcctctggctgttgttcttttcttttccatgatatcattatatggacagtttagggtggtctcatggattataaccatttggatatttggttcactaacaattttcttactggccagagttcttggtggagaagttgcatatggccaagtccttggagttataggatattcattacttcctctcattgtaatagcccctgtacttttggtggttggatcatttgaagtggtgtctacacttataaaactgtttggtgtgttttgggctgcctacagtgctgcttcattgttagtgggtgaagaattcaagaccaaaaagcctcttctgatttatccaatctttttattatacatttattttttgtcgttatatactggtgtgtgatccaagttatacatgaatagaaaaagatggtgttaaatttgtgtgtaggctgggaattcttgctgaaggaattggagaaaacctgttgctgcaaaattttacatgttccagatggaaagggaagtctaagcgctttttaaaacaatttttttttgtatttaattaagcaattgcagttatctgggatttttgggtcagaattttaaattctgtttgattctccatattccagtgaataaaatacaaaagcattgtgtttccaaaaaaaaaaaagaaacagacacaaacacacttctggcgggcccggcctgggccaaggagaaaagtttctaaacaccatctcgctgggggcgggcggcccatttgttcagtgccggcggccaagcaggggcccaaagagaacgcgcgcatagatcagggcgtgggtcctcccattagaaaaccgcggcggcaccgactgcttgaacactcgagggttcggcgccacgggctacaacggggccacgaagcgata

SEQ ID NO: 425471 - DNA, 2268 bp, Homo sapiens
tgtacggcggctgacccataaaatctacctagttctaaaattctttaacccacccacttaacaaaaacggaggtaataggtaaacaaaacgccaggaaagatcgcacttaaaggaacaaaagcacccaaggaggaaaaagaggcctgagatttccacgaattacaagtgaacttcctgtcctgggtaaacttccggaatcaacaacaggaagacccaatcagaatcttcctccgggagccaatgggagagcacattacaaagagccaatcccagcgccgctgtcactgttatggtcctgtcagggtgccggcgtcgtggtgcttgggtggtcgccaccaagaagactttggtggggtagtctcggggcagctcagcggcccgctgtgcccgtttctggcctcgctcgcagcttgcacgtcgagactcgtaggccgcaccgtagggcgagcgtgcgggtcgccgccgcggccgcctcggggtctgggcccagccgcagcctcttctaccgcggccggttgggagtcgccgcgagatgcagcctccgggcccgcccccggcctatgcccccactaacggggacttcacctttgtctcctcagcagacgcggaagatctcagtggttcaatagcatccccagatgtcaaattaaatcttggtggagattttatcaaagaatctacagctactacatttctgagacaaagaggttatggctggcttctggaagttgaagatgatgatcctgaagataacaagccactcttggaagaattggacattgatctaaaggatatttactacaaaatccgatgtgttttgatgccaatgccatcacttggttttaatagacaagtggtgagagacaatcctgacttttggggtcctctggctgttgttcttttcttttccatgatatcattatatggacagtttagggtggtctcatggattataaccatttggatatttggttcactaacaattttcttactggccagagttcttggtggagaagttgcatatggccaagtccttggagttataggatattcattacttcctctcattgtaatagcccctgtacttttggtggttggatcatttgaagtggtgtctacacttataaaagtgagaagcaccagagggacaggacttctagaagttagaataatatgaagtaatcaggaaatatctatgcctacagaagcagcaaccgtaagataaacatttgttacacttaagaaattgctgaggttaatactttgttataatggattataatatttgacattcatagtgttgaccctggaatctttcacagaaagcttgggggtcaggaccaggaggtagaattttacaaggcaataaatgaaggtattttaagatcacctctattaaaaaatggtttaatttttaaaaactatcattgctttaaggtatgaattttaaaaatcacttatatggatcatgtttactcctaatgatataagataaaatgaggtatttttgttccaaaaagtattttaaaatagcatttaatcttgggaactatcttacttagggtttctataaatacaaattacaatgtttcgaactcaaccagtatcattttcgtgtgctaatgagcaaagtagttagaacagattgtcagtttaaaaacaggatttgtaggccaggcacagtggctcacgcctgtaatcccagcactttgggaggccaaagtggatgagcagcttgagtcaggagtttgagaccagcctggccaacatggcgaaaccccgtctctactaaaaatacaaaaattagccgggcgtggtggcaggcgcctgtataatcccagctactcaggaggctgaggcagggagaatcgcttgaacccttggaggtggaggttgcagtgagccaagattgtgccattgcactccagcctgggtaacagagcaagactgtgccattgcactccagcctgggtaacagagcaagactctctcaaaaaaaaaaaaaaaaaaaaaaaaaaccatgatttgtagatgtgtgcaagacacagtactgctatggctaataatggtaagatgaccctaataatgtcctctccttgaatttttatataataatattttctgagtcataactaattttttaaataatgatttccaatctaattattaattagaattttgttgttgttgtttgagacagagtcactctgtcacccaaatcgtgccactgcactccagcctaggtgacagagtgagactccgtctca

SEQ ID NO: 425472 - DNA, 4190 bp, Homo sapiens
tactttcagagaaaatctttccaaagaccctcttaagaaagtcctatttctaaaattttcatgtttgattcattcagatatgattaaagcccatcatggtctgtgtaaatgtttctgcattcttagaaactttctccagttttttataactagtccattggatgtaggaatgccaaagagtctaactaaaaagagagggaatcttggctacaatggaatacctaggggtatgggaagtaagtaatagtctttatttccatatgaatattgctggctttacacctgcaataattaggcaagagactcaaagatagttttttcagaaaagttttctttcaaggatctagcaagtctgagctatgcttccaactttactgccctccatcatccggcatctttgactcatccaccaccttctgtccctttcattctcattccccatgtgtcagctccccagaaaggacatatcttgtacaccttgccacagcactcatcacctgcttctggactgcctgagcaagagtgatacttcctgttctaaagacaggagtgaggatgggggatactcagactttgggatgtgccagaactgtggctagtccccaggaagcagaacttggaggactcataaaggagccaatcccacctccatcctaaacaaggccagttcataaaccccatctggcacagcagcagtctcaggaagctaaattggggagtgccctgtatctcactccctaaactggggagtgagagcatcctgatggtcagctcttgggctgtgacagtggtcccctgcaaatgaaaaggggagctgtactgatgtcaggagatgtggctcaccgtcattattagagtcagggcctctcctgcctacttcggtgggtgaggacagagagggggatggagagaatccttaatccttcattggtaacatcctgagatcctcctagagttccagacatcatacttatcatgggatttgtttgccttattttagcctccctgccctctggccagtgagttgaattaaataattgtgccctcagtatcaaggagtagacaatgtagactatttttatgcagccctgaggacccccagtcatgactcttgataaggtgaggcatctgggttgggtgctaaactatgagccttcttcaccctccttccagtaatgcctatttcagccctgcctagcctgcaccatcttgataattaggtaggatgactgcagattgaaatcaagcagctatttcctttggcttttctggcagacactgcccactgcctccagtgcgtgcactgtagatggtgggtggtccctatgggtgggtgctagggggaaaattccacccctgcagtaagcagaagcaggcagaagtctgctggaagctgcaggcctcccgcactgacttgcaatgttccttgtgctccaggtgctgctgtttctttaagaggaaaaggaagaagactgctcagcgccacaagtgaccagtgcctcccaggagtcctcaggccctggggactctgactcaattgtacctgcagctcctgccatttctcattggaagggactcctctttgggggagggtggatatccaaaccaaaaagaagaaaacagatgcccccagaaggggccagtgcgggcagccagggcctagtgggtcattggccatctccgcctgcctaaggctctgagcaggtcccagagctgctgttcctccactgcttgcccatagggctgcctggttgactctccttcccattgtttacagtgaaggtgtcattcacaaaaactcaaggactgctattctccttcttccccttagtttactcctggtttttaccccaccctcaaccctctccagcataaaacctagtgagctaaaggctttgtctgcagaaggagatcaagaggctgggggtaaggccaagaaggtaggaggaaaatggcagacctgggctggagaagaaccttctccgtatcccaggtgtgcctggcagtatggtttcctcttcctctgtgcctgtgcagcattcatcccagctggccttggggttcaggttccttcttccctccctcctgtgaagttacactgtaggacacaagctgtgagcaatctgcagtctactgtccctgtgtgttggcgttcttagcttttttgacaaactcttttctccaggtagtaggacaatgaaaattgttctaagcaaaggaaagaaaactgactttgttgcacttttagtttttttaaaaaaaacaaaaacaaaaacatggcagatgcatattgtgtctggttatattgggggttttacttttacctgttttgagggggatggggccggccaagccattcagagagaacatgggtccagaggacattctcagtggaaagagtttgatctgcagcacccagaagagaagccaaactcggtgtcattctgagtgaacactcaggttggcaagaaaacatacttgaattttcattcatcttctcagcagctgaagaatgtccctaccagagcatcttgacctaatcagcttacagtttgaaaacctagctctccagaacatgagatgagccagccgagccagactgtgaccaggaaacagctcatcccagagaaggagatgcttaacaaaaaaaaattgaaattgtttcccatgctgccagggacttccaactagatagccatgtgacgtcctggtgacttgggggaaaaattagtgatgaaacagccaccaccatattgccattagtggaaaaaaagaggacagtgaacctgccttccacctgccagagggacctcagggtgtggcattatagggccaggaaaagaaaatcggtgtatcctatctgccccaatagctgagctgtagcatttgggctggcctgccttatcagaaaccaagcttatgaagatcttctcccagcaggtccatagcagtaggcttaggatgcagtatatggggccgcatttaaaaggagggaaagattgtttggtgctggaacattccagggaaaaggagactggaatgaaaggtctgaaattatcttctcaattggactccttccagaaaggtggccgtgcctctaagcatgtttttcccagtatgccctaggcctccccccatggtgttttcatatgaggtactactgtgaaggatctggttcctcattcactgtttgacaagtctttcatgtgtggagttactcttctcatgcccaattttcatttgagtttagtggcttaaccaaacaatgactcctcattccagcggtgacagaagagaaagggtcatttacatcaggaaagaggtcttgtatctgggagtagagagctaaccatggagcacagtggctggtgggtgacttagtctgatggtttgtggaccatagaagtcttcacctctggtttgaggtgcagggctgtcttttgtactggagggtgtggggatattttctgatagttgccatttcttgaaaaattcccttgatgtaccttacacagagcagaaataacattaacatggatcagaggtactgggcttcatctgttccattggaccttggctagggaatatcatttcactggcatcaaacctgcttagcttatgaaaagatggtaatatgtcatttctataaatgtttctatatatgaaacataaagtggcagggagatacaatatcacaccccttccccacaaggactgtgaatattgggatttatgtccttgccattacctagtggttacagccctatcactaaaatttacatcgtttctcagttgggatttgggcattgctaacttactgtatagaaagtttaacttttcctcacccctgtatagaaaatgccttgcctctcaagagagggcagagggggggccaggtgcagtggctcacgcctgtaatcccagcagtttgggaggccaaggcaagtggatcatgtgaggtcaagagttcgagaccagcctggccaacatggtgaaaccccgtctctacaaaaaatacaaaaattagctgggcatggtggcatgctcccgtagtcccagctactcgggaggctgaggcaggagaatcacttgagcctgggaggcagaagttgcagtgagccgagatcgcaccactgcactccagcctgggcaacagagtgagactctgtctaaaaagaaaaaaaaaaaag

SEQ ID NO: 425473 - DNA, 1172 bp, Homo sapiens
aatagttctgcctgcttgcttctacctggcaaaacgtcctttgcattatctgatcaaattcaatcaggaagtaagtcctgccggtatccacagatctgatattagagtacaacatattgtactgtcataggttttattcagtgtgcttgttcaacacagtaaatgtagactgttgcattgactactatgtgcatgcagcagcactcttcctgccctttcagtactttaaatccaagcttgtgacaatccttacgtaaatgctacataaacattacaccgcaatggttcaggagttatgatagcgtctcctttttctctggctgacctcttttattatggtgggttttgttgtgggtatgtgaaaaagaagggctacttagtaactagcaggttagaggaacagatcccattttgacagtggagagagtcatattgactattaaaagcttttaaatggtaacagacatggtatcctaccccaaaatgtcacttactcttttttgtgtttttgtatgtgtagcataggtgttttgttttgttttgttttcattcgccatgtgaaaagagatgcgtagcatatgtttaagggaaagaatttattctttgtaattttgtactaggtggactgttcccttgcaaattctccaatttgactaggaaaatatgaatcaaagatcagtaaaggtaatctctcatccttccaaaagaaccatatttaaactaactcaataccttataatacacggaaaaataaacgcagaatttaagagtcaaatcatgtgaggtctgaagaagatatgcctccagtaaaagagtgttttggatttgtttgtatctagactgtaagggaatacatttaaaggacataaagccttagaaaaatatattgtggctggctggggtcggtggctcacacctgcactttgggaagctaaggcggtggatcacctgaggccaggagttcaaaaccggcctgaccaacatggtgaaaccctgtctctactaaaaatacaaaattagctgggcatggtggctcatgcctgtaatcccagctacttgggaggctgaggtaggagaatcgcttgacccaggagtcagagtttgcagtgagccgagatcgcaccactgcactccagcctgggcaataagagcaaaactctgtctcaaaaaaa

SEQ ID NO: 425474 - DNA, 576 bp, Homo sapiens
ggtgggtacccactcattagacaggtggactgttcccttgcaaattctccaatttgactaggaaaatatgaatcaaagatcagtaaaggtaatctctcatccttccaaaagaaccatatttaaactaactcaataccttataatacacggaaaaataaacgcagaatttaagagtcaaatcatgtgaggtctgaagaagatatgcctccagtaaaagagtgttttggatttgtttgtatctagactgtaagggaatacatttaaaggacataaagccttagaaaaatatattgtggctggctggggtcggtggctcacacctgcactttgggaagctaaggcggtggatcacctgaggccaggagttcaaaaccggcctgaccaacatggtgaaaccctgtctctactaaaaatacaaaattagctgggcatggtggctcatgcctgtaatcccagctacttgggaggctgaggtaggagaatcgcttgacccaggagtcagagtttgcagtgagccgagatcgcaccactgcactccagcctgggcaataagagcaaaactctgtctcaaaaaaa

SEQ ID NO: 425475 - DNA, 4371 bp, Homo sapiens
ttccggttcggctccagccgcccctcggctcctcgccttccccctcccgtccgccttctcccctccctcccgctcctgggaaagagagaaaccaccgctgcgggtgggtagagaagcacttggcgcctcggggaggggaccgcgcccgcctcatttgcgccttgcagcactgctggaccaggttacaagatgttcacctaagattgagacctagtgactacatttcctacgggaacaaataaatggtttttcatctcccggagatacattacaaacaaaatggtgctaaaagaactccttacctttctctgactacaatttatttggacatacttttgtattgaagagaggtatacatactgaagctacttgctgtactataggagactctgtcctgtaggatcatggaccatcctagtagggaaaaggatgaaagacaacggacaactaaacccatggcacaaaggagtgcacactgctctcgaccatctggctcctcatcgtcctctggggttcttatggtgggacccaacttcagggttggcaagaagataggatgtgggaacttcggagagctcagattaggtaaaaatctctacaccaatgaatatgtagcaatcaaactggaaccaataaaatcacgtgctccacagcttcatttagagtacagattttataaacagcttggcagtgcaggtgaaggtctcccacaggtgtattactttggaccatgtgggaaatataatgccatggtgctggagctccttggccctagcttggaggacttgtttgacctctgtgaccgaacatttactttgaagacggtgttaatgatagccatccagctgctttctcgaatggaatacgtgcactcaaagaacctcatttaccgagatgtcaagccagagaacttcctgattggtcgacaaggcaataagaaagagcatgttatacacattatagactttggactggccaaggaatacattgaccccgaaaccaaaaaacacataccttatagggaacacaaaagtttaactggaactgcaagatatatgtctatcaacacgcatcttggcaaagagcaaagccggagagatgatttggaagccctaggccatatgttcatgtatttccttcgaggcagcctcccctggcaaggactcaaggctgacacattaaaagagagatatcaaaaaattggtgacaccaaaaggaatactcccattgaagctctctgtgagaactttccagaggagatggcaacctaccttcgatatgtcaggcgactggacttctttgaaaaacctgattatgagtatttacggaccctcttcacagacctctttgaaaagaaaggctacacctttgactatgcctatgattgggttgggagacctattcctactccagtagggtcagttcacgtagattctggtgcatctgcaataactcgagaaagccacacacatagggatcggccatcacaacagcagcctcttcgaaatcaggtggttagctcaaccaatggagagctgaatgttgatgatcccacgggagcccactccaatgcaccaatcacagctcatgccgaggtggaggtagtggaggaagctaagtgctgctgtttctttaagaggaaaaggaagaagactgctcagcgccacaagtgaccagtgcctcccaggagtcctcaggccctggggactctgactcaattgtacctgcagctcctgccatttctcattggaagggactcctctttgggggagggtggatatccaaaccaaaaagaagaaaacagatgcccccagaaggggccagtgcgggcagccagggcctagtgggtcattggccatctccgcctgcctaaggctctgagcaggtcccagagctgctgttcctccactgcttgcccatagggctgcctggttgactctccttcccattgtttacagtgaaggtgtcattcacaaaaactcaaggactgctattctccttcttccccttagtttactcctggtttttaccccaccctcaaccctctccagcataaaacctagtgagctaaaggctttgtctgcagaaggagatcaagaggctgggggtaaggccaagaaggtaggaggaaaatggcagacctgggctggagaagaaccttctccgtatcccaggtgtgcctggcagtatggtttcctcttcctctgtgcctgtgcagcattcatcccagctggccttggggttcaggttccttcttccctccctcctgtgaagttacactgtaggacacaagctgtgagcaatctgcagtctactgtccctgtgtgttggcgttcttagcttttttgacaaactcttttctccaggtagtaggacaatgaaaattgttctaagcaaaggaaagaaaactgactttgttgcacttttagtttttttaaaaaaaacaaaaacaaaaacatggcagatgcatattgtgtctggttatattgggggttttacttttacctgttttgagggggatggggccggccaagccattcagagagaacatgggtccagaggacattctcagtggaaagagtttgatctgcagcacccagaagagaagccaaactcggtgtcattctgagtgaacactcaggttggcaagaaaacatacttgaattttcattcatcttctcagcagctgaagaatgtccctaccagagcatcttgacctaatcagcttacagtttgaaaacctagctctccagaacatgagatgagccagccgagccagactgtgaccaggaaacagctcatcccagagaaggagatgcttaacaaaaaaaaattgaaattgtttcccatgctgccagggacttccaactagatagccatgtgacgtcctggtgacttgggggaaaaattagtgatgaaacagccaccaccatattgccattagtggaaaaaaagaggacagtgaacctgccttccacctgccagagggacctcagggtgtggcattatagggccaggaaaagaaaatcggtgtatcctatctgccccaatagctgagctgtagcatttgggctggcctgccttatcagaaaccaagcttatgaagatcttctcccagcaggtccatagcagtaggcttaggatgcagtatatggggccgcatttaaaaggagggaaagattgtttggtgctggaacattccagggaaaaggagactggaatgaaaggtctgaaattatcttctcaattggactccttccagaaaggtggccgtgcctctaagcatgtttttcccagtatgccctaggcctccccccatggtgttttcatatgaggtactactgtgaaggatctggttcctcattcactgtttgacaagtctttcatgtgtggagttactcttctcatgcccaattttcatttgagtttagtggcttaaccaaacaatgactcctcattccagcggtgacagaagagaaagggtcatttacatcaggaaagaggtcttgtatctgggagtagagagctaaccatggagcacagtggctggtgggtgacttagtctgatggtttgtggaccatagaagtcttcacctctggtttgaggtgcagggctgtcttttgtactggagggtgtggggatattttctgatagttgccatttcttgaaaaattcccttgatgtaccttacacagagcagaaataacattaacatggatcagaggtactgggcttcatctgttccattggaccttggctagggaatatcatttcactggcatcaaacctgcttagcttatgaaaagatggtaatatgtcatttctataaatgtttctatatatgaaacataaagtggcagggagatacaatatcacaccccttccccacaaggactgtgaatattgggatttatgtccttgccattacctagtggttacagccctatcactaaaatttacatcgtttctcagttgggatttgggcattgctaacttactgtatagaaagtttaacttttcctcacccctgtatagaaaatgccttgcctctcaagagagggcagagggggggccaggtgcagtggctcacgcctgtaatcccagcagtttgggaggccaaggcaagtggatcatgtgaggtcaagagttcgagaccagcctggccaacatggtgaaaccccgtctctacaaaaaatacaaaaattagctgggcatggtggcatgctcccgtagtcccagctactcgggaggctgaggcaggagaatcacttgagcctgggaggcagaagttgcagtgagccgagatcgcaccactgcactccagcctgggcaacagagtgagactctgtctaaaaagaaaaaaaaaaaag

SEQ ID NO: 425476 - DNA, 4622 bp, Homo sapiens
ttccggttcggctccagccgcccctcggctcctcgccttccccctcccgtccgccttctcccctccctcccgctcctgggaaagagagaaaccaccgctgcgggtgggtagagaagcacttggcgcctcggggaggggaccgcgcccgcctcatttgcgccttgcagcactgctggaccaggttacaagatgttcacctaagattgagacctagtgactacatttcctacgggaacaaataaatggtttttcatctcccggagatacattacaaacaaaatggtgctaaaagaactccttacctttctctgactacaatttatttggacatacttttgtattgaagagaggtatacatactgaagctacttgctgtactataggagactctgtcctgtaggatcatggaccatcctagtagggaaaaggatgaaagacaacggacaactaaacccatggcacaaaggagtgcacactgctctcgaccatctggctcctcatcgtcctctggggttcttatggtgggacccaacttcagggttggcaagaagataggatgtgggaacttcggagagctcagattaggtaaaaatctctacaccaatgaatatgtagcaatcaaactggaaccaataaaatcacgtgctccacagcttcatttagagtacagattttataaacagcttggcagtgcaggtgaaggtctcccacaggtgtattactttggaccatgtgggaaatataatgccatggtgctggagctccttggccctagcttggaggacttgtttgacctctgtgaccgaacatttactttgaagacggtgttaatgatagccatccagctgctttctcgaatggaatacgtgcactcaaagaacctcatttaccgagatgtcaagccagagaacttcctgattggtcgacaaggcaataagaaagagcatgttatacacattatagactttggactggccaaggaatacattgaccccgaaaccaaaaaacacataccttatagggaacacaaaagtttaactggaactgcaagatatatgtctatcaacacgcatcttggcaaagagcaaagccggagagatgatttggaagccctaggccatatgttcatgtatttccttcgaggcagcctcccctggcaaggactcaaggctgacacattaaaagagagatatcaaaaaattggtgacaccaaaaggaatactcccattgaagctctctgtgagaactttccagaggagatggcaacctaccttcgatatgtcaggcgactggacttctttgaaaaacctgattatgagtatttacggaccctcttcacagacctctttgaaaagaaaggctacacctttgactatgcctatgattgggttgggagacctattcctactccagtagggtcagttcacgtagattctggtgcatctgcaataactcgagaaagccacacacatagggatcggccatcacaacagcagcctcttcgaaatcagagccttaggactgttacagctgagcattatgatgttaacaactcagccatctggcacaggggaagaggcacctaaacagattcttctggacaaaagtcacatatgagcaagatcagaatagtagcagatgtaaaaagcagaatgtatcatcagagcgccgaggagagtgggaaattcagcccagccggcagaccaatacctcatacctaacgtctcacttggctgcagaccgccatgggggatcagtgcaggtggttagctcaaccaatggagagctgaatgttgatgatcccacgggagcccactccaatgcaccaatcacagctcatgccgaggtggaggtagtggaggaagctaagtgctgctgtttctttaagaggaaaaggaagaagactgctcagcgccacaagtgaccagtgcctcccaggagtcctcaggccctggggactctgactcaattgtacctgcagctcctgccatttctcattggaagggactcctctttgggggagggtggatatccaaaccaaaaagaagaaaacagatgcccccagaaggggccagtgcgggcagccagggcctagtgggtcattggccatctccgcctgcctaaggctctgagcaggtcccagagctgctgttcctccactgcttgcccatagggctgcctggttgactctccttcccattgtttacagtgaaggtgtcattcacaaaaactcaaggactgctattctccttcttccccttagtttactcctggtttttaccccaccctcaaccctctccagcataaaacctagtgagctaaaggctttgtctgcagaaggagatcaagaggctgggggtaaggccaagaaggtaggaggaaaatggcagacctgggctggagaagaaccttctccgtatcccaggtgtgcctggcagtatggtttcctcttcctctgtgcctgtgcagcattcatcccagctggccttggggttcaggttccttcttccctccctcctgtgaagttacactgtaggacacaagctgtgagcaatctgcagtctactgtccctgtgtgttggcgttcttagcttttttgacaaactcttttctccaggtagtaggacaatgaaaattgttctaagcaaaggaaagaaaactgactttgttgcacttttagtttttttaaaaaaaacaaaaacaaaaacatggcagatgcatattgtgtctggttatattgggggttttacttttacctgttttgagggggatggggccggccaagccattcagagagaacatgggtccagaggacattctcagtggaaagagtttgatctgcagcacccagaagagaagccaaactcggtgtcattctgagtgaacactcaggttggcaagaaaacatacttgaattttcattcatcttctcagcagctgaagaatgtccctaccagagcatcttgacctaatcagcttacagtttgaaaacctagctctccagaacatgagatgagccagccgagccagactgtgaccaggaaacagctcatcccagagaaggagatgcttaacaaaaaaaaattgaaattgtttcccatgctgccagggacttccaactagatagccatgtgacgtcctggtgacttgggggaaaaattagtgatgaaacagccaccaccatattgccattagtggaaaaaaagaggacagtgaacctgccttccacctgccagagggacctcagggtgtggcattatagggccaggaaaagaaaatcggtgtatcctatctgccccaatagctgagctgtagcatttgggctggcctgccttatcagaaaccaagcttatgaagatcttctcccagcaggtccatagcagtaggcttaggatgcagtatatggggccgcatttaaaaggagggaaagattgtttggtgctggaacattccagggaaaaggagactggaatgaaaggtctgaaattatcttctcaattggactccttccagaaaggtggccgtgcctctaagcatgtttttcccagtatgccctaggcctccccccatggtgttttcatatgaggtactactgtgaaggatctggttcctcattcactgtttgacaagtctttcatgtgtggagttactcttctcatgcccaattttcatttgagtttagtggcttaaccaaacaatgactcctcattccagcggtgacagaagagaaagggtcatttacatcaggaaagaggtcttgtatctgggagtagagagctaaccatggagcacagtggctggtgggtgacttagtctgatggtttgtggaccatagaagtcttcacctctggtttgaggtgcagggctgtcttttgtactggagggtgtggggatattttctgatagttgccatttcttgaaaaattcccttgatgtaccttacacagagcagaaataacattaacatggatcagaggtactgggcttcatctgttccattggaccttggctagggaatatcatttcactggcatcaaacctgcttagcttatgaaaagatggtaatatgtcatttctataaatgtttctatatatgaaacataaagtggcagggagatacaatatcacaccccttccccacaaggactgtgaatattgggatttatgtccttgccattacctagtggttacagccctatcactaaaatttacatcgtttctcagttgggatttgggcattgctaacttactgtatagaaagtttaacttttcctcacccctgtatagaaaatgccttgcctctcaagagagggcagagggggggccaggtgcagtggctcacgcctgtaatcccagcagtttgggaggccaaggcaagtggatcatgtgaggtcaagagttcgagaccagcctggccaacatggtgaaaccccgtctctacaaaaaatacaaaaattagctgggcatggtggcatgctcccgtagtcccagctactcgggaggctgaggcaggagaatcacttgagcctgggaggcagaagttgcagtgagccgagatcgcaccactgcactccagcctgggcaacagagtgagactctgtctaaaaagaaaaaaaaaaaag

SEQ ID NO: 425477 - DNA, 2628 bp, Homo sapiens
cagagtattccatgcacgagcgagttagaggtggatatccaaaccaaaaagaagaaaacagatgcccccagaaggggccagtgcgggcagccagggcctagtgggtcattggccatctccgcctgcctaaggctctgagcaggtcccagagctgctgttcctccactgcttgcccatagggctgcctggttgactctccttcccattgtttacagtgaaggtgtcattcacaaaaactcaaggactgctattctccttcttccccttagtttactcctggtttttaccccaccctcaaccctctccagcataaaacctagtgagctaaaggctttgtctgcagaaggagatcaagaggctgggggtaaggccaagaaggtaggaggaaaatggcagacctgggctggagaagaaccttctccgtatcccaggtgtgcctggcagtatggtttcctcttcctctgtgcctgtgcagcattcatcccagctggccttggggttcaggttccttcttccctccctcctgtgaagttacactgtaggacacaagctgtgagcaatctgcagtctactgtccctgtgtgttggcgttcttagcttttttgacaaactcttttctccaggtagtaggacaatgaaaattgttctaagcaaaggaaagaaaactgactttgttgcacttttagtttttttaaaaaaaacaaaaacaaaaacatggcagatgcatattgtgtctggttatattgggggttttacttttacctgttttgagggggatggggccggccaagccattcagagagaacatgggtccagaggacattctcagtggaaagagtttgatctgcagcacccagaagagaagccaaactcggtgtcattctgagtgaacactcaggttggcaagaaaacatacttgaattttcattcatcttctcagcagctgaagaatgtccctaccagagcatcttgacctaatcagcttacagtttgaaaacctagctctccagaacatgagatgagccagccgagccagactgtgaccaggaaacagctcatcccagagaaggagatgcttaacaaaaaaaaattgaaattgtttcccatgctgccagggacttccaactagatagccatgtgacgtcctggtgacttgggggaaaaattagtgatgaaacagccaccaccatattgccattagtggaaaaaaagaggacagtgaacctgccttccacctgccagagggacctcagggtgtggcattatagggccaggaaaagaaaatcggtgtatcctatctgccccaatagctgagctgtagcatttgggctggcctgccttatcagaaaccaagcttatgaagatcttctcccagcaggtccatagcagtaggcttaggatgcagtatatggggccgcatttaaaaggagggaaagattgtttggtgctggaacattccagggaaaaggagactggaatgaaaggtctgaaattatcttctcaattggactccttccagaaaggtggccgtgcctctaagcatgtttttcccagtatgccctaggcctccccccatggtgttttcatatgaggtactactgtgaaggatctggttcctcattcactgtttgacaagtctttcatgtgtggagttactcttctcatgcccaattttcatttgagtttagtggcttaaccaaacaatgactcctcattccagcggtgacagaagagaaagggtcatttacatcaggaaagaggtcttgtatctgggagtagagagctaaccatggagcacagtggctggtgggtgacttagtctgatggtttgtggaccatagaagtcttcacctctggtttgaggtgcagggctgtcttttgtactggagggtgtggggatattttctgatagttgccatttcttgaaaaattcccttgatgtaccttacacagagcagaaataacattaacatggatcagaggtactgggcttcatctgttccattggaccttggctagggaatatcatttcactggcatcaaacctgcttagcttatgaaaagatggtaatatgtcatttctataaatgtttctatatatgaaacataaagtggcagggagatacaatatcacaccccttccccacaaggactgtgaatattgggatttatgtccttgccattacctagtggttacagccctatcactaaaatttacatcgtttctcagttgggatttgggcattgctaacttactgtatagaaagtttaacttttcctcacccctgtatagaaaatgccttgcctctcaagagagggcagagggggggccaggtgcagtggctcacgcctgtaatcccagcagtttgggaggccaaggcaagtggatcatgtgaggtcaagagttcgagaccagcctggccaacatggtgaaaccccgtctctacaaaaaatacaaaaattagctgggcatggtggcatgctcccgtagtcccagctactcgggaggctgaggcaggagaatcacttgagcctgggaggcagaagttgcagtgagccgagatcgcaccactgcactccagcctgggcaacagagtgagactctgtctaaaaagaaaaaaaaaaaag

SEQ ID NO: 425478 - DNA, 1880 bp, Homo sapiens
ttccggttcggctccagccgcccctcggctcctcgccttccccctcccgtccgccttctcccctccctcccgctcctgggaaagagagaaaccaccgctgcgggtgggtagagaagcacttggcgcctcggggaggggaccgcgcccgcctcatttgcgccttgcagcactgctggaccaggttacaagatgttcacctaagattgagacctagtgactacatttcctacgggaacaaataaatggtttttcatctcccggagatacattacaaacaaaatggtgctaaaagaactccttacctttctctgactacaatttatttggacatacttttgtattgaagagaggtatacatactgaagctacttgctgtactataggagactctgtcctgtaggatcatggaccatcctagtagggaaaaggatgaaagacaacggacaactaaacccatggcacaaaggagtgcacactgctctcgaccatctggctcctcatcgtcctctggggttcttatggtgggacccaacttcagggttggcaagaagataggatgtgggaacttcggagagctcagattaggtaaaaatctctacaccaatgaatatgtagcaatcaaactggaaccaataaaatcacgtgctccacagcttcatttagagtacagattttataaacagcttggcagtgcaggtgaaggtctcccacaggtgtattactttggaccatgtgggaaatataatgccatggtgctggagctccttggccctagcttggaggacttgtttgacctctgtgaccgaacatttactttgaagacggtgttaatgatagccatccagctgctttctcgaatggaatacgtgcactcaaagaacctcatttaccgagatgtcaagccagagaacttcctgattggtcgacaaggcaataagaaagagcatgttatacacattatagactttggactggccaaggaatacattgaccccgaaaccaaaaaacacataccttatagggaacacaaaagtttaactggaactgcaagatatatgtctatcaacacgcatcttggcaaagagcaaagccggagagatgatttggaagccctaggccatatgttcatgtatttccttcgaggcagcctcccctggcaaggactcaaggctgacacattaaaagagagatatcaaaaaattggtgacaccaaaaggaatactcccattgaagctctctgtgagaactttccagaggagatggcaacctaccttcgatatgtcaggcgactggacttctttgaaaaacctgattatgagtatttacggaccctcttcacagacctctttgaaaagaaaggctacacctttgactatgcctatgattgggttgggagacctattcctactccagtagggtcagttcacgtagattctggtgcatctgcaataactcgagaaagccacacacatagggatcggccatcacaacagcagcctcttcgaaatcagagtactgtttagttctgaccgaggctcagggtttgctagttgaaggggctaagtttgcgcagagataatctgcctccttgtgacctgcgtgcagtttcctaacatgctgcctgccatccagtaggagcacagacagagattgcacactcctcctggccacaggatggccacagctccacatagagctcagtgcaggagacgtctgcccctcctcatttctgggacctttactctgagaggagctttgaaacaagcaagtgcaaaactgaaaatagattccttagcgtcttctgttctatcacctagtcactgcggctcacctcttctcttaattctgtattccatattaaaagtttttttctttcagta

SEQ ID NO: 425479 - DNA, 1767 bp, Homo sapiens
ttccggttcggctccagccgcccctcggctcctcgccttccccctcccgtccgccttctcccctccctcccgctcctgggaaagagagaaaccaccgctgcgggtgggtagagaagcacttggcgcctcggggaggggaccgcgcccgcctcatttgcgccttgcagcactgctggaccaggttacaagatgttcacctaagattgagacctagtgactacatttcctacgggaacaaataaatggtttttcatctcccggagatacattacaaacaaaatggtgctaaaagaactccttacctttctctgactacaatttatttggacatacttttgtattgaagagaggtatacatactgaagctacttgctgtactataggagactctgtcctgtaggatcatggaccatcctagtagggaaaaggatgaaagacaacggacaactaaacccatggcacaaaggagtgcacactgctctcgaccatctggctcctcatcgtcctctggggttcttatggtgggacccaacttcagggttggcaagaagataggatgtgggaacttcggagagctcagattaggtaaaaatctctacaccaatgaatatgtagcaatcaaactggaaccaataaaatcacgtgctccacagcttcatttagagtacagattttataaacagcttggcagtgcaggtgaaggtctcccacaggtgtattactttggaccatgtgggaaatataatgccatggtgctggagctccttggccctagcttggaggacttgtttgacctctgtgaccgaacatttactttgaagacggtgttaatgatagccatccagctgctttctcgaatggaatacgtgcactcaaagaacctcatttaccgagatgtcaagccagagaacttcctgattggtcgacaaggcaataagaaagagcatgttatacacattatagactttggactggccaaggaatacattgaccccgaaaccaaaaaacacataccttatagggaacacaaaagtttaactggaactgcaagatatatgtctatcaacacgcatcttggcaaagagcaaagccggagagatgatttggaagccctaggccatatgttcatgtatttccttcgaggcagcctcccctggcaaggactcaaggctgacacattaaaagagagatatcaaaaaattggtgacaccaaaaggaatactcccattgaagctctctgtgagaactttccagaggagatggcaacctaccttcgatatgtcaggcgactggacttctttgaaaaacctgattatgagtatttacggaccctcttcacagacctctttgaaaagaaaggctacacctttgactatgcctatgattgggttgggagacctattcctactccagtagggtcagttcacgtagattctggtgcatctgcaataactcgagaaagccacacacatagggatcggccatcacaacagcagcctcttcgaaatcagccaaggtctttaacaagcagagtgttttgtccagcagtgaggccccttttcccacttcccagcacccacataaacaggaataatgtgctggaaatgaaaccaggtggcagaagcagctacacatgcaagagaagcctgattgggtccacattaaccagatgacaggagtgagagccttcacttacatttcggggaccatcagtgagaactgggatggcagtgaacctgaaataaagatcgttgaaataagactggc

SEQ ID NO: 425480 - DNA, 769 bp, Homo sapiens
ttccggttcggctccagccgcccctcggctcctcgccttccccctcccgtccgccttctcccctccctcccgctcctgggaaagagagaaaccaccgctgcgggtgggtagagaagcacttggcgcctcggggaggggaccgcgcccgcctcatttgcgccttgcagcactgctggaccaggttacaagatgttcacctaagattgagacctagtgactacatttcctacgggaacaaataaatggtttttcatctcccggagatacattacaaacaaaatggtgctaaaagaactccttacctttctctgactacaatttatttggacatacttttgtattgaagagaggtatacatactgaagctacttgctgtactataggagactctgtcctgtaggatcatggaccatcctagtagggaaaaggatgaaagacaacggacaactaaacccatggcacaaaggagtgcacactgctctcgaccatctggctcctcatcgtcctctggggttcttatggtgggacccaacttcagggttggcaagaagataggatgtgggaacttcggagagctcagattaggtaaaaatctctacaccaatgaatatgtagcaatcaaactggaaccaataaaatcacgtgctccacagcttcatttagagtacagattttataaacagcttggcagtgcaggtaagtcaagtcttttctctccacttacttagtatgtatcttagctggaagccctaaaatatacaaatttttt

SEQ ID NO: 425481 - DNA, 379 bp, Homo sapiens
ccatgttgctcagtctggtctcgaactcctgacctcaggtgatccactcacctcggcctcccaaagtgctgagattacaggcacgagccaccgcgcccggccctggttttttgttttcgaaggtaagctactctccaatgaactattaaggaccaggctgcctcccttttgcagatgagcaaactgagaagacaagacaacttgaaagtgctcttggtagctgaaaataattactactactctattagaattagaatcattctgtcctttgcatatgcatcaagttggacctgtttcccccatttgactttttgtttcatttttctagcctactccagtagggtcagttcacgtagattctggtgcatctgcaataact

SEQ ID NO: 425482 - DNA, 3068 bp, Homo sapiens
ttccggttcggctccagccgcccctcggctcctcgccttccccctcccgtccgccttctcccctccctcccgctcctgggaaagagagaaaccaccgctgcgggtgggtagagaagcacttggcgcctcggggaggggaccgcgcccgcctcatttgcgccttgcagcactgctggaccaggttacaagatgttcacctaagattgagacctagtgactacatttcctacgggaacaaataaatggtttttcatctcccggagatacattacaaacaaaatggtgctaaaagaactccttacctttctctgactacaatttatttggacatacttttgtattgaagagaggtatacatactgaagctacttgctgtactataggagactctgtcctgtaggatcatggaccatcctagtagggaaaaggatgaaagacaacggacaactaaacccatggcacaaaggagtgcacactgctctcgaccatctggctcctcatcgtcctctggggttcttatggtgggacccaacttcagggttggcaagaagataggatgtgggaacttcggagagctcagattaggtaaaaatctctacaccaatgaatatgtagcaatcaaactggaaccaataaaatcacgtgctccacagcttcatttagagtacagattttataaacagcttggcagtgcaggtgaaggtctcccacaggtgtattactttggaccatgtgggaaatataatgccataaaacctagtgagctaaaggctttgtctgcagaaggagatcaagaggctgggggtaaggccaagaaggtaggaggaaaatggcagacctgggctggagaagaaccttctccgtatcccaggtgtgcctggcagtatggtttcctcttcctctgtgcctgtgcagcattcatcccagctggccttggggttcaggttccttcttccctccctcctgtgaagttacactgtaggacacaagctgtgagcaatctgcagtctactgtccctgtgtgttggcgttcttagcttttttgacaaactcttttctccaggtagtaggacaatgaaaattgttctaagcaaaggaaagaaaactgactttgttgcacttttagtttttttaaaaaaaacaaaaacaaaaacatggcagatgcatattgtgtctggttatattgggggttttacttttacctgttttgagggggatggggccggccaagccattcagagagaacatgggtccagaggacattctcagtggaaagagtttgatctgcagcacccagaagagaagccaaactcggtgtcattctgagtgaacactcaggttggcaagaaaacatacttgaattttcattcatcttctcagcagctgaagaatgtccctaccagagcatcttgacctaatcagcttacagtttgaaaacctagctctccagaacatgagatgagccagccgagccagactgtgaccaggaaacagctcatcccagagaaggagatgcttaacaaaaaaaaattgaaattgtttcccatgctgccagggacttccaactagatagccatgtgacgtcctggtgacttgggggaaaaattagtgatgaaacagccaccaccatattgccattagtggaaaaaaagaggacagtgaacctgccttccacctgccagagggacctcagggtgtggcattatagggccaggaaaagaaaatcggtgtatcctatctgccccaatagctgagctgtagcatttgggctggcctgccttatcagaaaccaagcttatgaagatcttctcccagcaggtccatagcagtaggcttaggatgcagtatatggggccgcatttaaaaggagggaaagattgtttggtgctggaacattccagggaaaaggagactggaatgaaaggtctgaaattatcttctcaattggactccttccagaaaggtggccgtgcctctaagcatgtttttcccagtatgccctaggcctccccccatggtgttttcatatgaggtactactgtgaaggatctggttcctcattcactgtttgacaagtctttcatgtgtggagttactcttctcatgcccaattttcatttgagtttagtggcttaaccaaacaatgactcctcattccagcggtgacagaagagaaagggtcatttacatcaggaaagaggtcttgtatctgggagtagagagctaaccatggagcacagtggctggtgggtgacttagtctgatggtttgtggaccatagaagtcttcacctctggtttgaggtgcagggctgtcttttgtactggagggtgtggggatattttctgatagttgccatttcttgaaaaattcccttgatgtaccttacacagagcagaaataacattaacatggatcagaggtactgggcttcatctgttccattggaccttggctagggaatatcatttcactggcatcaaacctgcttagcttatgaaaagatggtaatatgtcatttctataaatgtttctatatatgaaacataaagtggcagggagatacaatatcacaccccttccccacaaggactgtgaatattgggatttatgtccttgccattacctagtggttacagccctatcactaaaatttacatcgtttctcagttgggatttgggcattgctaacttactgtatagaaagtttaacttttcctcacccctgtatagaaaatgccttgcctctcaagagagggcagagggggggccaggtgcagtggctcacgcctgtaatcccagcagtttgggaggccaaggcaagtggatcatgtgaggtcaagagttcgagaccagcctggccaacatggtgaaaccccgtctctacaaaaaatacaaaaattagctgggcatggtggcatgctcccgtagtcccagctactcgggaggctgaggcaggagaatcacttgagcctgggaggcagaagttgcagtgagccgagatcgcaccactgcactccagcctgggcaacagagtgagactctgtctaaaaagaaaaaaaaaaaag

SEQ ID NO: 425483 - DNA, 4499 bp, Homo sapiens
catgtatccaaggcacgaaccagccatgggcacagaccaagagccaagatgggataaacaagggttgctttatccctggatgacatgagatggacatcaccacattaaaggttcttaagctagagagtaacaggaagtatctgtatgtattcaaggttacaagatgttcacctaagattgagacctagtgactacatttcctacgggaacaaataaatggtttttcatctcccggagatacattacaaacaaaatggtgctaaaagaactccttacctttctctgactacaatttatttggacatacttttgtattgaagagaggtatacatactgaagctacttgctgtactataggagactctgtcctgtaggatcatggaccatcctagtagggaaaaggatgaaagacaacggacaactaaacccatggcacaaaggagtgcacactgctctcgaccatctggctcctcatcgtcctctggggttcttatggtgggacccaacttcagggttggcaagaagataggatgtgggaacttcggagagctcagattaggtaaatgcagtgtctcatatgttgcttagctgctctcaaactcctggcctgaaatgatcctcctgccttggcctcctgctaaagtgctggcagtaataggcataagccactgtgactggcccaatattcttccaatggcatatatgtcattatggtaaaaatctctacaccaatgaatatgtagcaatcaaactggaaccaataaaatcacgtgctccacagcttcatttagagtacagattttataaacagcttggcagtgcaggtgaaggtctcccacaggtgtattactttggaccatgtgggaaatataatgccatggtgctggagctccttggccctagcttggaggacttgtttgacctctgtgaccgaacatttactttgaagacggtgttaatgatagccatccagctgctttctcgaatggaatacgtgcactcaaagaacctcatttaccgagatgtcaagccagagaacttcctgattggtcgacaaggcaataagaaagagcatgttatacacattatagactttggactggccaaggaatacattgaccccgaaaccaaaaaacacataccttatagggaacacaaaagtttaactggaactgcaagatatatgtctatcaacacgcatcttggcaaagagcaaagccggagagatgatttggaagccctaggccatatgttcatgtatttccttcgaggcagcctcccctggcaaggactcaaggctgacacattaaaagagagatatcaaaaaattggtgacaccaaaaggaatactcccattgaagctctctgtgagaactttccagaggagatggcaacctaccttcgatatgtcaggcgactggacttctttgaaaaacctgattatgagtatttacggaccctcttcacagacctctttgaaaagaaaggctacacctttgactatgcctatgattgggttgggagacctattcctactccagtagggtcagttcacgtagattctggtgcatctgcaataactcgagaaagccacacacatagggatcggccatcacaacagcagcctcttcgaaatcaggtggttagctcaaccaatggagagctgaatgttgatgatcccacgggagcccactccaatgcaccaatcacagctcatgccgaggtggaggtagtggaggaagctaagtgctgctgtttctttaagaggaaaaggaagaagactgctcagcgccacaagtgaccagtgcctcccaggagtcctcaggccctggggactctgactcaattgtacctgcagctcctgccatttctcattggaagggactcctctttgggggagggtggatatccaaaccaaaaagaagaaaacagatgcccccagaaggggccagtgcgggcagccagggcctagtgggtcattggccatctccgcctgcctaaggctctgagcaggtcccagagctgctgttcctccactgcttgcccatagggctgcctggttgactctccttcccattgtttacagtgaaggtgtcattcacaaaaactcaaggactgctattctccttcttccccttagtttactcctggtttttaccccaccctcaaccctctccagcataaaacctagtgagctaaaggctttgtctgcagaaggagatcaagaggctgggggtaaggccaagaaggtaggaggaaaatggcagacctgggctggagaagaaccttctccgtatcccaggtgtgcctggcagtatggtttcctcttcctctgtgcctgtgcagcattcatcccagctggccttggggttcaggttccttcttccctccctcctgtgaagttacactgtaggacacaagctgtgagcaatctgcagtctactgtccctgtgtgttggcgttcttagcttttttgacaaactcttttctccaggtagtaggacaatgaaaattgttctaagcaaaggaaagaaaactgactttgttgcacttttagtttttttaaaaaaaacaaaaacaaaaacatggcagatgcatattgtgtctggttatattgggggttttacttttacctgttttgagggggatggggccggccaagccattcagagagaacatgggtccagaggacattctcagtggaaagagtttgatctgcagcacccagaagagaagccaaactcggtgtcattctgagtgaacactcaggttggcaagaaaacatacttgaattttcattcatcttctcagcagctgaagaatgtccctaccagagcatcttgacctaatcagcttacagtttgaaaacctagctctccagaacatgagatgagccagccgagccagactgtgaccaggaaacagctcatcccagagaaggagatgcttaacaaaaaaaaattgaaattgtttcccatgctgccagggacttccaactagatagccatgtgacgtcctggtgacttgggggaaaaattagtgatgaaacagccaccaccatattgccattagtggaaaaaaagaggacagtgaacctgccttccacctgccagagggacctcagggtgtggcattatagggccaggaaaagaaaatcggtgtatcctatctgccccaatagctgagctgtagcatttgggctggcctgccttatcagaaaccaagcttatgaagatcttctcccagcaggtccatagcagtaggcttaggatgcagtatatggggccgcatttaaaaggagggaaagattgtttggtgctggaacattccagggaaaaggagactggaatgaaaggtctgaaattatcttctcaattggactccttccagaaaggtggccgtgcctctaagcatgtttttcccagtatgccctaggcctccccccatggtgttttcatatgaggtactactgtgaaggatctggttcctcattcactgtttgacaagtctttcatgtgtggagttactcttctcatgcccaattttcatttgagtttagtggcttaaccaaacaatgactcctcattccagcggtgacagaagagaaagggtcatttacatcaggaaagaggtcttgtatctgggagtagagagctaaccatggagcacagtggctggtgggtgacttagtctgatggtttgtggaccatagaagtcttcacctctggtttgaggtgcagggctgtcttttgtactggagggtgtggggatattttctgatagttgccatttcttgaaaaattcccttgatgtaccttacacagagcagaaataacattaacatggatcagaggtactgggcttcatctgttccattggaccttggctagggaatatcatttcactggcatcaaacctgcttagcttatgaaaagatggtaatatgtcatttctataaatgtttctatatatgaaacataaagtggcagggagatacaatatcacaccccttccccacaaggactgtgaatattgggatttatgtccttgccattacctagtggttacagccctatcactaaaatttacatcgtttctcagttgggatttgggcattgctaacttactgtatagaaagtttaacttttcctcacccctgtatagaaaatgccttgcctctcaagagagggcagagggggggccaggtgcagtggctcacgcctgtaatcccagcagtttgggaggccaaggcaagtggatcatgtgaggtcaagagttcgagaccagcctggccaacatggtgaaaccccgtctctacaaaaaatacaaaaattagctgggcatggtggcatgctcccgtagtcccagctactcgggaggctgaggcaggagaatcacttgagcctgggaggcagaagttgcagtgagccgagatcgcaccactgcactccagcctgggcaacagagtgagactctgtctaaaaagaaaaaaaaaaaag

SEQ ID NO: 425484 - DNA, 1946 bp, Homo sapiens
ttccggttcggctccagccgcccctcggctcctcgccttccccctcccgtccgccttctcccctccctcccgctcctgggaaagagagaaaccaccgctgcgggtgggtagagaagcacttggcgcctcggggaggggaccgcgcccgcctcatttgcgccttgcagcactgctggaccaggttacaagatgttcacctaagattgagacctagtgactacatttcctacgggaacaaataaatggtttttcatctcccggagatacattacaaacaaaatggtgctaaaagaactccttacctttctctgactacaatttatttggacatacttttgtattgaagagaggtatacatactgaagctacttgctgtactataggagactctgtcctgtaggatcatggaccatcctagtagggaaaaggatgaaagacaacggacaactaaacccatggcacaaaggagtgcacactgctctcgaccatctggctcctcatcgtcctctggggttcttatggtgggacccaacttcagggttggcaagaagataggatgtgggaacttcggagagctcagattaggtaaaaatctctacaccaatgaatatgtagcaatcaaactggaaccaataaaatcacgtgctccacagcttcatttagagtacagattttataaacagcttggcagtgcaggtgaaggtctcccacaggtgtattactttggaccatgtgggaaatataatgccatggtgctggagctccttggccctagcttggaggacttgtttgacctctgtgaccgaacatttactttgaagacggtgttaatgatagccatccagctgctttctcgaatggaatacgtgcactcaaagaacctcatttaccgagatgtcaagccagagaacttcctgattggtcgacaaggcaataagaaagagcatgttatacacattatagactttggactggccaaggaatacattgaccccgaaaccaaaaaacacataccttatagggaacacaaaagtttaactggaactgcaagatatatgtctatcaacacgcatcttggcaaagagcaaagccggagagatgatttggaagccctaggccatatgttcatgtatttccttcgaggcagcctcccctggcaaggactcaaggctgacacattaaaagagagatatcaaaaaattggtgacaccaaaaggaatactcccattgaagctctctgtgagaactttccagaggagatggcaacctaccttcgatatgtcaggcgactggacttctttgaaaaacctgattatgagtatttacggaccctcttcacagacctctttgaaaagaaaggctacacctttgactatgcctatgattgggttgggagacctattcctactccagtagggtcagttcacgtagattctggtgcatctgcaataactcgagaaagccacacacatagggatcggccatcacaacagcagcctcttcgaaatcagaggtggactgttcccttgcaaattctccaatttgactaggaaaatatgaatcaaagatcagtaaagagtactgtttagttctgaccgaggctcagggtttgctagttgaaggggctaagtttgcgcagagataatctgcctccttgtgacctgcgtgcagtttcctaacatgctgcctgccatccagtaggagcacagacagagattgcacactcctcctggccacaggatggccacagctccacatagagctcagtgcaggagacgtctgcccctcctcatttctgggacctttactctgagaggagctttgaaacaagcaagtgcaaaactgaaaatagattccttagcgtcttctgttctatcacctagtcactgcggctcacctcttctcttaattctgtattccatattaaaagtttttttctttcagta

SEQ ID NO: 425485 - DNA, 1411 bp, Homo sapiens
ttccggttcggctccagccgcccctcggctcctcgccttccccctcccgtccgccttctcccctccctcccgctcctgggaaagagagaaaccaccgctgcgggtgggtagagaagcacttggcgcctcggggaggggaccgcgcccgcctcatttgcgccttgcagcactgctggaccaggttacaagatgttcacctaagattgagacctagtgactacatttcctacgggaacaaataaatggtttttcatctcccggagatacattacaaacaaaatggtgctaaaagaactccttacctttctctgactacaatttatttggacatacttttgtattgaagagaggtatacatactgaagctacttgctgtactataggagactctgtcctgtaggatcatggaccatcctagtagggaaaaggatgaaagacaacggacaactaaacccatggcacaaaggagtgcacactgctctcgaccatctggctcctcatcgtcctctggggttcttatggtgggacccaacttcagggttggcaagaagataggatgtgggaacttcggagagctcagattaggtaaaaatctctacaccaatgaatatgtagcaatcaaactggaaccaataaaatcacgtgctccacagcttcatttagagtacagattttataaacagcttggcagtgcaggtgaaggtctcccacaggtgtattactttggaccatgtgggaaatataatgccatggtgctggagctccttggccctagcttggaggacttgtttgacctctgtgaccgaacatttactttgaagacggtgttaatgatagccatccagctgctttctcgaatggaatacgtgcactcaaagaacctcatttaccgagatgtcaagccagagaacttcctgattggtcgacaaggcaataagaaagagcatgttatacacattatagactttggactggccaaggaatacattgaccccgaaaccaaaaaacacataccttatagggaacacaaaagtttaactggaactgcaagatatatgtctatcaacacgcatcttggcaaagagcaaagccggagagatgatttggaagccctaggccatatgttcatgtatttccttcgaggcagcctcccctggcaaggactcaaggctgacacattaaaagagagatatcaaaaaattggtgacaccaaaaggaatactcccattgaagctctctgtgagaactttccagtaggagatggcaacctaccttcgatcttcagaataccctggattcagtagaaaaaccttttaaatgaagttttgtacaatagaaacttctcagcagtctaaatttagactgtaaaataatacatgcgaaacatacttttctgaaaacacttaacttg

SEQ ID NO: 425486 - DNA, 4813 bp, Homo sapiens
ccatcggacgtcggcggtgaggatcttctcctgacccagcatcgctcatcacaatgaagaaccaagacaaaaagaacggggctgccaaacaatccaatccaaaaagcagcccaggacaaccggaagcaggacccgagggagcccaggagcggcccagccaggcggctcctgcagtagaagcagaaggtcccggcagcagccaggctcctcggaagccggagggggctcaagccagaacggctcagtctggggcccttcgtgatgtctctgaggagctgagccgccaactggaagacatactgagcacatactgtgtggacaataaccaggggggccccggcgaggatggggcacagggtgagccggctgaacccgaagatgcagagaagtcccggacctatgtggcaaggaatggggagcctgaaccaactccagtagtcaatggagagaaggaaccctccaagggggatccaaacacagaagagatccggcagagtgacgaggtcggagacggagaccatcgaaggccacaggagaagaaaaaagccaagggtttggggaaggagatcacgttgctgatgcagacattgaatactctgagtaccccagaggagaagctggctgctctgtgcaagaagtatgctgaactgctggaggagcaccggaattcacagaagcagatgaagctcctacagaaaaagcagagccagctggtgcaagagaaggaccacctgcgcggtgagcacagcaaggccgtcctggcccgcagcaagcttgagagcctatgccgtgagctgcagcggcacaaccgctccctcaaggaagaaggtgtgcagcgggcccgggaggaggaggagaagcgcaaggaggtgacctcgcacttccaggtgacactgaatgacattcagctgcagatggaacagcacaatgagcgcaactccaagctgcgccaagagaacatggagctggctgagaggctcaagaagctgattgagcagtatgagctgcgcgaggagcatatcgacaaagtcttcaaacacaaggacctacaacagcagctggtggatgccaagctccagcaggcccaggagatgctaaaggaggcagaagagcggcaccagcgggagaaggattttctcctgaaagaggcagtagagtcccagaggatgtgtgagctgatgaagcagcaagagacccacctgaagcaacagcttgccctatacacagagaagtttgaggagttccagaacacactttccaaaagcagcgaggtattcaccacattcaagcaggagatggaaaagatgactaagaagatcaagaagctggagaaagaaaccaccatgtaccggtcccggtgggagagcagcaacaaggccctgcttgagatggctgaggagaaaacagtccgggataaagaactggagggcctgcaggtaaaaatccaacggctggagaagctgtgccgggcactgcagacagagcgcaatgacctgaacaagagggtacaggacctgagtgctggtggccagggctccctcactgacagtggccctgagaggaggccagaggggcctggggctcaagcacccagctcccccagggtcacagaagcgccttgctacccaggagcaccgagcacagaagcatcaggccagactgggcctcaagagcccacctccgccaggcctagagagcctggtgttgggtcatgctgggaagggagcggcagcccagccaggcctggcccataaaaggctcccatgctgagcagcccattgctgaagccaggatgttctgacctggctggcatctggcacttgcaattttggattttgtgggtcagttttacgtacatagggcattttgcaaggccttgcaaatgcatttatacctgtaagtgtacagtgggcttgcattggggatgggggtgtgtacagatgaagtcagtggcttgtctgtgagctgaagagtcttgagaggggctgtcatctgtagctgccatcacagtgagttggcagaagtgacttgagcatttctctgtctgatttgaggctcagacccctccctgcccttcagagctcaagacaagtaatacacccaggtcttgactgcatttgtcttgtgagcagggcttgcttggtcagctcaggccctcctagctgctctggaggctcctttgattctctagacctggaaaaggtgtccctaggcagagccctggcagggcgctcagagctggggatttcctgcctggaacaagggacctggagaatgtttttgcgtgggatgatgtgctggtcaggagccccttgggcatcgcttcccctgccctttggtagtgccaggaccaggccaatgatgcttctcagtagccttatcattcacaggtgcctctctagcctgcacaaatgattgacaagagatcacccaaaggattatttctgaaggtgtttttttctttatttctttttctttttttttttttttctttttcttttttttttgcacatgacagtgtttgtattgaggaccttccaaggaagagggatgctgtagcagtggtgcctgggtgcctggcctccagtgtcccacctccttcaccaccccacttggctcctttgccatcttgatgctgaggtttcctgtttggtgagatcaggttgtttgtggtaaaagaaaggaaagggcttctgatggctttgccacaagcttacctgtgggtttcagtcctgagaggccaccaccagttcccatcagcactgtctccatgcagcagttgctgggtcccatgtccagctgcctctttggcttcatgggtttttctgcttcctgcccccacccccacatgtgcaatcctcaagatttgtcctgattctatttcctggcacctccctgcctgtccttggggattctacttcttcctgtgtgggagcccatagctgttgtctaacaggtaagaaatgaaattgaactattgactgggccccagaaatccataaaatggctgcagacagttgtttctgtgtcctgttctacccccactccagtacataactactatgtactgtgtagagccattctatatgctgaatgttctgctgttgcaaacttgccagggtattagccagtgtttgtgccaagcagttttctgggacaacagaatgactcagaccaagatggataggatggttagggctttgcttcttgctgtttttctttgaagctagttcattgtcctgcaggtcccttcatcttccatacctagcccactcttttagcccttaccttaaatctctcagataagttggttcacaaagaatgttaagtactgaatcatgtgtgactgagaccagagatggcaaatgaatggcacaccatttctccttctcctgccccagggcaggtaccactgatctgcatcagagttgcctgctattctctggtgtatccttcacatctaggtgccctcaagcagctgtgtgagtgttgagatctctgccatctctggctgagatactgctgtcctgtgaagtgtttcccatgacctttttcttcccctttgaatccctctgtctggagtagtccttgcctcttcctgctccagtagggccttttccctaccccagcccctgtgccaggctaagctggtacaagagctgccaacctcacagagtgtttgctaggcgagagaggtgcagggaagaggcagaggtatgcaccttcccccttgaagagaggggaaaggcctacagtggcccacataattgcctgactcacacttcagctacctcttaatgcctgtggagggactggagctgctggatcccagtgtggtggtgtaggaggccacagtgagcaggtggccccagctgggtttcccaggtcaggaatgtgggccccaggcaaggtgcagcctttgctcacagctccatccatgtctagaccttcaggccagtctgcagatgaggttccctacctttttcttctcttcattgaccaaatcaaccaatcactacagctgctctgcttctgctttccaaagtagcccaggtcctgggccagatgcaggggaggtgcctatccatgagtgaaggccagtgtcttcctcacctgggtgggtcccacacttgtgacctcagttttaggaccaagatctgtgttggtttcttagattgctagcttttcctccaggggaccacagcaggtgaagctcaagagcgcatggctctgctaatagtaaattgttttcagggccttgtccagctgagagcttcatgtccaccagattctgagaggtgtcagcagcactttttttttttatttgttgtttgttttccatgaggttatcggaccatgggctgagctcaggcactttctgtaggagactgttatttctgtaaagatggttatttaaccctcctccaccccatcacggtggccctgagggctgacccggaggccagtggagctgcctggtgtccacgggggagggccaaggcctgctgagctgattctccagctgctgccccagcctttccgccttgcacagcacagaggtggtcaccccagggacagccaggcacctgctcctcttgcccttcctgggggaagggagctgccttctgtccctgtaactgctttccttatggcccagcccggccactcagacttgtttgaagctgcactggcagcttttttgtctcctttgggtattcacaacagccagggacttgattttgatgtattttaaaccacattaaataaagagtctgttgccttacttgtttctctcctgacctgtgtattcctt

SEQ ID NO: 425487 - DNA, 4372 bp, Homo sapiens
  misc_feature (1)..(1): n is a, c, g, or t
ntgagcggacctccataatgtgtgccaggtctgggcagatgcagggaggtgctatccatgagtgaaggcagtgtcttcctcacctgggtgggtcccacacttgtgacctcagttttaggaaggagatcacgttgctgatgcagacattgaatactctgagtaccccagaggagaagctggctgctctgtgcaagaagtatgctgaactgctggaggagcaccggaattcacagaagcagatgaagctcctacagaaaaagcagagccagctggtgcaagagaaggaccacctgcgcggtgagcacagcaaggccgtcctggcccgcagcaagcttgagagcctatgccgtgagctgcagcggcacaaccgctccctcaaggaagaaggtgtgcagcgggcccgggaggaggaggagaagcgcaaggaggtgacctcgcacttccaggtgacactgaatgacattcagctgcagatggaacagcacaatgagcgcaactccaagctgcgccaagagaacatggagctggctgagaggctcaagaagctgattgagcagtatgagctgcgcgaggagcatatcgacaaagtcttcaaacacaaggacctacaacagcagctggtggatgccaagctccagcaggcccaggagatgctaaaggaggcagaagagcggcaccagcgggagaaggattttctcctgaaagaggcagtagagtcccagaggatgtgtgagctgatgaagcagcaagagacccacctgaagcaacagcttgccctatacacagagaagtttgaggagttccagaacacactttccaaaagcagcgaggtattcaccacattcaagcaggagatggaaaagatgactaagaagatcaagaagctggagaaagaaaccaccatgtaccggtcccggtgggagagcagcaacaaggccctgcttgagatggctgaggagaaaacagtccgggataaagaactggagggcctgcaggtaaaaatccaacggctggagaagctgtgccgggcactgcagacagagcgcaatgacctgaacaagagggtacaggacctgagtgctggtggccagggctccctcactgacagtggccctgagaggaggccagaggggcctggggctcaagcacccagctcccccagggtcacagaagcgccttgctacccaggagcaccgagcacagaagcatcaggccagactgggcctcaagagcccacctccgccaggcctagagagcctggtgttgggtcatgctgggaagggagcggcagcccagccaggcctggcccataaaaggctcccatgctgagcagcccattgctgaagccaggatgttctgacctggctggcatctggcacttgcaattttggattttgtgggtcagttttacgtacatagggcattttgcaaggccttgcaaatgcatttatacctgtaagtgtacagtgggcttgcattggggatgggggtgtgtacagatgaagtcagtggcttgtctgtgagctgaagagtcttgagaggggctgtcatctgtagctgccatcacagtgagttggcagaagtgacttgagcatttctctgtctgatttgaggctcagacccctccctgcccttcagagctcaagacaagtaatacacccaggtcttgactgcatttgtcttgtgagcagggcttgcttggtcagctcaggccctcctagctgctctggaggctcctttgattctctagacctggaaaaggtgtccctaggcagagccctggcagggcgctcagagctggggatttcctgcctggaacaagggacctggagaatgtttttgcgtgggatgatgtgctggtcaggagccccttgggcatcgcttcccctgccctttggtagtgccaggaccaggccaatgatgcttctcagtagccttatcattcacaggtgcctctctagcctgcacaaatgattgacaagagatcacccaaaggattatttctgaaggtgtttttttctttatttctttttctttttttttttttttctttttcttttttttttgcacatgacagtgtttgtattgaggaccttccaaggaagagggatgctgtagcagtggtgcctgggtgcctggcctccagtgtcccacctccttcaccaccccacttggctcctttgccatcttgatgctgaggtttcctgtttggtgagatcaggttgtttgtggtaaaagaaaggaaagggcttctgatggctttgccacaagcttacctgtgggtttcagtcctgagaggccaccaccagttcccatcagcactgtctccatgcagcagttgctgggtcccatgtccagctgcctctttggcttcatgggtttttctgcttcctgcccccacccccacatgtgcaatcctcaagatttgtcctgattctatttcctggcacctccctgcctgtccttggggattctacttcttcctgtgtgggagcccatagctgttgtctaacaggtaagaaatgaaattgaactattgactgggccccagaaatccataaaatggctgcagacagttgtttctgtgtcctgttctacccccactccagtacataactactatgtactgtgtagagccattctatatgctgaatgttctgctgttgcaaacttgccagggtattagccagtgtttgtgccaagcagttttctgggacaacagaatgactcagaccaagatggataggatggttagggctttgcttcttgctgtttttctttgaagctagttcattgtcctgcaggtcccttcatcttccatacctagcccactcttttagcccttaccttaaatctctcagataagttggttcacaaagaatgttaagtactgaatcatgtgtgactgagaccagagatggcaaatgaatggcacaccatttctccttctcctgccccagggcaggtaccactgatctgcatcagagttgcctgctattctctggtgtatccttcacatctaggtgccctcaagcagctgtgtgagtgttgagatctctgccatctctggctgagatactgctgtcctgtgaagtgtttcccatgacctttttcttcccctttgaatccctctgtctggagtagtccttgcctcttcctgctccagtagggccttttccctaccccagcccctgtgccaggctaagctggtacaagagctgccaacctcacagagtgtttgctaggcgagagaggtgcagggaagaggcagaggtatgcaccttcccccttgaagagaggggaaaggcctacagtggcccacataattgcctgactcacacttcagctacctcttaatgcctgtggagggactggagctgctggatcccagtgtggtggtgtaggaggccacagtgagcaggtggccccagctgggtttcccaggtcaggaatgtgggccccaggcaaggtgcagcctttgctcacagctccatccatgtctagaccttcaggccagtctgcagatgaggttccctacctttttcttctcttcattgaccaaatcaaccaatcactacagctgctctgcttctgctttccaaagtagcccaggtcctgggccagatgcaggggaggtgcctatccatgagtgaaggccagtgtcttcctcacctgggtgggtcccacacttgtgacctcagttttaggaccaagatctgtgttggtttcttagattgctagcttttcctccaggggaccacagcaggtgaagctcaagagcgcatggctctgctaatagtaaattgttttcagggccttgtccagctgagagcttcatgtccaccagattctgagaggtgtcagcagcactttttttttttatttgttgtttgttttccatgaggttatcggaccatgggctgagctcaggcactttctgtaggagactgttatttctgtaaagatggttatttaaccctcctccaccccatcacggtggccctgagggctgacccggaggccagtggagctgcctggtgtccacgggggagggccaaggcctgctgagctgattctccagctgctgccccagcctttccgccttgcacagcacagaggtggtcaccccagggacagccaggcacctgctcctcttgcccttcctgggggaagggagctgccttctgtccctgtaactgctttccttatggcccagcccggccactcagacttgtttgaagctgcactggcagcttttttgtctcctttgggtattcacaacagccagggacttgattttgatgtattttaaaccacattaaataaagagtctgttgccttacttgtttctctcctgacctgtgtattcctt

SEQ ID NO: 425488 - DNA, 3837 bp, Homo sapiens
agtagagacggggtttcaccatgttggccaggctggtctcgaactcttggcctcaagtgatctgcccgccttggcctcccaaagtgctgggattataggcgtgagccaccatgcctggccccttaccattccttgttattggtggtggacacctctgacttcctggtggtgaggtggcacagagggcattgactgcatcctgtaatgccttgcgccttgggatcaatcattccccaccttggagacacaggtgcagtccccaccttggagacacagaccttggagaggccagctctgaccatttccttctgtctgtcacataacctagatgactaagaagatcaagaagctggagaaagaaaccaccatgtaccggtcccggtgggagagcagcaacaaggccctgcttgagatggctgaggagaaaacagtccgggataaagaactggagggcctgcaggtaaaaatccaacggctggagaagctgtgccgggcactgcagacagagcgcaatgacctgaacaagagggtacaggacctgagtgctggtggccagggctccctcactgacagtggccctgagaggaggccagaggggcctggggctcaagcacccagctcccccagggtcacagaagcgccttgctacccaggagcaccgagcacagaagcatcaggccagactgggcctcaagagcccacctccgccaggcctagagagcctggtgttgggtcatgctgggaagggagcggcagcccagccaggcctggcccataaaaggctcccatgctgagcagcccattgctgaagccaggatgttctgacctggctggcatctggcacttgcaattttggattttgtgggtcagttttacgtacatagggcattttgcaaggccttgcaaatgcatttatacctgtaagtgtacagtgggcttgcattggggatgggggtgtgtacagatgaagtcagtggcttgtctgtgagctgaagagtcttgagaggggctgtcatctgtagctgccatcacagtgagttggcagaagtgacttgagcatttctctgtctgatttgaggctcagacccctccctgcccttcagagctcaagacaagtaatacacccaggtcttgactgcatttgtcttgtgagcagggcttgcttggtcagctcaggccctcctagctgctctggaggctcctttgattctctagacctggaaaaggtgtccctaggcagagccctggcagggcgctcagagctggggatttcctgcctggaacaagggacctggagaatgtttttgcgtgggatgatgtgctggtcaggagccccttgggcatcgcttcccctgccctttggtagtgccaggaccaggccaatgatgcttctcagtagccttatcattcacaggtgcctctctagcctgcacaaatgattgacaagagatcacccaaaggattatttctgaaggtgtttttttctttatttctttttctttttttttttttttctttttcttttttttttgcacatgacagtgtttgtattgaggaccttccaaggaagagggatgctgtagcagtggtgcctgggtgcctggcctccagtgtcccacctccttcaccaccccacttggctcctttgccatcttgatgctgaggtttcctgtttggtgagatcaggttgtttgtggtaaaagaaaggaaagggcttctgatggctttgccacaagcttacctgtgggtttcagtcctgagaggccaccaccagttcccatcagcactgtctccatgcagcagttgctgggtcccatgtccagctgcctctttggcttcatgggtttttctgcttcctgcccccacccccacatgtgcaatcctcaagatttgtcctgattctatttcctggcacctccctgcctgtccttggggattctacttcttcctgtgtgggagcccatagctgttgtctaacaggtaagaaatgaaattgaactattgactgggccccagaaatccataaaatggctgcagacagttgtttctgtgtcctgttctacccccactccagtacataactactatgtactgtgtagagccattctatatgctgaatgttctgctgttgcaaacttgccagggtattagccagtgtttgtgccaagcagttttctgggacaacagaatgactcagaccaagatggataggatggttagggctttgcttcttgctgtttttctttgaagctagttcattgtcctgcaggtcccttcatcttccatacctagcccactcttttagcccttaccttaaatctctcagataagttggttcacaaagaatgttaagtactgaatcatgtgtgactgagaccagagatggcaaatgaatggcacaccatttctccttctcctgccccagggcaggtaccactgatctgcatcagagttgcctgctattctctggtgtatccttcacatctaggtgccctcaagcagctgtgtgagtgttgagatctctgccatctctggctgagatactgctgtcctgtgaagtgtttcccatgacctttttcttcccctttgaatccctctgtctggagtagtccttgcctcttcctgctccagtagggccttttccctaccccagcccctgtgccaggctaagctggtacaagagctgccaacctcacagagtgtttgctaggcgagagaggtgcagggaagaggcagaggtatgcaccttcccccttgaagagaggggaaaggcctacagtggcccacataattgcctgactcacacttcagctacctcttaatgcctgtggagggactggagctgctggatcccagtgtggtggtgtaggaggccacagtgagcaggtggccccagctgggtttcccaggtcaggaatgtgggccccaggcaaggtgcagcctttgctcacagctccatccatgtctagaccttcaggccagtctgcagatgaggttccctacctttttcttctcttcattgaccaaatcaaccaatcactacagctgctctgcttctgctttccaaagtagcccaggtcctgggccagatgcaggggaggtgcctatccatgagtgaaggccagtgtcttcctcacctgggtgggtcccacacttgtgacctcagttttaggaccaagatctgtgttggtttcttagattgctagcttttcctccaggggaccacagcaggtgaagctcaagagcgcatggctctgctaatagtaaattgttttcagggccttgtccagctgagagcttcatgtccaccagattctgagaggtgtcagcagcactttttttttttatttgttgtttgttttccatgaggttatcggaccatgggctgagctcaggcactttctgtaggagactgttatttctgtaaagatggttatttaaccctcctccaccccatcacggtggccctgagggctgacccggaggccagtggagctgcctggtgtccacgggggagggccaaggcctgctgagctgattctccagctgctgccccagcctttccgccttgcacagcacagaggtggtcaccccagggacagccaggcacctgctcctcttgcccttcctgggggaagggagctgccttctgtccctgtaactgctttccttatggcccagcccggccactcagacttgtttgaagctgcactggcagcttttttgtctcctttgggtattcacaacagccagggacttgattttgatgtattttaaaccacattaaataaagagtctgttgccttacttgtttctctcctgacctgtgtattcctt

SEQ ID NO: 425489 - DNA, 3232 bp, Homo sapiens
tgtggtgatctagaggtccctaggtcacagaagcgccttgctacccaggagcaccgagcacagaagcatcaggccagactgggcctcaagagcccacctccgccaggcctagagagcctggtgttgggtcatgctgggaagggagcggcagcccagccaggcctggcccataaaaggctcccatgctgagcagcccattgctgaagccaggatgttctgacctggctggcatctggcacttgcaattttggattttgtgggtcagttttacgtacatagggcattttgcaaggccttgcaaatgcatttatacctgtaagtgtacagtgggcttgcattggggatgggggtgtgtacagatgaagtcagtggcttgtctgtgagctgaagagtcttgagaggggctgtcatctgtagctgccatcacagtgagttggcagaagtgacttgagcatttctctgtctgatttgaggctcagacccctccctgcccttcagagctcaagacaagtaatacacccaggtcttgactgcatttgtcttgtgagcagggcttgcttggtcagctcaggccctcctagctgctctggaggctcctttgattctctagacctggaaaaggtgtccctaggcagagccctggcagggcgctcagagctggggatttcctgcctggaacaagggacctggagaatgtttttgcgtgggatgatgtgctggtcaggagccccttgggcatcgcttcccctgccctttggtagtgccaggaccaggccaatgatgcttctcagtagccttatcattcacaggtgcctctctagcctgcacaaatgattgacaagagatcacccaaaggattatttctgaaggtgtttttttctttatttctttttctttttttttttttttctttttcttttttttttgcacatgacagtgtttgtattgaggaccttccaaggaagagggatgctgtagcagtggtgcctgggtgcctggcctccagtgtcccacctccttcaccaccccacttggctcctttgccatcttgatgctgaggtttcctgtttggtgagatcaggttgtttgtggtaaaagaaaggaaagggcttctgatggctttgccacaagcttacctgtgggtttcagtcctgagaggccaccaccagttcccatcagcactgtctccatgcagcagttgctgggtcccatgtccagctgcctctttggcttcatgggtttttctgcttcctgcccccacccccacatgtgcaatcctcaagatttgtcctgattctatttcctggcacctccctgcctgtccttggggattctacttcttcctgtgtgggagcccatagctgttgtctaacaggtaagaaatgaaattgaactattgactgggccccagaaatccataaaatggctgcagacagttgtttctgtgtcctgttctacccccactccagtacataactactatgtactgtgtagagccattctatatgctgaatgttctgctgttgcaaacttgccagggtattagccagtgtttgtgccaagcagttttctgggacaacagaatgactcagaccaagatggataggatggttagggctttgcttcttgctgtttttctttgaagctagttcattgtcctgcaggtcccttcatcttccatacctagcccactcttttagcccttaccttaaatctctcagataagttggttcacaaagaatgttaagtactgaatcatgtgtgactgagaccagagatggcaaatgaatggcacaccatttctccttctcctgccccagggcaggtaccactgatctgcatcagagttgcctgctattctctggtgtatccttcacatctaggtgccctcaagcagctgtgtgagtgttgagatctctgccatctctggctgagatactgctgtcctgtgaagtgtttcccatgacctttttcttcccctttgaatccctctgtctggagtagtccttgcctcttcctgctccagtagggccttttccctaccccagcccctgtgccaggctaagctggtacaagagctgccaacctcacagagtgtttgctaggcgagagaggtgcagggaagaggcagaggtatgcaccttcccccttgaagagaggggaaaggcctacagtggcccacataattgcctgactcacacttcagctacctcttaatgcctgtggagggactggagctgctggatcccagtgtggtggtgtaggaggccacagtgagcaggtggccccagctgggtttcccaggtcaggaatgtgggccccaggcaaggtgcagcctttgctcacagctccatccatgtctagaccttcaggccagtctgcagatgaggttccctacctttttcttctcttcattgaccaaatcaaccaatcactacagctgctctgcttctgctttccaaagtagcccaggtcctgggccagatgcaggggaggtgcctatccatgagtgaaggccagtgtcttcctcacctgggtgggtcccacacttgtgacctcagttttaggaccaagatctgtgttggtttcttagattgctagcttttcctccaggggaccacagcaggtgaagctcaagagcgcatggctctgctaatagtaaattgttttcagggccttgtccagctgagagcttcatgtccaccagattctgagaggtgtcagcagcactttttttttttatttgttgtttgttttccatgaggttatcggaccatgggctgagctcaggcactttctgtaggagactgttatttctgtaaagatggttatttaaccctcctccaccccatcacggtggccctgagggctgacccggaggccagtggagctgcctggtgtccacgggggagggccaaggcctgctgagctgattctccagctgctgccccagcctttccgccttgcacagcacagaggtggtcaccccagggacagccaggcacctgctcctcttgcccttcctgggggaagggagctgccttctgtccctgtaactgctttccttatggcccagcccggccactcagacttgtttgaagctgcactggcagcttttttgtctcctttgggtattcacaacagccagggacttgattttgatgtattttaaaccacattaaataaagagtctgttgccttacttgtttctctcctgacctgtgtattcctt

SEQ ID NO: 425490 - DNA, 4691 bp, Homo sapiens
ccatcggacgtcggcggtgaggatcttctcctgacccagcatcgctcatcacaatgaagaaccaagacaaaaagaacggggctgccaaacaatccaatccaaaaagcagcccaggacaaccggaagcaggacccgagggagcccaggagcggcccagccaggcggctcctgcagtagaagcagaaggtcccggcagcagccaggctcctcggaagccggagggggctcaagccagaacggctcagtctggggcccttcgtgatgtctctgaggagctgagccgccaactggaagacatactgagcacatactgtgtggacaataaccaggggggccccggcgaggatggggcacagggtgagccggctgaacccgaagatgcagagaagtcccggacctatgtggcaaggaatggggagcctgaaccaactccagtagtcaatggagagaaggaaccctccaagggggatccaaacacagaagagatccggcagagtgacgaggtcggagacggagaccatcgaaggccacaggagaagaaaaaagccaagggtttggggaaggagatcacgttgctgatgcagacattgaatactctgagtaccccagaggagaagctggctgctctgtgcaagaagtatgctgaactgctggaggagcaccggaattcacagaagcagatgaagctcctacagaaaaagcagagccagctggtgcaagagaaggaccacctgcgcggtgagcacagcaaggccgtcctggcccgcagcaagcttgagagcctatgccgtgagctgcagcggcacaaccgctccctcaaggaagaaggtgtgcagcgggcccgggaggaggaggagaagcgcaaggaggtgacctcgcacttccaggtgacactgaatgacattcagctgcagatggaacagcacaatgagcgcaactccaagctgcgccaagagaacatggagctggctgagaggctcaagaagctgattgagcagtatgagctgcgcgaggagcatatcgacaaagtcttcaaacacaaggacctacaacagcagctggtggatgccaagctccagcaggcccaggagatgctaaaggaggcagaagagcggcaccagcgggagaaggattttctcctgaaagaggcagtagagtcccagaggatgtgtgagctgatgaagcagcaagagacccacctgaagcaacagcttgccctatacacagagaagtttgaggagttccagaacacactttccaaaagcagcgaggtattcaccacattcaagcaggagatggaaaagatgactaagaagatcaagaagctggagaaagaaaccaccatgtaccggtcccggtgggagagcagcaacaaggccctgcttgagatggctgaggagaaaacagtccgggataaagaactggagggcctgcaggtaaaaatccaacggctggagaagctgtgccgggcactgcagacagagcgcaatgacctgaacaagagggtacaggacctgagtgctggtggccagggctccctcactgacagtggccctgagaggaggccagaggggcctggggctcaagcacccagctcccccagggtcacagaagcgccttgctacccaggagcaccgagcacagaagcatcaggccagactgggcctcaagagcccacctccgccaggcctagagagcctggtgttgggtcatgctgggaagggagcggcagcccagccaggcctggcccataaaaggctcccatgctgagcagcccattgctgaagccaggatgttctgacctggctggcatctggcacttgcaattttggattttgtgggtcagttttacgtacatagggcattttgcaaggccttgcaaatgcatttatacctgtaagtgtacagtgggcttgcattggggatgggggtgtgtacagatgaagtcagtggcttgtctgtgagctgaagagtcttgagaggggctgtcatctgtagctgccatcacagtgagttggcagaagtgacttgagcatttctctgtctgatttgaggctcagacccctccctgcccttcagagctcaagacaagtaatacacccaggtcttgactgcatttgtcttgtgagcagggcttgcttggtcagctcaggccctcctagctgctctggaggctcctttgattctctagacctggaaaaggtgtccctaggcagagccctggcagggcgctcagagctggggatttcctgcctggaacaagggacctggagaatgtttttgcgtgggatgatgtgctggtcaggagccccttgggcatcgcttcccctgccctttggtagtgccaggaccaggccaatgatgcttctcagtagccttatcattcacaggtgcctctctagcctgcacaaatgattgacaagagatcacccaaaggattatttctgaaggtgtttttttctttatttctttttctttttttttttttttctttttcttttttttttgcacatgacagtgtttgtattgaggaccttccaaggaagagggatgctgtagcagtggtgcctgggtgcctggcctccagtgtcccacctccttcaccaccccacttggctcctttgccatcttgatgctgaggtttcctgtttggtgagatcaggttgtttgtggtaaaagaaaggaaagggcttctgatggctttgccacaagcttacctgtgggtttcagtcctgagaggccaccaccagttcccatcagcactgtctccatgcagcagttgctgggtcccatgtccagctgcctctttggcttcatgggtttttctgcttcctgcccccacccccacatgtgcaatcctcaagatttgtcctgattctatttcctggcacctccctgcctgtccttggggattctacttcttcctgtgtgggagcccatagctgttgtctaacaggtaagaaatgaaattgaactattgactgggccccagaaatccataaaatggctgcagacagttgtttctgtgtcctgttctacccccactccagtacataactactatgtactgtgtagagccattctatatgctgaatgttctgctgttgcaaacttgccagggtattagccagtgtttgtgccaagcagttttctgggacaacagaatgactcagaccaagatggataggatggttagggctttgcttcttgctgtttttctttgaagctagttcattgtcctgcaggtcccttcatcttccatacctagcccactcttttagcccttaccttaaatctctcagataagttggttcacaaagaatgttaagtactgaatcatgtgtgactgagaccagagatggcaaatgaatggcacaccatttctccttctcctgccccagggcaggtaccactgatctgcatcagagttgcctgctattctctggtgtatccttcacatctaggtgccctcaagcagctgtgtgagtgttgagatctctgccatctctggctgagatactgctgtcctgtgaagtgtttcccatgacctttttcttcccctttgaatccctctgtctggagtagtccttgcctcttcctgctccagtagggccttttccctaccccagcccctgtgccaggctaagctggtacaagagctgccaacctcacagagtgtttgctaggcgagagaggtgcagggaagaggcagaggtatgcaccttcccccttgaagagaggggaaaggcctacagtggcccacataattgcctgactcacacttcagctacctcttaatgcctgtggagggactggagctgctggatcccagtgtggtggtgtaggaggccacagtgagcaggtggccccagctgggtttcccaggtcaggaatgtgggccccaggcaaggtgcagcctttgctcacagctccatccatgtctagaccttcaggccagtctgcagatgaggttccctacctttttcttctcttcattgaccaaatcaaccaatcactacagctgctctgcttctgctttccaaagtagcccaggtcctgggccagatgcaggggaggtgcctatccatgagtgaaggccagtgtcttcctcacctgggtgggtcccacacttgtgacctcagttttaggaccaagatctgtgttggtttcttagattgctagcttttcctccaggggaccacagcaggtgaagctcaagagcgcatggctctgctaatagtaaattgttttcagggccttgtccagctgagagcttcatgtccaccagattctgctctgtgcaagaagtatgctgaactgctggaggagcaccggaattcacagaagcagatgaagctcctacagaaaaagcagagccagctggtgcaagagaaggaccactgctgccccagcctttccgccttgcacagcacagaggtggtcaccccagggacagccaggcacctgctcctcttgcccttcctgggggaagggagctgccttctgtccctgtaactgctttccttatggcccagcccggccactcagacttgtttgaagctgcactggcagcttttttgtctcctttgggtattcacaacagccagggacttgattttgatgtattttaaaccacattaaataaagagtctgttgccttacttgtttctctcctgacctgtgtattcctt

SEQ ID NO: 425491 - DNA, 958 bp, Homo sapiens
tagaactcgagcttgtaccgcggattgtgtccgcggaatgtgggccccaggcaaggtgcagcctttgctcacagctccatccatgtctagaccttcaggccagtctgcagatgaggttccctacctttttcttctcttcattgaccaaatcaaccaatcactacagctgctctgcttctgctttccaaagtagcccaggtcctgggccagatgcaggggaggtgcctatccatgagtgaaggccagtgtcttcctcacctgggtgggtcccacacttgtgacctcagttttaggaccaagatctgtgttggtttcttagattgctagcttttcctccaggggaccacagcaggtgaagctcaagagcgcatggctctgctaatagtaaattgttttcagggccttgtccagctgagagcttcatgtccaccagattctgagaggtgtcagcagcactttttttttttatttgttgtttgttttccatgaggttatcggaccatgggctgagctcaggcactttctgtaggagactgttatttctgtaaagatggttatttaaccctcctccaccccatcacggtggccctgagggctgacccggaggccagtggagctgcctggtgtccacgggggagggccaaggcctgctgagctgattctccagctgctgccccagcctttccgccttgcacagcacagaggtggtcaccccagggacagccaggcacctgctcctcttgcccttcctgggggaagggagctgccttctgtccctgtaactgctttccttatggcccagcccggccactcagacttgtttgaagctgcactggcagcttttttgtctcctttgggtattcacaacagccagggacttgattttgatgtattttaaaccacattaaataaagagtctgttgccttacttgtttctctcctgacctgtgtattcctt

SEQ ID NO: 425492 - DNA, 3383 bp, Homo sapiens
ccatcggacgtcggcggtgaggatcttctcctgacccagcatcgctcatcacaatgaagaaccaagacaaaaagaacggggctgccaaacaatccaatccaaaaagcagcccaggacaaccggaagcaggacccgagggagcccaggagcggcccagccaggcggctcctgcagtagaagcagaaggtcccggcagcagccaggctcctcggaagccggagggggctcaagccagaacggctcagtctggggcccttcgtgatgtctctgaggagctgagccgccaactggaagacatactgagcacatactgtgtggacaataaccaggggggccccggcgaggatggggcacagggtgagccggctgaacccgaagatgcagagaagtcccggacctatgtggcaaggaatggggagcctgaaccaactccagtagtcaatggagagaaggaaccctccaagggggatccaaacacagaagagatccggcagagtgacgaggtcggagacggagaccatcgaaggccacaggagaagaaaaaagccaagggtttggggaaggagatcacgttgctgatgcagacattgaatactctgagtaccccagaggagaagctggctgctctgtgcaagaagtatgctgaactgctggaggagcaccggaattcacagaagcagatgaagctcctacagaaaaagcagagccagctggtgcaagagaaggaccacctgcgcggtgagcacagcaaggccgtcctggcccgcagcaagcttgagagcctatgccgtgagctgcagcggcacaaccgctccctcaaggaagaaggtgtgcagcgggcccgggaggaggaggagaagcgcaaggaggtgacctcgcacttccaggtgacactgaatgacattcagctgcagatggaacagcacaatgagcgcaactccaagctgcgccaagagaacatggagctggctgagaggctcaagaagctgattgagcagtatgagctgcgcgaggagcatatcgacaaagtcttcaaacacaaggacctacaacagcagctggtggatgccaagctccagcaggcccaggagatgctaaaggaggcagaagagcggcaccagcgggagaaggattttctcctgaaagaggcagtagagtcccagaggatgtgtgagctgatgaagcagcaagagacccacctgaagcaacagcttgccctatacacagagaagtttgaggagttccagaacacactttccaaaagcagcgaggtattcaccacattcaagcaggagatggaaaagatgactaagaagatcaagaagctggagaaagaaaccaccatgtaccggtcccggtgggagagcagcaacaaggccctgcttgagatggctgaggagaaaacagtccgggataaagaactggagggcctgcaggtaaaaatccaacggctggagaagctgtgccgggcactgcagacagagcgcaatgacctgaacaagagggtacaggacctgagtgctggtggccagggctccctcactgacagtggccctgagaggaggccagaggggcctggggctcaagcacccagctcccccagggtcacagaagcgccttgctacccaggagcaccgagcacagaagcatcaggccagactgggcctcaagagcccacctccgccaggcctagagagcctggtgttgggtcatgctgggaagggagcggcagcccagccaggcctggcccataaaaggctcccatgctgagcagcccattgctgaagccaggatgttctgacctggctggcatctggcacttgcaattttggattttgtgggtcagttttacgtacatagggcattttgcaaggccttgcaaatgcatttatacctgtaagtgtacagtgggcttgcattggggatgggggtgtgtacagatgaagtcagtggcttgtctgtgagctgaagagtcttgagaggggctgtcatctgtagctgccatcacagtgagttggcagaagtgacttgagcatttctctgtctgatttgaggctcagacccctccctgcccttcagagctcaagacaagtaatacacccaggtcttgactgcatttgtcttgtgagcagggcttgcttggtcagctcaggccctcctagctgctctggaggctcctttgattctctagacctggaaaaggtgtccctaggcagagccctggcagggcgctcagagctggggatttcctgcctggaacaagggacctggagaatgtttttgcgtgggatgatgtgctggtcaggagccccttgggcatcgcttcccctgccctttggtagtgccaggaccaggccaatgatgcttctcagtagccttatcattcacaggtgcctctctagcctgcacaaatgattgacaagagatcacccaaaggattatttctgaaggtgtttttttctttatttctttttctttttttttttttttctttttcttttttttttgcacatgacagtgtttgtattgaggaccttccaaggaagagggatgctgtagcagtggtgcctgggtgcctggcctccagtgtcccacctccttcaccaccccacttggctcctttgccatcttgatgctgaggtttcctgtttggtgagatcaggttgtttgtggtaaaagaaaggaaagggcttctgatggctttgccacaagcttacctgtgggtttcagtcctgagaggccaccaccagttcccatcagcactgtctccatgcagcagttgctgggtcccatgtccagctgcctctttggcttcatgggtttttctgcttcctgcccccacccccacatgtgcaatcctcaagatttgtcctgattctatttcctggcacctccctgcctgtccttggggattctacttcttcctgtgtgggagcccatagctgttgtctaacaggtaagaaatgaaattgaactattgactgggccccagaaatccataaaatggctgcagacagttgtttctgtgtcctgttctacccccactccagtacataactactatgtactgtgtagagccattctatatgctgaatgttctgctgttgcaaacttgccagggtattagccagtgtttgtgccaagcagttttctgggacaacagaatgactcagaccatcgaaggccacaggagaagaaaaaagccaagggtttggggaaggagatcacgttgctgatcagacttgtttgaagctgcactggcagcttttttgtctcctttgggtattcacaacagccagggacttgattttgatgtattttaaaccacattaaataaagagtctgttgccttacttgtttctctcctgacctgtgtattcctt

SEQ ID NO: 425493 - DNA, 1605 bp, Homo sapiens
ccatcggacgtcggcggtgaggatcttctcctgacccagcatcgctcatcacaatgaagaaccaagacaaaaagaacggggctgccaaacaatccaatccaaaaagcagcccaggacaaccggaagcaggacccgagggagcccaggagcggcccagccaggcggctcctgcagtagaagcagaaggtcccggcagcagccaggctcctcggaagccggagggggctcaagccagaacggctcagtctggggcccttcgtgatgtctctgaggagctgagccgccaactggaagacatactgagcacatactgtgtggacaataaccaggggggccccggcgaggatggggcacagggtgagccggctgaacccgaagatgcagagaagtcccggacctatgtggcaaggaatggggagcctgaaccaactccagtagtcaatggagagaaggaaccctccaagggggatccaaacacagaagagatccggcagagtgacgaggtcggagacggagaccatcgaaggccacaggagaagaaaaaagccaagggtttggggaaggagatcacgttgctgatgcagacattgaatactctgagtaccccagaggagaagctggctgctctgtgcaagaagtatgctgaactgctggaggagcaccggaattcacagaagcagatgaagctcctacagaaaaagcagagccagctggtgcaagagaaggaccacctgcgcggtgagcacagcaaggccgtcctggcccgcagcaagcttgagagcctatgccgtgagctgcagcggcacaaccgctccctcaaggaagaaggtgtgcagcgggcccgggaggaggaggagaagcgcaaggaggtgacctcgcacttccaggtgacactgaatgacattcagctgcagatggaacagcacaatgagcgcaactccaagctgcgccaagagaacatggagctggctgagaggctcaagaagctgattgagcagtatgagctgcgcgaggagcatatcgacaaagtcttcaaacacaaggacctacaacagcagctggtggatgccaagctccagcaggcccaggagatgctaaaggaggcagaagagcggcaccagcgggagaaggattttctcctgaaagaggcagtagagtcccagaggatgtgtgagctgatgaagcagcaagagacccacctgaagcaacagcttgccctatacacagagaagtttgaggagttccagaacacactttccaaaagcagcgaggtattcaccacattcaagcaggagatggaaaaggtaactgtggtccaggccaggcatggctgctggggcataagctgcttcattcaaaattgttgggcctgccttcaggaagctcccatctggggtgtctcaagggcagggctgttaggaaggttcacagcctttcccctcttgaggcagtatcagtggtatgtatacactccaggttgtcccagggaatggggcagtcttttttgtttgtttggtttttttggggggtttgttgttgttgttgttgttgttgttgtttgagatggagactctagcctgggtgatatgccgaggctccatctca

SEQ ID NO: 425494 - DNA, 388 bp, Homo sapiens
gcaccggaattcacagaagcagatgaagctcctacagaaaaagcagagccagctggtgcaagagaaggaccacctgcgcggtgagcacagcaaggccgtcctggcccgcagcaagcttgagagcctatgccgtgagctgcagcggcacaaccgctccctcaaggtaggcctgggccccctggaacaggtgactctggtttccttgacttccacttaatgtttctttcatgggctttcctcttaaaaagtagtgcaggctagggccaggcgcagtggcacacataagtgattaaaaatcttctggccactaaaaaacagaaattaattttagtaatatacttaacccaatatccaaaacattacaatttcaacatgaaatcagtgtaaa

SEQ ID NO: 425495 - DNA, 600 bp, Homo sapiens
gattcaggcacagaggcggcggtgaggatcttctcctgacccagcatcgctcatcacaatgaagaaccaagacaaaaagaacggggctgccaaacaatccaatccaaaaagcagcccaggacaaccggaagcaggacccgagggagcccaggagcggcccagccaggcggctcctgcagtagaagcagaaggtcccggcagcagccaggctcctcggaagccggagggggctcaagccagaacggctcagtctggggcccttcgtgatgtctctgaggagctgagccgccaactggaagacatactgagctgctgccccagcctttccgccttgcacagcacagaggtggtcaccccagggacagccaggcacctgctcctcttgcccttcctgggggaagggagctgccttctgtccctgtaactgctttccttatggcccagcccggccactcagacttgtttgaagctgcactggcagcttttttgtctcctttgggtattcacaacagccagggacttgattttgatgtattttaaaccacattaaataaagagtctgttgccttacttgtttctctcctgacctgtgtattcctt

SEQ ID NO: 425496 - DNA, 4293 bp, Homo sapiens
tcccagatcctctttccatcaggattcaaaggaaaacgggaaggagatcacgttgctgatgcagacattgaatactctgagtaccccagaggagaagctggctgctctgtgcaagaagtatgctgaactgctggaggagcaccggaattcacagaagcagatgaagctcctacagaaaaagcagagccagctggtgcaagagaaggaccacctgcgcggtgagcacagcaaggccgtcctggcccgcagcaagcttgagagcctatgccgtgagctgcagcggcacaaccgctccctcaaggaagaaggtgtgcagcgggcccgggaggaggaggagaagcgcaaggaggtgacctcgcacttccaggtgacactgaatgacattcagctgcagatggaacagcacaatgagcgcaactccaagctgcgccaagagaacatggagctggctgagaggctcaagaagctgattgagcagtatgagctgcgcgaggagcatatcgacaaagtcttcaaacacaaggacctacaacagcagctggtggatgccaagctccagcaggcccaggagatgctaaaggaggcagaagagcggcaccagcgggagaaggattttctcctgaaagaggcagtagagtcccagaggatgtgtgagctgatgaagcagcaagagacccacctgaagcaacagcttgccctatacacagagaagtttgaggagttccagaacacactttccaaaagcagcgaggtattcaccacattcaagcaggagatggaaaagatgactaagaagatcaagaagctggagaaagaaaccaccatgtaccggtcccggtgggagagcagcaacaaggccctgcttgagatggctgaggagaaaacagtccgggataaagaactggagggcctgcaggtaaaaatccaacggctggagaagctgtgccgggcactgcagacagagcgcaatgacctgaacaagagggtacaggacctgagtgctggtggccagggctccctcactgacagtggccctgagaggaggccagaggggcctggggctcaagcacccagctcccccagggtcacagaagcgccttgctacccaggagcaccgagcacagaagcatcaggccagactgggcctcaagagcccacctccgccaggcctagagagcctggtgttgggtcatgctgggaagggagcggcagcccagccaggcctggcccataaaaggctcccatgctgagcagcccattgctgaagccaggatgttctgacctggctggcatctggcacttgcaattttggattttgtgggtcagttttacgtacatagggcattttgcaaggccttgcaaatgcatttatacctgtaagtgtacagtgggcttgcattggggatgggggtgtgtacagatgaagtcagtggcttgtctgtgagctgaagagtcttgagaggggctgtcatctgtagctgccatcacagtgagttggcagaagtgacttgagcatttctctgtctgatttgaggctcagacccctccctgcccttcagagctcaagacaagtaatacacccaggtcttgactgcatttgtcttgtgagcagggcttgcttggtcagctcaggccctcctagctgctctggaggctcctttgattctctagacctggaaaaggtgtccctaggcagagccctggcagggcgctcagagctggggatttcctgcctggaacaagggacctggagaatgtttttgcgtgggatgatgtgctggtcaggagccccttgggcatcgcttcccctgccctttggtagtgccaggaccaggccaatgatgcttctcagtagccttatcattcacaggtgcctctctagcctgcacaaatgattgacaagagatcacccaaaggattatttctgaaggtgtttttttctttatttctttttctttttttttttttttctttttcttttttttttgcacatgacagtgtttgtattgaggaccttccaaggaagagggatgctgtagcagtggtgcctgggtgcctggcctccagtgtcccacctccttcaccaccccacttggctcctttgccatcttgatgctgaggtttcctgtttggtgagatcaggttgtttgtggtaaaagaaaggaaagggcttctgatggctttgccacaagcttacctgtgggtttcagtcctgagaggccaccaccagttcccatcagcactgtctccatgcagcagttgctgggtcccatgtccagctgcctctttggcttcatgggtttttctgcttcctgcccccacccccacatgtgcaatcctcaagatttgtcctgattctatttcctggcacctccctgcctgtccttggggattctacttcttcctgtgtgggagcccatagctgttgtctaacaggtaagaaatgaaattgaactattgactgggccccagaaatccataaaatggctgcagacagttgtttctgtgtcctgttctacccccactccagtacataactactatgtactgtgtagagccattctatatgctgaatgttctgctgttgcaaacttgccagggtattagccagtgtttgtgccaagcagttttctgggacaacagaatgactcagaccaagatggataggatggttagggctttgcttcttgctgtttttctttgaagctagttcattgtcctgcaggtcccttcatcttccatacctagcccactcttttagcccttaccttaaatctctcagataagttggttcacaaagaatgttaagtactgaatcatgtgtgactgagaccagagatggcaaatgaatggcacaccatttctccttctcctgccccagggcaggtaccactgatctgcatcagagttgcctgctattctctggtgtatccttcacatctaggtgccctcaagcagctgtgtgagtgttgagatctctgccatctctggctgagatactgctgtcctgtgaagtgtttcccatgacctttttcttcccctttgaatccctctgtctggagtagtccttgcctcttcctgctccagtagggccttttccctaccccagcccctgtgccaggctaagctggtacaagagctgccaacctcacagagtgtttgctaggcgagagaggtgcagggaagaggcagaggtatgcaccttcccccttgaagagaggggaaaggcctacagtggcccacataattgcctgactcacacttcagctacctcttaatgcctgtggagggactggagctgctggatcccagtgtggtggtgtaggaggccacagtgagcaggtggccccagctgggtttcccaggtcaggaatgtgggccccaggcaaggtgcagcctttgctcacagctccatccatgtctagaccttcaggccagtctgcagatgaggttccctacctttttcttctcttcattgaccaaatcaaccaatcactacagctgctctgcttctgctttccaaagtagcccaggtcctgggccagatgcaggggaggtgcctatccatgagtgaaggccagtgtcttcctcacctgggtgggtcccacacttgtgacctcagttttaggaccaagatctgtgttggtttcttagattgctagcttttcctccaggggaccacagcaggtgaagctcaagagcgcatggctctgctaatagtaaattgttttcagggccttgtccagctgagagcttcatgtccaccagattctgagaggtgtcagcagcactttttttttttatttgttgtttgttttccatgaggttatcggaccatgggctgagctcaggcactttctgtaggagactgttatttctgtaaagatggttatttaaccctcctccaccccatcacggtggccctgagggctgacccggaggccagtggagctgcctggtgtccacgggggagggccaaggcctgctgagctgattctccagctgctgccccagcctttccgccttgcacagcacagaggtggtcaccccagggacagccaggcacctgctcctcttgcccttcctgggggaagggagctgccttctgtccctgtaactgctttccttatggcccagcccggccactcagacttgtttgaagctgcactggcagcttttttgtctcctttgggtattcacaacagccagggacttgattttgatgtattttaaaccacattaaataaagagtctgttgccttacttgtttctctcctgacctgtgtattcctt

SEQ ID NO: 425497 - DNA, 3595 bp, Homo sapiens
ccatcggacgtcggcggtgaggatcttctcctgacccagcatcgctcatcacaatgaagaaccaagacaaaaagaacggggctgccaaacaatccaatccaaaaagcagcccaggacaaccggaagcaggacccgagggagcccaggagcggcccagccaggcggctcctgcagtagaagcagaaggtcccggcagcagccaggctcctcggaagccggagggggctcaagccagaacggctcagtctggggcccttcgtgatgtctctgaggagctgagccgccaactggaagacatactgagcacatactgtgtggacaataaccaggggggccccggcgaggatggggcacagggtgagccggctgaacccgaagatgcagagaagtcccggacctatgtggcaaggaatggggagcctgaaccaactccagtagtcaatggagagaaggaaccctccaagggggatccaaacacagaagagatccggcagagtgacgaggtcggagacggagaccatcgaaggccacaggagaagaaaaaagccaagggtttggggaaggagatcacgttgctgatgcagacattgaatactctgagtaccccagaggagaagctggctgctctgtgcaagaagtatgctgaactgctggaggagcaccggaattcacagaagcagatgaagctcctacagaaaaagcagagccagctggtgcaagagaaggaccacctgcgcggtgagcacagcaaggccgtcctggcccgcagcaagcttgagagcctatgccgtgagctgcagcggcacaaccgctccctcaaggaagaaggtgtgcagcgggcccgggaggaggaggagaagcgcaaggaggtgacctcgcacttccaggtgacactgaatgacattcagctgcagatggaacagcacaatgagcgcaactccaagctgcgccaagagaacatggagctggctgagaggctcaagaagctgattgagcagtatgagctgcgcgaggagcatatcgacaaagtcttcaaacacaaggacctacaacagcagctggtggatgccaagctccagcaggcccaggagatgctaaaggaggcagaagagcggcaccagcgggagaaggattttgccaatgatgcttctcagtagccttatcattcacaggtgcctctctagcctgcacaaatgattgacaagagatcacccaaaggattatttctgaaggtgtttttttctttatttctttttctttttttttttttttctttttcttttttttttgcacatgacagtgtttgtattgaggaccttccaaggaagagggatgctgtagcagtggtgcctgggtgcctggcctccagtgtcccacctccttcaccaccccacttggctcctttgccatcttgatgctgaggtttcctgtttggtgagatcaggttgtttgtggtaaaagaaaggaaagggcttctgatggctttgccacaagcttacctgtgggtttcagtcctgagaggccaccaccagttcccatcagcactgtctccatgcagcagttgctgggtcccatgtccagctgcctctttggcttcatgggtttttctgcttcctgcccccacccccacatgtgcaatcctcaagatttgtcctgattctatttcctggcacctccctgcctgtccttggggattctacttcttcctgtgtgggagcccatagctgttgtctaacaggtaagaaatgaaattgaactattgactgggccccagaaatccataaaatggctgcagacagttgtttctgtgtcctgttctacccccactccagtacataactactatgtactgtgtagagccattctatatgctgaatgttctgctgttgcaaacttgccagggtattagccagtgtttgtgccaagcagttttctgggacaacagaatgactcagaccaagatggataggatggttagggctttgcttcttgctgtttttctttgaagctagttcattgtcctgcaggtcccttcatcttccatacctagcccactcttttagcccttaccttaaatctctcagataagttggttcacaaagaatgttaagtactgaatcatgtgtgactgagaccagagatggcaaatgaatggcacaccatttctccttctcctgccccagggcaggtaccactgatctgcatcagagttgcctgctattctctggtgtatccttcacatctaggtgccctcaagcagctgtgtgagtgttgagatctctgccatctctggctgagatactgctgtcctgtgaagtgtttcccatgacctttttcttcccctttgaatccctctgtctggagtagtccttgcctcttcctgctccagtagggccttttccctaccccagcccctgtgccaggctaagctggtacaagagctgccaacctcacagagtgtttgctaggcgagagaggtgcagggaagaggcagaggtatgcaccttcccccttgaagagaggggaaaggcctacagtggcccacataattgcctgactcacacttcagctacctcttaatgcctgtggagggactggagctgctggatcccagtgtggtggtgtaggaggccacagtgagcaggtggccccagctgggtttcccaggtcaggaatgtgggccccaggcaaggtgcagcctttgctcacagctccatccatgtctagaccttcaggccagtctgcagatgaggttccctacctttttcttctcttcattgaccaaatcaaccaatcactacagctgctctgcttctgctttccaaagtagcccaggtcctgggccagatgcaggggaggtgcctatccatgagtgaaggccagtgtcttcctcacctgggtgggtcccacacttgtgacctcagttttaggaccaagatctgtgttggtttcttagattgctagcttttcctccaggggaccacagcaggtgaagctcaagagcgcatggctctgctaatagtaaattgttttcagggccttgtccagctgagagcttcatgtccaccagattctgagaggtgtcagcagcactttttttttttatttgttgtttgttttccatgaggttatcggaccatgggctgagctcaggcactttctgtaggagactgttatttctgtaaagatggttatttaaccctcctccaccccatcacggtggccctgagggctgacccggaggccagtggagctgcctggtgtccacgggggagggccaaggcctgctgagctgattctccagctgctgccccagcctttccgccttgcacagcacagaggtggtcaccccagggacagccaggcacctgctcctcttgcccttcctgggggaagggagctgccttctgtccctgtaactgctttccttatggcccagcccggccactcagacttgtttgaagctgcactggcagcttttttgtctcctttgggtattcacaacagccagggacttgattttgatgtattttaaaccacattaaataaagagtctgttgccttacttgtttctctcctgacctgtgtattcctt

SEQ ID NO: 425498 - DNA, 3626 bp, Homo sapiens
cacacaaagaagccgcagcgtcggagagactccggaagaagcagctggctgaacaagaggaactggagcgacaaagtgaaggaactccaggccgccaacgaaagcaagcagcaggagctggaggccgtgcggaagaagctggagaaagaaaccaccatgtaccggtcccggtgggagagcagcaacaaggccctgcttgagatggctgaggagaaaacagtccgggataaagaactggagggcctgcaggtaaaaatccaacggctggagaagctgtgccgggcactgcagacagagcgcaatgacctgaacaagagggtacaggacctgagtgctggtggccagggctccctcactgacagtggccctgagaggaggccagaggggcctggggctcaagcacccagctcccccagggtcacagaagcgccttgctacccaggagcaccgagcacagaagcatcaggccagactgggcctcaagagcccacctccgccaggcctagagagcctggtgttgggtcatgctgggaagggagcggcagcccagccaggcctggcccataaaaggctcccatgctgagcagcccattgctgaagccaggatgttctgacctggctggcatctggcacttgcaattttggattttgtgggtcagttttacgtacatagggcattttgcaaggccttgcaaatgcatttatacctgtaagtgtacagtgggcttgcattggggatgggggtgtgtacagatgaagtcagtggcttgtctgtgagctgaagagtcttgagaggggctgtcatctgtagctgccatcacagtgagttggcagaagtgacttgagcatttctctgtctgatttgaggctcagacccctccctgcccttcagagctcaagacaagtaatacacccaggtcttgactgcatttgtcttgtgagcagggcttgcttggtcagctcaggccctcctagctgctctggaggctcctttgattctctagacctggaaaaggtgtccctaggcagagccctggcagggcgctcagagctggggatttcctgcctggaacaagggacctggagaatgtttttgcgtgggatgatgtgctggtcaggagccccttgggcatcgcttcccctgccctttggtagtgccaggaccaggccaatgatgcttctcagtagccttatcattcacaggtgcctctctagcctgcacaaatgattgacaagagatcacccaaaggattatttctgaaggtgtttttttctttatttctttttctttttttttttttttctttttcttttttttttgcacatgacagtgtttgtattgaggaccttccaaggaagagggatgctgtagcagtggtgcctgggtgcctggcctccagtgtcccacctccttcaccaccccacttggctcctttgccatcttgatgctgaggtttcctgtttggtgagatcaggttgtttgtggtaaaagaaaggaaagggcttctgatggctttgccacaagcttacctgtgggtttcagtcctgagaggccaccaccagttcccatcagcactgtctccatgcagcagttgctgggtcccatgtccagctgcctctttggcttcatgggtttttctgcttcctgcccccacccccacatgtgcaatcctcaagatttgtcctgattctatttcctggcacctccctgcctgtccttggggattctacttcttcctgtgtgggagcccatagctgttgtctaacaggtaagaaatgaaattgaactattgactgggccccagaaatccataaaatggctgcagacagttgtttctgtgtcctgttctacccccactccagtacataactactatgtactgtgtagagccattctatatgctgaatgttctgctgttgcaaacttgccagggtattagccagtgtttgtgccaagcagttttctgggacaacagaatgactcagaccaagatggataggatggttagggctttgcttcttgctgtttttctttgaagctagttcattgtcctgcaggtcccttcatcttccatacctagcccactcttttagcccttaccttaaatctctcagataagttggttcacaaagaatgttaagtactgaatcatgtgtgactgagaccagagatggcaaatgaatggcacaccatttctccttctcctgccccagggcaggtaccactgatctgcatcagagttgcctgctattctctggtgtatccttcacatctaggtgccctcaagcagctgtgtgagtgttgagatctctgccatctctggctgagatactgctgtcctgtgaagtgtttcccatgacctttttcttcccctttgaatccctctgtctggagtagtccttgcctcttcctgctccagtagggccttttccctaccccagcccctgtgccaggctaagctggtacaagagctgccaacctcacagagtgtttgctaggcgagagaggtgcagggaagaggcagaggtatgcaccttcccccttgaagagaggggaaaggcctacagtggcccacataattgcctgactcacacttcagctacctcttaatgcctgtggagggactggagctgctggatcccagtgtggtggtgtaggaggccacagtgagcaggtggccccagctgggtttcccaggtcaggaatgtgggccccaggcaaggtgcagcctttgctcacagctccatccatgtctagaccttcaggccagtctgcagatgaggttccctacctttttcttctcttcattgaccaaatcaaccaatcactacagctgctctgcttctgctttccaaagtagcccaggtcctgggccagatgcaggggaggtgcctatccatgagtgaaggccagtgtcttcctcacctgggtgggtcccacacttgtgacctcagttttaggaccaagatctgtgttggtttcttagattgctagcttttcctccaggggaccacagcaggtgaagctcaagagcgcatggctctgctaatagtaaattgttttcagggccttgtccagctgagagcttcatgtccaccagattctgagaggtgtcagcagcactttttttttttatttgttgtttgttttccatgaggttatcggaccatgggctgagctcaggcactttctgtaggagactgttatttctgtaaagatggttatttaaccctcctccaccccatcacggtggccctgagggctgacccggaggccagtggagctgcctggtgtccacgggggagggccaaggcctgctgagctgattctccagctgctgccccagcctttccgccttgcacagcacagaggtggtcaccccagggacagccaggcacctgctcctcttgcccttcctgggggaagggagctgccttctgtccctgtaactgctttccttatggcccagcccggccactcagacttgtttgaagctgcactggcagcttttttgtctcctttgggtattcacaacagccagggacttgattttgatgtattttaaaccacattaaataaagagtctgttgccttacttgtttctctcctgacctgtgtattcctt

SEQ ID NO: 425499 - DNA, 3503 bp, Homo sapiens
ccatcggacgtcggcggtgaggatcttctcctgacccagcatcgctcatcacaatgaagaaccaagacaaaaagaacggggctgccaaacaatccaatccaaaaagcagcccaggacaaccggaagcaggacccgagggagcccaggagcggcccagccaggcggctcctgcagtagaagcagaaggtcccggcagcagccaggctcctcggaagccggagggggctcaagccagaacggctcagtctggggcccttcgtgatgtctctgaggagctgagccgccaactggaagacatactgagcacatactgtgtggacaataaccaggggggccccggcgaggatggggcacagggtgagccggctgaacccgaagatgcagagaagtcccggacctatgtggcaaggaatggggagcctgaaccaactccagtagtcaatggagagaaggaaccctccaagggggatccaaacacagaagagatccggcagagtgacgaggtcggagacggagaccatcgaaggccacaggagaagaaaaaagccaagggtttggggaaggagatcacgttgctgatgcagacattgaatactctgagtaccccagaggagaagctggctgctctgtgcaagaagtatgctgaactgctggaggagcaccggaattcacagaagcagatgaagctcctacagaaaaagcagagccagctggtgcaagagaaggaccacctgcgcggtgagcacagcaaggccgtcctggcccgcagcaagcttgagagcctatgccgtgagctgcagcggcacaaccgctccctcaaggaagaaggtgtgcagcgggcccgggaggaggaggagaagcgcaaggaggtgacctcgcacttccaggtgacactgaatgacattcagctgcagatggaacagcacaatgagcgcaactccaagctgcgccaagagaacatggagctggctgagaggctcaagaagctgattgagcagtatgagctgcgcgaggagcatatcgacaaagtcttcaaacacaaggacctacaacagcagctggtggatgccaagctccagcaggcccaggagatgctaaaggaggcagaagagcggcaccagcgggagaaggattttctcctgaaagaggcagtagagtcccagaggatgtgtgagctgatgaagcagcaagagacccacctgaagcaacagcttgccctatacacagagaagtttgaggagttccagaacacactttccaaaagcagcgaggtattcaccacattcaagcaggagatggaaaagatgactaagaagatcaagaagctggagaaagaaaccaccatgtaccggtcccggtgggagagcagcaacaaggccctgcttgagatggctgaggagaaaacagtccgggataaagaactggagggcctgcaggtaaaaatccaacggctggagaagctgtgccgggcactgcagacagagcgcaatgacctgaacaagagggtacaggacctgagtgctggtggccagggctccctcactgacagtggccctgagaggaggccagaggggcctggggctcaagcacccagctcccccagggtcacagaagcgccttgctacccaggagcaccgagcacagaagcatcaggccagactgggcctcaagagcccacctccgccaggcctagagagcctggtgttgggtcatgctgggaagggagcggcagcccagccaggcctggcccataaaaggctcccatgctgagcagcccattgctgaagccaggatgttctgacctggctggcatctggcacttgcaattttggattttgtgggtcagttttacgtacatagggcattttgcaaggccttgcaaatgcatttatacctgtaagtgtacagtgggcttgcattggggatgggggtgtgtacagatgaagtcagtggcttgtctgtgagctgaagagtcttgagaggggctgtcatctgtagctgccatcacagtgagttggcagaagtgacttgagcatttctctgtctgatttgaggctcagacccctccctgcccttcagagctcaagacaagtaatacacccaggtcttgactgcatttgtcttgtgagcagggcttgcttggtcagctcaggccctcctagctgctctggaggctcctttgattctctagacctggaaaaggtgtccctaggcagagccctggcagggcgctcagagctggggatttcctgcctggaacaagggacctggagaatgtttttgcgtgggatgatgtgctggtcaggagccccttgggcatcgcttcccctgccctttggtagtgccaggaccaggccaatgatgcttctcagtagccttatcattcacaggtgcctctctagcctgcacaaatgattgacaagagatcacccaaaggattatttctgaaggtgtttttttctttatttctttttctttttttttttttttctttttcttttttttttgcacatgacagtgtttgtattgaggaccttccaaggaagagggatgctgtagcagtggtgcctgggtgcctggcctccagtgtcccacctccttcaccaccccacttggctcctttgccatcttgatgctgaggtttcctgtttggtgagatcaggttgtttgtggtaaaagaaaggaaagggcttctgatggctttgccacaagcttacctgtgggtttcagtcctgagaggccaccaccagttcccatcagcactgtctccatgcagcagttgctgggtcccatgtccagctgcctctttggcttcatgggtttttctgcttcctgcccccacccccacatgtgcaatcctcaagatttgtcctgattctatttcctggcacctccctgcctgtccttggggattctacttcttcctgtgtgggagcccatagctgttgtctaacaggtaagaaatgaaattgaactattgactgggccccagaaatccataaaatggctgcagacagttgtttctgtgtcctgttctacccccactccagtacataactactatgtactgtgtagagccattctatatgctgaatgttctgctgttgcaaacttgccagggtattagccagtgtttgtgccaagcagttttctgggacaacagaatgactcagaccaagatggataggatggttagggctttgcttcttgctgtttttctttgaagctagttcattgtcctgcaggtcccttcatcttccatacctagcccactcttttagcccttaccttaaatctctcagataagttggttcacaaagaatgttaagtactgaatcatgtgtgactgagaccagagatggcaaatgaatggcgaggatggggcacagggtgagccggctgaacccgaagatgcagagaagtcccggacctatttggcaaggaatggggagcctgaaccaatctccagtagtcgatggagagaagaactcttatggggatct

SEQ ID NO: 425500 - DNA, 1199 bp, Homo sapiens
ccatcggacgtcggcggtgaggatcttctcctgacccagcatcgctcatcacaatgaagaaccaagacaaaaagaacggggctgccaaacaatccaatccaaaaagcagcccaggacaaccggaagcaggacccgagggagcccaggagcggcccagccaggcggctcctgcagtagaagcagaaggtcccggcagcagccaggctcctcggaagccggagggggctcaagccagaacggctcagtctggggcccttcgtgatgtctctgaggagctgagccgccaactggaagacatactgagcacatactgtgtggacaataaccaggggggccccggcgaggatggggcacagggtgagccggctgaacccgaagatgcagagaagtcccggacctatgtggcaaggaatggggagcctgaaccaactccagtagtcaatggagagaaggaaccctccaagggggatccaaacacagaagagatccggcagagtgacgaggtcggagacggagaccatcgaaggccacaggagaagaaaaaagccaagggtttggggaaggagatcacgttgctgatgcagacattgaatactctgagtaccccagaggagaagctggctgctctgtgcaagaagtatgctgaactgctggaggagcaccggaattcacagaagcagatgaagctcctacagaaaaagcagagccagctggtgcaagagaaggaccacctgcgcggtgagcacagcaaggccgtcctggcccgcagcaagcttgagagcctatgccgtgagctgcagcggcacaaccgctccctcaaggaagaaggtgtgcagcgggcccgggaggaggaggagaagcgcaaggaggtgacctcgcacttccaggtgacactgaatgacattcagctgctgccccagcctttccgccttgcacagcacagaggtggtcaccccagggacagccaggcacctgctcctcttgcccttcctgggggaagggagctgccttctgtccctgtaactgctttccttatggcccagcccggccactcagacttgtttgaagctgcactggcagcttttttgtctcctttgggtattcacaacagccagggacttgattttgatgtattttaaaccacattaaataaagagtctgttgccttacttgtttctctcctgacctgtgtattcctt

SEQ ID NO: 425501 - DNA, 1233 bp, Homo sapiens
attccctcggcgggccgagcctcccctctctcccgcccctcctcctccctttcccacccctcggagtagagctgcacatgcggctgctccctgctccgtcccgcccagccactgtcgcgcaggaacgggtccctgcagcccccagccgatggcaggacagtagccgcctgtcagaggtcgtgaacggctgaggcagacgcagcggctcccgggcctcaagagagtggatgtctccggaggccatgggctacccggaggtggagcgcagggaactcctgcctgcagcagcgccgcgggagcgagggagccagggctgcgggtgtggcggggcccctgcccgggcgggcgaagggaacagctgcctgctcttcctgggtttctttggcctctcgctggccctccacctgctgacgttgtgctgctacctagagttgcgctcggagttgcggcgggaacgtggagccgagtcccgccttggcggctcgggcacccctggcacctctggcaccctaagcagcctcggtggcctcgaccctgacagccccatcaccagtcaccttgggcagccgtcacctaagcagcagccattggaaccgggagaagccgcactccactctgactcccaggacgggcaccaggtgagtcacctagtaggggcggcggcggccccctcccctcgcgggtagggcgagggccctccgccacaggggcctgggagcactcagcaacctcgagccaatttagagggcaggaccagggagggaccaggcgagcaagggagaagttgcccagggcaggttgtcttcggtccctggcccagctaatccagactccctggggaccccttgacttggaaagtctcgcgcgcgcccgcggcccctggctgcgggctgcctcgagaaaagttggcgacgctcccgtcgaggaggtgcctgcgctgccccccggccgactaacggcttggcccttctgctcgtgatgaggttctctgcccgcggtgcttgttttttcgtgtctagagctgatgccagaaccagcaggctcccctttggagttggagctgtaaacagctgtaataactgttccacgcccgcccgttgaaacaacttttaaccgcattttcagcgcgggtccttgtgcgctgaccagaacgtgggcttgttcacacttacctgcaatttgagactgattgtcctcggcgttctagtgaggatcagcgcccctgaggaattc

SEQ ID NO: 425502 - DNA, 1090 bp, Homo sapiens
attccctcggcgggccgagcctcccctctctcccgcccctcctcctccctttcccacccctcggagtagagctgcacatgcggctgctccctgctccgtcccgcccagccactgtcgcgcaggaacgggtccctgcagcccccagccgatggcaggacagtagccgcctgtcagaggtcgtgaacggctgaggcagacgcagcggctcccgggcctcaagagagtggatgtctccggaggccatgggctacccggaggtggagcgcagggaactcctgcctgcagcagcgccgcgggagcgagggagccagggctgcgggtgtggcggggcccctgcccgggcgggcgaagggaacagctgcctgctcttcctgggtttctttggcctctcgctggccctccacctgctgacgttgtgctgctacctagagttgcgctcggagttgcggcgggaacgtggagccgagtcccgccttggcggctcgggcacccctggcacctctggcaccctaagcagcctcggtggcctcgaccctgacagccccatcaccagtcaccttgggcagccgtcacctaagcagcagccattggaaccgggagaagccgcactccactctgactcccaggacgggcaccagatggccctattgaatttcttcttccctgatgaaaagccatactctgaagaagaaagtaggcgtgttcgccgcaataaaagaagcaaaagcaatgaaggagcagatggtaagtctactcagttgatcctttatcacttctgaattatttgttagtaaaagtatccttttaagaactaccttcttggtagggcatggtggctcacgcctgtaatcctagcactttgggaggcccacgcgggcggatcacttgaggtgagggattcgaaaccagcctggccaacatggtgaagccctgtctctactaaaaatacaaaaaaaattagccgggcctagtcccagctgcttgggagactaaggcaggagaatcgcttgaaactgggaggtagaggttgcagtgagctgagactgtgccactgcactccagcctgggtgacagtgcgagactccatctg

SEQ ID NO: 425503 - DNA, 5070 bp, Homo sapiens
attccctcggcgggccgagcctcccctctctcccgcccctcctcctccctttcccacccctcggagtagagctgcacatgcggctgctccctgctccgtcccgcccagccactgtcgcgcaggaacgggtccctgcagcccccagccgatggcaggacagtagccgcctgtcagaggtcgtgaacggctgaggcagacgcagcggctcccgggcctcaagagagtggatgtctccggaggccatgggctacccggaggtggagcgcagggaactcctgcctgcagcagcgccgcgggagcgagggagccagggctgcgggtgtggcggggcccctgcccgggcgggcgaagggaacagctgcctgctcttcctgggtttctttggcctctcgctggccctccactctgactcccaggacgggcaccagatggccctattgaatttcttcttccctgatgaaaagccatactctgaagaagaaagtaggcgtgttcgccgcaataaaagaagcaaaagcaatgaaggagcagatggcccagttaaaaacaagaaaaagggaaagaaagcaggacctcctggacccaatggccctccaggacccccaggacctccaggaccccagggacccccaggaattccagggattcctggaattccaggaacaactgttatgggaccacctggtcctccaggtcctcctggtcctcaaggaccccctggcctccagggaccttctggtgctgctgataaagctggaactcgagaaaaccagccagctgtggtgcatctacagggccaagggtcagcaattcaagtcaagaatgatctttcaggtggagtgctcaatgactggtctcgcatcactatgaaccccaaggtgtttaagctacatccccgcagcggggagctggaggtactggtggacggcacctacttcatctatagtcaggtagaagtatactacatcaacttcactgactttgccagctatgaggtggtggtggatgagaagcccttcctgcagtgcacacgcagcatcgagacgggcaagaccaactacaacacttgctataccgcaggcgtctgcctcctcaaggcccggcagaagatcgccgtcaagatggtgcacgctgacatctccatcaacatgagcaagcacaccacgttctttggggccatcaggctgggtgaagcccctgcatcctagattccccccattttgcctctgtccgtgccccttccctgggtttgggagccaggactcccagaacctctaagtgctgctgtggagtgaggtgtattggtgttgcagccgcagagaaatgccccagtgttatttattccccagtgactccagggtgacaaggcctgcttgactttccagaatgaccttgagttaacaggacagttgatggagccccagggtttacatgaagcagaaccttctttggttccatgttgactgacttatggcatgactcttcaaccccgaggtccctgttgtcagatctattgtttgttgcactaaaatgaggatccagggcagcaggccagagaaagcaaaggtgcactccagactctgggggtggacatctgaccccaagggggctgctgctcctctcttgggtagggtagtggctggggtggagtgggaagggagcattgcagcctaagaagaaggccagagagggaaaaggcaggtgcttttggcagagaccataagagaaacctgccaaggagcatccttggcagtgggaatgttctttctgctctatactgtggcctgcaggagggttggagtgctcttcccactccagctgacagccacaccgtggcagcttgctgggctttgggaagtttgctgtgctttggaacaatcacagggaatggccacaaacctgcccgcctaagaccctgaatccgtacttgggtcacatgactctcattttatttacagctgtgctccacactcagaaaattccctggggtcaccttctagttgcccccattcccagcctgactagaactcctgtcttctttctccatggagcctacctctgtctgagacaggtgcctaacctgggacctgtggtcatgtgagtctgggatattctttagcttacctgggcacagacagaattttccatttattaagcagtacagatgtttttcatccattcctaatcaaattctgtctggggacgaagggttggacgggatgacctccagaagtcccttcaatttctagtacctgtgactcttagccctcaccacagccttctaaattcccaaatcctagactgctcctgggcattagcaaggcagagcctttttacctggcctagaaagggcaaggggtgaggataggacagagggattttgttcaagtttgctgcaacccaagtggacgttaggccaggccttatctgaaaggccagcagctgatgctgtactaacccagtctttcttcactctggcttcaaaaagccacagcagagcattgtcaccgcaggtccccatgctgctcccctaaagccaggctcaggagaagccagtgtctaggcactgagcagggatctgccccctagttcaggtccaaattcaccttcccctaaaccccaagcttcccaacagatcatatggtaggaccctcgagagccttacttcaaagtgcctgggctcagcctggtttctgggtgctagatccagcccaaacctgggaaggccagccttgtacagtctgctcctcttgttcctgaaatgtgtttccttttcaggagatggggaataatttccttcaggcagctgaaattcaccaagaacagcgggtacttatttctcaagctgtgccttccctttctaagcaaccacactgcttggcccttcaagggtcagggtgagacgtgatgggctaggcctccgttgtctggttgctaatgacagccttgcaacccaaggtgaggtgaactccaggcatgtgtctggccctaactcctataaagtgcctcggacagtccgcagttgtagcagaaaccaacaagaaccactccttcatgtttggaaaataatttctcttgtattatctcctttgaagaaggcaaggctgataatatgacaaacatcattgtttagatgaggctcagagaggtagcactctcagagtgttttgaccagtttaagccgcagacctggagcttcagccaggtctgactccaaagctgttccattacaccacagcattgtgtggaatttgaggtctagagagaaccaataaaagtggtaattgggaactgaaatccttgagagttccggggagaaacccagagatgcctgatttcattcctcgatggtaatacccgtcctctcggctgccaggggctctgtggcaaaaagagtcagacatttctttggaaaacagcgaacagccttagagctcttgtgttcagaagaatcttcctggcacaatgttggagcagcaggcctctgggacccacagaacttgtggcctttatgttctttcacccatcctaggaaccagccaaccatcatgtgtagagcccctactgtgggcaaagtcctcctttcattaccctacagacagcttacaggagccagcctgcttcccacaactactagtgtgactccttatctctttccaccataccttagagactttgatactaccagggtctctcagggatggagggaagacctgaaagagaggactggttctgaggccagaaaggtgtgaggagagaggaggaaaagtcttcctaattgtgcccctaaagagcatcctgataccattctattctccagacatggaggggatgataaaggaaataggatctccactggacccttgattcattctgaaccctccaaaggaactctaagagggcgagggatgatgagggaagcaataggtagctggggagccctattgctgctaagtcattggcaaagtgcaaagcaatttactgatgagagaatgtggaaatagatgtgcagtttggaattatgttggtgtgaatttgccagaggaccaatgcttgcatggagaatggacgaggacatttgtgggcaagcagatgacagaggtttgaaggagaatggcatggcaggagtctctgccagttacttgggcttcaacagccaagctggcacaaaagacagctggcggaggctgctcggctactggttacctggagaagtagtatttgcctatttcccccttcatccatcctgagccaaatttcttttgctgaacaggaaagagctaggaaccctggaggtaaacaaagactttgatcctgtatgagtgtatgtgtttatgtaacttcctgtggagtgcaaatagattcagagaaatttagagctaaaaaggcccttagagggaatctagcccaacctacattccaccctgttacttatgtagaaactgaggcccagagagggaagatgacctgccccaagtggtgagcaagcaccaacctccagactcagcagagtgagggggtaaagcagttcctgtcccacatggccatcttctttcttccacccacaaactccaggctggaagtacttggcccccttcaggagcctggccaggcagggagagagtagctgcagccttcatcagaactcttcctcctcccaaggcattctcccagctctagcctctggactggaaagcacaagactggcccagtgccagcaagtccttaggctactgtaatgctgcctcaggacccatccctgcctggaggctcctctaggccctgtgagcacaaagaagaaagctgatttttgtcttttaatccatttcaggactctctccaggagggctcggggtgtgtcatttctatattcctccagctgggattggggggtgggctttgttgtgagaatggcctggagcaggcccaatgctgcttttgggggtcagcatccagtgtgagatactgtgtatataaactatatataatgtatataaactgggatgtaagtttgtgtaaattaatggtttattctttgcaaataaaacgctttccccgtcaaaattgaaa

SEQ ID NO: 425504 - DNA, 5280 bp, Homo sapiens
attccctcggcgggccgagcctcccctctctcccgcccctcctcctccctttcccacccctcggagtagagctgcacatgcggctgctccctgctccgtcccgcccagccactgtcgcgcaggaacgggtccctgcagcccccagccgatggcaggacagtagccgcctgtcagaggtcgtgaacggctgaggcagacgcagcggctcccgggcctcaagagagtggatgtctccggaggccatgggctacccggaggtggagcgcagggaactcctgcctgcagcagcgccgcgggagcgagggagccagggctgcgggtgtggcggggcccctgcccgggcgggcgaagggaacagctgcctgctcttcctgggtttctttggcctctcgctggccctccacctgctgacgttgtgctgctacctagagttgcgctcggagttgcggcgggaacgtggagccgagtcccgccttggcggctcgggcacccctggcacctctggcaccctaagcagcctcggtggcctcgaccctgacagccccatcaccagtcaccttgggcagccgtcacctaagcagcagccattggaaccgggagaagccgcactccactctgactcccaggacgggcaccagatggccctattgaatttcttcttccctgatgaaaagccatactctgaagaagaaagtaggcgtgttcgccgcaataaaagaagcaaaagcaatgaaggagcagatggcccagttaaaaacaagaaaaagggaaagaaagcaggacctcctggacccaatggccctccaggacccccaggacctccaggaccccagggacccccaggaattccagggattcctggaattccaggaacaactgttatgggaccacctggtcctccaggtcctcctggtcctcaaggaccccctggcctccagggaccttctggtgctgctgataaagctggaactcgagaaaaccagccagctgtggtgcatctacagggccaagggtcagcaattcaagtcaagaatgatctttcaggtggagtgctcaatgactggtctcgcatcactatgaaccccaaggtgtttaagctacatccccgcagcggggagctggaggtactggtggacggcacctacttcatctatagtcaggtagaagtatactacatcaacttcactgactttgccagctatgaggtggtggtggatgagaagcccttcctgcagtgcacacgcagcatcgagacgggcaagaccaactacaacacttgctataccgcaggcgtctgcctcctcaaggcccggcagaagatcgccgtcaagatggtgcacgctgacatctccatcaacatgagcaagcacaccacgttctttggggccatcaggctgggtgaagcccctgcatcctagattccccccattttgcctctgtccgtgccccttccctgggtttgggagccaggactcccagaacctctaagtgctgctgtggagtgaggtgtattggtgttgcagccgcagagaaatgccccagtgttatttattccccagtgactccagggtgacaaggcctgcttgactttccagaatgaccttgagttaacaggacagttgatggagccccagggtttacatgaagcagaaccttctttggttccatgttgactgacttatggcatgactcttcaaccccgaggtccctgttgtcagatctattgtttgttgcactaaaatgaggatccagggcagcaggccagagaaagcaaaggtgcactccagactctgggggtggacatctgaccccaagggggctgctgctcctctcttgggtagggtagtggctggggtggagtgggaagggagcattgcagcctaagaagaaggccagagagggaaaaggcaggtgcttttggcagagaccataagagaaacctgccaaggagcatccttggcagtgggaatgttctttctgctctatactgtggcctgcaggagggttggagtgctcttcccactccagctgacagccacaccgtggcagcttgctgggctttgggaagtttgctgtgctttggaacaatcacagggaatggccacaaacctgcccgcctaagaccctgaatccgtacttgggtcacatgactctcattttatttacagctgtgctccacactcagaaaattccctggggtcaccttctagttgcccccattcccagcctgactagaactcctgtcttctttctccatggagcctacctctgtctgagacaggtgcctaacctgggacctgtggtcatgtgagtctgggatattctttagcttacctgggcacagacagaattttccatttattaagcagtacagatgtttttcatccattcctaatcaaattctgtctggggacgaagggttggacgggatgacctccagaagtcccttcaatttctagtacctgtgactcttagccctcaccacagccttctaaattcccaaatcctagactgctcctgggcattagcaaggcagagcctttttacctggcctagaaagggcaaggggtgaggataggacagagggattttgttcaagtttgctgcaacccaagtggacgttaggccaggccttatctgaaaggccagcagctgatgctgtactaacccagtctttcttcactctggcttcaaaaagccacagcagagcattgtcaccgcaggtccccatgctgctcccctaaagccaggctcaggagaagccagtgtctaggcactgagcagggatctgccccctagttcaggtccaaattcaccttcccctaaaccccaagcttcccaacagatcatatggtaggaccctcgagagccttacttcaaagtgcctgggctcagcctggtttctgggtgctagatccagcccaaacctgggaaggccagccttgtacagtctgctcctcttgttcctgaaatgtgtttccttttcaggagatggggaataatttccttcaggcagctgaaattcaccaagaacagcgggtacttatttctcaagctgtgccttccctttctaagcaaccacactgcttggcccttcaagggtcagggtgagacgtgatgggctaggcctccgttgtctggttgctaatgacagccttgcaacccaaggtgaggtgaactccaggcatgtgtctggccctaactcctataaagtgcctcggacagtccgcagttgtagcagaaaccaacaagaaccactccttcatgtttggaaaataatttctcttgtattatctcctttgaagaaggcaaggctgataatatgacaaacatcattgtttagatgaggctcagagaggtagcactctcagagtgttttgaccagtttaagccgcagacctggagcttcagccaggtctgactccaaagctgttccattacaccacagcattgtgtggaatttgaggtctagagagaaccaataaaagtggtaattgggaactgaaatccttgagagttccggggagaaacccagagatgcctgatttcattcctcgatggtaatacccgtcctctcggctgccaggggctctgtggcaaaaagagtcagacatttctttggaaaacagcgaacagccttagagctcttgtgttcagaagaatcttcctggcacaatgttggagcagcaggcctctgggacccacagaacttgtggcctttatgttctttcacccatcctaggaaccagccaaccatcatgtgtagagcccctactgtgggcaaagtcctcctttcattaccctacagacagcttacaggagccagcctgcttcccacaactactagtgtgactccttatctctttccaccataccttagagactttgatactaccagggtctctcagggatggagggaagacctgaaagagaggactggttctgaggccagaaaggtgtgaggagagaggaggaaaagtcttcctaattgtgcccctaaagagcatcctgataccattctattctccagacatggaggggatgataaaggaaataggatctccactggacccttgattcattctgaaccctccaaaggaactctaagagggcgagggatgatgagggaagcaataggtagctggggagccctattgctgctaagtcattggcaaagtgcaaagcaatttactgatgagagaatgtggaaatagatgtgcagtttggaattatgttggtgtgaatttgccagaggaccaatgcttgcatggagaatggacgaggacatttgtgggcaagcagatgacagaggtttgaaggagaatggcatggcaggagtctctgccagttacttgggcttcaacagccaagctggcacaaaagacagctggcggaggctgctcggctactggttacctggagaagtagtatttgcctatttcccccttcatccatcctgagccaaatttcttttgctgaacaggaaagagctaggaaccctggaggtaaacaaagactttgatcctgtatgagtgtatgtgtttatgtaacttcctgtggagtgcaaatagattcagagaaatttagagctaaaaaggcccttagagggaatctagcccaacctacattccaccctgttacttatgtagaaactgaggcccagagagggaagatgacctgccccaagtggtgagcaagcaccaacctccagactcagcagagtgagggggtaaagcagttcctgtcccacatggccatcttctttcttccacccacaaactccaggctggaagtacttggcccccttcaggagcctggccaggcagggagagagtagctgcagccttcatcagaactcttcctcctcccaaggcattctcccagctctagcctctggactggaaagcacaagactggcccagtgccagcaagtccttaggctactgtaatgctgcctcaggacccatccctgcctggaggctcctctaggccctgtgagcacaaagaagaaagctgatttttgtcttttaatccatttcaggactctctccaggagggctcggggtgtgtcatttctatattcctccagctgggattggggggtgggctttgttgtgagaatggcctggagcaggcccaatgctgcttttgggggtcagcatccagtgtgagatactgtgtatataaactatatataatgtatataaactgggatgtaagtttgtgtaaattaatggtttattctttgcaaataaaacgctttccccgtcaaaattgaaa

SEQ ID NO: 425505 - DNA, 1141 bp, Homo sapiens
attccctcggcgggccgagcctcccctctctcccgcccctcctcctccctttcccacccctcggagtagagctgcacatgcggctgctccctgctccgtcccgcccagccactgtcgcgcaggaacgggtccctgcagcccccagccgatggcaggacagtagccgcctgtcagaggtcgtgaacggctgaggcagacgcagcggctcccgggcctcaagagagtggatgtctccggaggccatgggctacccggaggtggagcgcagggaactcctgcctgcagcagcgccgcgggagcgagggagccagggctgcgggtgtggcggggcccctgcccgggcgggcgaagggaacagctgcctgctcttcctgggtttctttggcctctcgctggccctccacctgctgacgttgtgctgctacctagagttgcgctcggagttgcggcgggaacgtggagccgagtcccgccttggcggctcgggcacccctggcacctctggcaccctaagcagcctcggtggcctcgaccctgacagccccatcaccagtcaccttgggcagccgtcacctaagcagcagccattggaaccgggagaagccgcactccactctgactcccaggacgggcaccaggcctgttttcctcaggtcttgctaagcctgtgacctgtcagctatgcttagatggccctattgaatttcttcttccctgatgaaaagccatactctgaagaagaaagtaggcgtgttcgccgcaataaaagaagcaaaagcaatgaaggagcagatggtaagtctactcagttgatcctttatcacttctgaattatttgttagtaaaagtatccttttaagaactaccttcttggtagggcatggtggctcacgcctgtaatcctagcactttgggaggcccacgcgggcggatcacttgaggtgagggattcgaaaccagcctggccaacatggtgaagccctgtctctactaaaaatacaaaaaaaattagccgggcctagtcccagctgcttgggagactaaggcaggagaatcgcttgaaactgggaggtagaggttgcagtgagctgagactgtgccactgcactccagcctgggtgacagtgcgagactccatctg

SEQ ID NO: 425506 - DNA, 1268 bp, Homo sapiens
gccgcggcggacacttccctgggcgggactgtctcgtggcacccggtggaaccgaggagaacgtggagcgccgggagcggcgaatatggacgactacagcctggatgagttccgtcggcgctggcaggaggagctggcgcaggcccaggcgccgaagaagcggcgacggcccgaggctgccgagaggcgggctcggcggccggaggtgggctccgggcgcggcgaacaggcctcgggggacccggcgctggcccagggtctcctggagggcgcggggaggcccccggcggcgcgggcgactcgggccgaggggcaggacgtagcgagccgctcacgttctcctctggcccgcgagggcgccgggggcggggagcagctggtggaccagctcatccgcgacctgaatgaaatgaatgatgtgcctttctttgatatccaactgccttacgaattggcaatcaatatatttcagtatctggacaggaaagaactaggaagatgtgcacaggtgagcaagacgtggaaggtgattgcagaggatgaggtgctgtggtacaggctgtgccagcaggaagggcaccttccggatagcagcatctctgactattcttgctggaagctcatcttccaagagtgccgagccaaggaacacatgttacaaaccaactggaaggtgggcagtggccaatatcattacctgtgaaagaatagcctgcaaggacatgggaatccaagctttcactcatagcctgagattaattgccaacagcgaagggagaggggtacactgagcctccccttcagctgttggtgacttgttgcccattttgttcaccattagatgatctgcctctgttttcagcctcaagatttgggaacatcctcttattctgcaggagaggaagggtgagattgggttgccagccacttcctctcggattgttagggtggtcagaggagtgctctgtgcagcccctttgactttcaccgactctctggagggacccagaaagcaaaagcactacctgcatacaaaagaggagctgaaaatgtcatttctagtaaatgtaagagggagatgattaaacatctctaagcactgtcttctcttccctcacataacctattggcgtgcttccataacatttatcacttcaaagtctctacggaaatattagatcacagctaagaatttgcacagtgaagtgtttccataggagataactgtcaagagccgtgttacataaagctgtttgaggcatgacgag

SEQ ID NO: 425507 - DNA, 6332 bp, Homo sapiens
gccgcggcggacacttccctgggcgggactgtctcgtggcacccggtggaaccgaggagaacgtggagcgccgggagcggcgaatatggacgactacagcctggatgagttccgtcggcgctggcaggaggagctggcgcaggcccaggcgccgaagaagcggcgacggcccgaggctgccgagaggcgggctcggcggccggagaatgaaatgaatgatgtgcctttctttgatatccaactgccttacgaattggcaatcaatatatttcagtatctggacaggaaagaactaggaagatgtgcacaggtgagcaagacgtggaaggtgattgcagaggatgaggtgctgtggtacaggctgtgccagcaggaagggcaccttccggatagcagcatctctgactattcttgctggaagctcatcttccaagagtgccgagccaaggaacacatgttacaaaccaactggaagaatcgcaaaggtgccgtgagcgagctggagcatgttcctgacacagttttgtgtgatgtgcattctcacgatggtgtggtcattgcgggatatacatcaggggatgtgagagtgtgggacacccgcacctgggactacgtagcccccttcctggaatcagaggacgaggaggatgagcctggaatgcagccaaatgtctcctttgtgaggataaacagctcgttggcagtagcagcttatgaggatgggtttcttaatatttgggatttaaggaccggaaagtaccctgttcatcgttttgagcacgatgcaagaatacaggcactagccctcagccaggacgatgcaaccgtggccacagcttctgcttttgatgtcgtgatgttatcccccaatgaggaggggtactggcagatagctgcggaatttgaagttccgaaactggttcagtaccttgaaatagttccagaaaccagaaggtaccctgtggcagtagccgctgctggagatctgatgtacctgctcaaagccgaagactccgccagaaccctcctttacgcccacggcccgcctgtcacatgtctagacgtctcggccaaccaagttgcttttggtgtacagggtctgggatgggtgtacgaaggaagcaagatcctggtgtatagcctggaagcaggacgccgcctcttgaagctgggtaacgttctccgtgacttcacgtgtgtcaacctcagcgacagccctcccaacctcatggtcagtggcaacatggacgggagggtgaggatccacgacctccgcagtggtaacatcgccctgtcgctctccgcccatcagctcagggtctctgctgtgcagatggatgactggaagatcgtcagtggaggcgaggaaggcctggtgtccgtgtgggattatcggatgaaccagaagctgtgggaggtgtattccgggcacccggtgcagcacatctcattcagcagccacagcctcatcacggccaacgtgccttaccagacggtaatgcgaaacgccgacctggacagcttcactactcacaggagacaccgggggctgatccgcgcctacgagtttgcggtggaccagctggccttccagagccctctccctgtctgccgttcatcctgtgacgccatggccactcactactacgacctcgcactggcctttccctataaccatgtttagggatgtgcctcagttgggagcaaggagaaaaatgggaagaaccagttttatccatcttaaaacgccaggcacctcttcacaggtggtaaacatttaggggaagaaagcagcccagggtgccatgcctgacagcacgcatctccctgacccctgcacttcccccagcgcctggggcaagctggcgtgtgccagggctcgagtcccacgtgctgccaactcaaacatagcctccttccccacccagctggccaccctggcctcagctccctcaggacgcctcagggatctcgctgcgcggtcctatacggtccctgcttagccagcttctgtgtgtccgccctcccagctccagccctgcaggccgtcttttccgtctccagccccttacctcttttcctccgagggcctttggatgtgcttgttcctggcctccaaggcaataacctccatgtccttttccctgtatttacttggggtgctcttctgtgacacttgccaccaccaccttccagtagcaagctggtagagctgtactttttcttcacagcttttaccatggtttataattatatacttatacagtttagtcatcaatgactattttgcttactattgtgtctatgatatgtgatacaaagcaaatattttctaaatattcattgactaaacagccatcaagatgaaacaggacaggagagaactgttcagtgtgatacagagctgccatttccaaagtattctggaagcaagccattgccttactcttgattttcaacagttctaaacagcaacagcatccacctaatataccttcagaatatcaaagcgaaaactgatagaactacaaagagaaataaaatccattctcacggcaggcaaatcagtgagaaaaatgtaaagatctggaggatttacttagtatcgctaacaagctggatccagtagatgcgtatggaatttcaaatacacatagacgatgcacaaaaaaccaccctgtacgaaggccacaaagaacagctcagatgcacaaagattcacaccatacaggccaaattatagaatcccccaaccccaagacactgcaccctatgggctataccctcaggcagggccctgcttttctaggaattgactccaatgcagaatagtgagaaatcaacaaaaagcaaaataagacaattccagacactcctgaatttacttggatttaaagaggttaataaaaacaaactataaactctctagactgggctgacagtaaaagcacagaatacaaaacccaggggatggggctgggaggggctgtgaggggctggcacctcagctcagaaaaggtagcagcaatcccaaagcagcagaaggcaggggttaaatcaggataaaaacagacatcagtggaatcgaaaaccaatagttagttaatataaagccagaaggttttgttttttttcaggtggggtctcgctctgtcacctagactagactggagtgcaatggcctgatctcggctcactgcaacctctgcctcccgagttcaagcaattctcctgcctcagcctcctgagtagctgggattacaggcgtccgctaccacaactggctaatttttacatttttagtagagacgggggatattgctatgttggccaggctggtctcaaacttctgacctcaaatgattgcctgcctcagcctcccaaagtgctgggattacaggtgtaagtcactgtacccagcccaaaagcagtttaaaaaaaaaaaagacaaaatatacaactcttgataaaacataaaggtacagtggtctatgaggaagagaaaaggtacctgaggatgcagaagtacctaccacatgggaaccgtttgtccacactcattccagagaaaaccgagtcctctcagttgcacacgtgtacgtatcagtgggaagtgcttgccattactccaaagcctagaaccttcacgtcatgaaggttctggaaggtttttcagattgcttaagatacgcagccattccatattcatctccaactacacaggggaacggagcagatagagctgcgactgggaagcgtcaccttcccgtccagagcgctttctttcagaccctgcctacctgcaggcagatggaccggagggttttctgcttcctttcaaccagataacttcctaagtggagatggcctgtaggtagcaaatgcaggattttgtttactttcatcatgtcatgtggtggtcagactgctcgctggtggcctcgctttagaaggttttcatcaagccccgccctttctctctcatagtcttaatgcgtctggaccactggggaaaatatttttcttttcaaaaagcagccccttcagtctgcgttcccagttcattttgcaggcgcattcgcccttcctagtttgcagcaattaaagataacggagtgtaaagtcattagacccagaattagagcagccagcagctggcccagtgtaaaaatgtcccaagtgtagcccctcccaccgcagagcctgtttctaacgtacctgccattcgtggaagtcgcctgggttttgtaaaggagaattttttggactcaagctgtcatcttcaagcacgccaacttcaggcagtgttttctactgcaaacctccacatcctggaatcaatcacactgacagggaaaggataaatgctcctttataagccaacatgtatccaaattaagcccccttacctttatccagaccctttcacaaacaagttctgagtttttagccaattgatcctctactttccttctttagtccctctcagggacgcctccatccccggctcccctaaaggtagaagatactcgagcatgctgccaggggagctggatggtgaaacacctgaagatctcatatcgcctctcaaaacactgtcggacttgctttctgctttatgatgtccgtagttgttctaatattaaatgctttgaatttctttattggtcaagttattttaacttgggcaaggcatacagtgataatcccctggcatgccacgattccagctcttcccacccccttgaaatcttacctcccaccgtggtggttttgtaaacccacagtcaattggatttgcccagaacctcccctacaggcgctcccagcccaggatccaggagacccgcaacatggtacagtaactcttcaccaaccgtcatcaataggttttcttagaaactacaactttaagcaaaatgaggtataatgaaactaattttggctgggcaaggtggctcaggcctgtaatccctgcactttgggagaccgaggcaggcgtatcacctgaggtcaggagctcaagaccagcctggccaacatggcaaaaccccatctctactaaaaatacaaaaattagccaggcctggtggcgtgtgcctgtaatcacaactactcgggaggctgaggcaggagaatcgcttgcagccaagaggcagaggttgcagtgagctgagatcgcaccactgcactccagcctgggcgacagagcgagacttcgtctcaaaaaaagaaatggcaactttaagcaaaatgatatataatgaaactaattttactataggctaatggatgtaaacaagagttaagttcccacggcatattgctggccataaaaacttcaccaaactttagaactttaaaccaaacacttctaatattaaacattaaatagacatgagttagttatacatacatttaagaaaaattactaaaaacaagataattacccaatttttggtgactctgagtgctggcagttgcagcgatggtgagttatatcacagaataaatgtttgcaaagcaaaaattgtcaggagcgcctccttccaccacgcaggtcaaacaccagaatgaacgggctcactgggcacttccgtacagcgtcatttactattgtgcatttgtatggttatgggaggcaatttttattttacaataattttttattcattccttctttcattttccaactcagttattccagtttaaggtggtgggcgaccagagcctatcccaacagctcagtgtgcaaggcagggaccaccctggacaggatgccctcccatcacagggcacactcaccccccacacacactcagactgcgaccagacaccaacaaacctcacctgcacatctttggggcgtgggaggaaaccagagtgcccagaaagctctccgaccgggaggacgtctagacggtgcacagacagtggccccagccgggaatcaatttttttctcaatgttataacaaaatgacattgaataaaacgatgctattcaaggacccactgtgtgtgaaatggtgcatgagggcattttctgggaaaaagcgtggttacctcgcatcagattctccaagggactacagcccccctgagaatttcatctctgccactagagtgtgttttgtaacccaagccatgtgccaccctggtgctgctgttgcccaggcaataatttatgtttcagagatactccagggacggcatcaccttctcctaccaagcacaactccctgcgccggctgaacgctagggtttcagctgatcggagggaaactgaatttccccaagagagggcttggtcctttctgaaaggaaaggctg

SEQ ID NO: 425508 - DNA, 5723 bp, Homo sapiens
gccgcggcggacacttccctgggcgggactgtctcgtggcacccggtggaaccgaggagaacgtggagcgccgggagcggcgaatatggacgactacagcctggatgagttccgtcggcgctggcaggaggagctggcgcaggcccaggcgccgaagaagcggcgacggcccgaggctgccgagaggcgggctcggcggccggagaatgaaatgaatgatgtgcctttctttgatatccaactgccttacgaattggcaatcaatatatttcagtatctggacaggaaagaactaggaagatgtgcacaggtgagcaagacgtggaaggtgattgcagaggatgaggtgctgtggtacaggctgtgccagcaggaagggcaccttccggatagcagcatctctgactattcttgctggaagctcatcttccaagagtgccgagccaaggaacacatgttacaaaccaactggaagaatcgcaaaggtgccgtgagcgagctggagcatgttcctgacacagttttgtgtgatgtgcattctcacgatggtgtggtcattgcgggatatacatcaggggatgtgagagtgtgggacacccgcacctgggactacgtagcccccttcctggaatcagaggacgaggaggatgagcctggaatgcagccaaatgtctcctttgtgaggataaacagctcgttggcagtagcagcttatgaggatgggtttcttaatatttgggatttaaggaccggaaagtaccctgttcatcgttttgagcacgatgcaagaatacaggcactagccctcagccaggacgatgcaaccgtggccacagcttctgcttttgatgtcgtgatgttatcccccaatgaggaggggtactggcagatagctgcggaatttgaagttccgaaactggttcagtaccttgaaatagttccagaaaccagaaggtaccctgtggcagtagccgctgctggagatctgatgtacctgctcaaagccgaagactccgccagaaccctcctttacgcccacggcccgcctgtcacatgtctagacgtctcggccaaccaagttgcttttggtgtacagggtctgggatgggtgtacgaaggaagcaagatcctggtgtatagcctggaagcaggacgccgcctcttgaagctgggtaacgttctccgtgacttcacgtgtgtcaacctcagcgacagccctcccaacctcatggtcagtggcaacatggacgggagggtgaggatccacgacctccgcagtggtaacatcgccctgtcgctctccgcccatcagctcagggtctctgctgtgcagatggatgactggaagatcgtcagtggaggcgaggaaggcctggtgtccgtgtgggattatcggatgaaccagaagctgtgggaggtgtattccgggcacccggtgcagcacatctcattcagcagccacagcctcatcacggccaacgtgccttaccagacggtaatgcgaaacgccgacctggacagcttcactactcacaggagacaccgggggctgatccgcgcctacgagtttgcggtggaccagctggccttccagagccctctccctgtctgccgttcatcctgtgacgccatggccactcactactacgacctcgcactggcctttccctataaccatgtttagggatgtgcctcagttgggagcaaggagaaaaatgggaagaaccagttttatccatcttaaaacgccaggcacctcttcacaggtggtaaacatttaggggaagaaagcagcccagggtgccatgcctgacagcacgcatctccctgacccctgcacttcccccagcgcctggggcaagctggcgtgtgccagggctcgagtcccacgtgctgccaactcaaacatagcctccttccccacccagctggccaccctggcctcagctccctcaggacgcctcagggatctcgctgcgcggtcctatacggtccctgcttagccagcttctgtgtgtccgccctcccagctccagccctgcaggccgtcttttccgtctccagccccttacctcttttcctccgagggcctttggatgtgcttgttcctggcctccaaggcaataacctccatgtccttttccctgtatttacttggggtgctcttctgtgacacttgccaccaccaccttccagtagcaagctggtagagctgtactttttcttcacagcttttaccatggtttataattatatacttatacagtttagtcatcaatgactattttgcttactattgtgtctatgatatgtgatacaaagcaaatattttctaaatattcattgactaaacagccatcaagatgaaacaggacaggagagaactgttcagtgtgatacagagctgccatttccaaagtattctggaagcaagccattgccttactcttgattttcaacagttctaaacagcaacagcatccacctaatataccttcagaatatcaaagcgaaaactgatagaactacaaagagaaataaaatccattctcacggcaggcaaatcagtgagaaaaatgtaaagatctggaggatttacttagtatcgctaacaagctggatccagtagatgcgtatggaatttcaaatacacatagacgatgcacaaaaaaccaccctgtacgaaggccacaaagaacagctcagatgcacaaagattcacaccatacaggccaaattatagaatcccccaaccccaagacactgcaccctatgggctataccctcaggcagggccctgcttttctaggaattgactccaatgcagaatagtgagaaatcaacaaaaagcaaaataagacaattccagacactcctgaatttacttggatttaaagaggttaataaaaacaaactataaactctctagactgggctgacagtaaaagcacagaatacaaaacccaggggatggggctgggaggggctgtgaggggctggcacctcagctcagaaaaggtagcagcaatcccaaagcagcagaaggcaggggttaaatcaggataaaaacagacatcagtggaatcgaaaaccaatagttagttaatataaagccagaaggttttgttttttttcaggtggggtctcgctctgtcacctagactagactggagtgcaatggcctgatctcggctcactgcaacctctgcctcccgagttcaagcaattctcctgcctcagcctcctgagtagctgggattacaggcgtccgctaccacaactggctaatttttacatttttagtagagacgggggatattgctatgttggccaggctggtctcaaacttctgacctcaaatgattgcctgcctcagcctcccaaagtgctgggattacaggtgtaagtcactgtacccagcccaaaagcagtttaaaaaaaaaaaagacaaaatatacaactcttgataaaacataaaggtacagtggtctatgaggaagagaaaaggtacctgaggatgcagaagtacctaccacatgggaaccgtttgtccacactcattccagagaaaaccgagtcctctcagttgcacacgtgtacgtatcagtgggaagtgcttgccattactccaaagcctagaaccttcacgtcatgaaggttctggaaggtttttcagattgcttaagatacgcagccattccatattcatctccaactacacaggggaacggagcagatagagctgcgactgggaagcgtcaccttcccgtccagagcgctttctttcagaccctgcctacctgcaggcagatggaccggagggttttctgcttcctttcaaccagataacttcctaagtggagatggccttccctctcagggacgcctccatccccggctcccctaaaggtagaagatactcgagcatgctgccaggggagctggatggtgaaacacctgaagatctcatatcgcctctcaaaacactgtcggacttgctttctgctttatgatgtccgtagttgttctaatattaaatgctttgaatttctttattggtcaagttattttaacttgggcaaggcatacagtgataatcccctggcatgccacgattccagctcttcccacccccttgaaatcttacctcccaccgtggtggttttgtaaacccacagtcaattggatttgcccagaacctcccctacaggcgctcccagcccaggatccaggagacccgcaacatggtacagtaactcttcaccaaccgtcatcaataggttttcttagaaactacaactttaagcaaaatgaggtataatgaaactaattttggctgggcaaggtggctcaggcctgtaatccctgcactttgggagaccgaggcaggcgtatcacctgaggtcaggagctcaagaccagcctggccaacatggcaaaaccccatctctactaaaaatacaaaaattagccaggcctggtggcgtgtgcctgtaatcacaactactcgggaggctgaggcaggagaatcgcttgcagccaagaggcagaggttgcagtgagctgagatcgcaccactgcactccagcctgggcgacagagcgagacttcgtctcaaaaaaagaaatggcaactttaagcaaaatgatatataatgaaactaattttactataggctaatggatgtaaacaagagttaagttcccacggcatattgctggccataaaaacttcaccaaactttagaactttaaaccaaacacttctaatattaaacattaaatagacatgagttagttatacatacatttaagaaaaattactaaaaacaagataattacccaatttttggtgactctgagtgctggcagttgcagcgatggtgagttatatcacagaataaatgtttgcaaagcaaaaattgtcaggagcgcctccttccaccacgcaggtcaaacaccagaatgaacgggctcactgggcacttccgtacagcgtcatttactattgtgcatttgtatggttatgggaggcaatttttattttacaataattttttattcattccttctttcattttccaactcagttattccagtttaaggtggtgggcgaccagagcctatcccaacagctcagtgtgcaaggcagggaccaccctggacaggatgccctcccatcacagggcacactcaccccccacacacactcagactgcgaccagacaccaacaaacctcacctgcacatctttggggcgtgggaggaaaccagagtgcccagaaagctctccgaccgggaggacgtctagacggtgcacagacagtggccccagccgggaatcaatttttttctcaatgttataacaaaatgacattgaataaaacgatgctattcaaggacccactgtgtgtgaaatggtgcatgagggcattttctgggaaaaagcgtggttacctcgcatcagattctccaagggactacagcccccctgagaatttcatctctgccactagagtgtgttttgtaacccaagccatgtgccaccctggtgctgctgttgcccaggcaataatttatgtttcagagatactccagggacggcatcaccttctcctaccaagcacaactccctgcgccggctgaacgctagggtttcagctgatcggagggaaactgaatttccccaagagagggcttggtcctttctgaaaggaaaggctg

SEQ ID NO: 425509 - DNA, 5050 bp, Homo sapiens
gccgcggcggacacttccctgggcgggactgtctcgtggcacccggtggaaccgaggagaacgtggagcgccgggagcggcgaatatggacgactacagcctggatgagttccgtcggcgctggcaggaggagctggcgcaggcccaggcgccgaagaagcggcgacggcccgaggctgccgagaggcgggctcggcggccggagaatgaaatgaatgatgtgcctttctttgatatccaactgccttacgaattggcaatcaatatatttcagtatctggacaggaaagaactaggaagatgtgcacaggtgagcaagacgtggaaggtgattgcagaggatgaggtgctgtggtacaggctgtgccagcaggaagggcaccttccggatagcagcatctctgactattcttgctggaagctcatcttccaagagtgccgagccaaggaacacatgttacaaaccaactggaagaatcgcaaaggtgccgtgagcgagctggagcatgttcctgacacagttttgtgtgatgtgcattctcacgatggtgtggtcattgcgggatatacatcaggggatgtgagagtgtgggacacccgcacctgggactacgtagcccccttcctggaatcagaggacgaggaggatgagcctggaatgcagccaaatgtctcctttgtgaggataaacagctcgttggcagtagcagcttatgaggatgggtttcttaatatttgggatttaaggaccggaaagtaccctgttcatcgttttgagcacgatgcaagaatacaggcactagccctcagccaggacgatgcaaccgtggccacagcttctgcttttgatgtcgtgatgttatcccccaatgaggaggggtactggcagatagctgcggaatttgaagttccgaaactggttcagtaccttgaaatagttccagaaaccagaaggtaccctgtggcagtagccgctgctggagatctgatgtacctgctcaaagccgaagactccgccagaaccctcctttacgcccacggcccgcctgtcacatgtctagacgtctcggccaaccaagttgcttttggtgtacagggtctgggatgggtgtacgaaggaagcaagatcctggtgtatagcctggaagcaggacgccgcctcttgaagctgggtaacgttctccgtgacttcacgtgtgtcaacctcagcgacagccctcccaacctcatggtcagtggcaacatggacgggagggtgaggatccacgacctccgcagtggtaacatcgccctgtcgctctccgcccatcagctcagggtctctgctgtgcagatggatgactggaagatcgtcagtggaggcgaggaaggcctggtgtccgtgtgggattatcggatgaaccagaagctgtgggaggtgtattccgggcacccggtgcagcacatctcattcagcagccacagcctcatcacggccaacgtgccttaccagacggtaatgcgaaacgccgacctggacagcttcactactcacaggagacaccgggggctgatccgcgcctacgagtttgcggtggaccagctggccttccagagccctctccctgtctgccgttcatcctgtgacgccatggccactcactactacgacctcgcactggcctttccctataaccatgtttagggatgtgcctcagttgggagcaaggagaaaaatgggaagaaccagttttatccatcttaaaacgccaggcacctcttcacaggtggtaaacatttaggggaagaaagcagcccagggtgccatgcctgacagcacgcatctccctgacccctgcacttcccccagcgcctggggcaagctggcgtgtgccagggctcgagtcccacgtgctgccaactcaaacatagcctccttccccacccagctggccaccctggcctcagctccctcaggacgcctcagggatctcgctgcgcggtcctatacggtccctgcttagccagcttctgtgtgtccgccctcccagctccagccctgcaggccgtcttttccgtctccagccccttacctcttttcctccgagggcctttggatgtgcttgttcctggcctccaaggcaataacctccatgtccttttccctgtatttacttggggtgctcttctgtgacacttgccaccaccaccttccagtagcaagctggtagagctgtactttttcttcacagcttttaccatggtttataattatatacttatacagtttagtcatcaatgactattttgcttactattgtgtctatgatatgtgatacaaagcaaatattttctaaatattcattgactaaacagccatcaagatgaaacaggacaggagagaactgttcagtgtgatacagagctgccatttccaaagtattctggaagcaagccattgccttactcttgattttcaacagttctaaacagcaacagcatccacctaatataccttcagaatatcaaagcgaaaactgatagaactacaaagagaaataaaatccattctcacggcaggcaaatcagtgagaaaaatgtaaagatctggaggatttacttagtatcgctaacaagctggatccagtagatgcgtatggaatttcaaatacacatagacgatgcacaaaaaaccaccctgtacgaaggccacaaagaacagctcagatgcacaaagattcacaccatacaggccaaattatagaatcccccaaccccaagacactgcaccctatgggctataccctcaggcagggccctgcttttctaggaattgactccaatgcagaatagtgagaaatcaacaaaaagcaaaataagacaattccagacactcctgaatttacttggatttaaagaggttaataaaaacaaactataaactctctagactgggctgacagtaaaagcacagaatacaaaacccaggggatggggctgggaggggctgtgaggggctggcacctcagctcagaaaaggtagcagcaatcccaaagcagcagaaggcaggggttaaatcaggataaaaacagacatcagtggaatcgaaaaccaatagttagttaatataaagccagaaggttttgttttttttcaggtggggtctcgctctgtcacctagactagactggagtgcaatggcctgatctcggctcactgcaacctctgcctcccgagttcaagcaattctcctgcctcagcctcctgagtagctgggattacaggcgtccgctaccacaactggctaatttttacatttttagtagagacgggggatattgctatgttggccaggctggtctcaaacttctgacctcaaatgattgcctgcctcagcctcccaaagtgctgggattacaggtgtaagtcactgtacccagcccaaaagcagtttaaaaaaaaaaaagacaaaatatacaactcttgataaaacataaaggtacagtggtctatgaggaagagaaaaggtacctgaggatgcagaagtacctaccacatgggaaccgtttgtccacactcattccagagaaaaccgagtcctctcagttgcacacgtgtacgtatcagtgggaagtgcttgccattactccaaagcctagaaccttcacgtcatgaaggttctggaaggtttttcagattgcttaagatacgcagccattccatattcatctccaactacacaggggaacggagcagatagagctgcgactgggaagcgtcaccttcccgtccagagcgctttctttcagaccctgcctacctgcaggcagatggaccggagggttttctgcttcctttcaaccagataacttcctaagtggagatggcctgtaggtagcaaatgcaggattttgtttactttcatcatgtcatgtggtggtcagactgctcgctggtggcctcgctttagaaggttttcatcaagccccgccctttctctctcatagtcttaatgcgtctggaccactggggaaaatatttttcttttcaaaaagcagccccttcagtctgcgttcccagttcattttgcaggcgcattcgcccttcctagtttgcagcaattaaagataacggagtgtaaagtcattagacccagaattagagcagccagcagctggcccagtgtaaaaatgtcccaagtgtagcccctcccaccgcagagcctgtttctaacgtacctgccattcgtggaagtcgcctgggttttgtaaaggagaattttttggactcaagctgtcatcttcaagcacgccaacttcaggcagtgttttctactgcaaacctccacatcctggaatcaatcacactgacagggaaaggataaatgctcctttataagccaacatgtatccaaattaagcccccttacctttatccagaccctttcacaaacaagttctgagtttttagccaattgatcctctactttccttctttagtccctctcagggacgcctccatccccggctcccctaaaggtagaagatactcgagcatgctgccaggggagctggatggtgaaacacctgaagatctcatatcgcctctcaaaacactgtcggacttgctttctgctttatgatgtccgtagttgttctaatattaaatgctttgaatttctttattggtcaagttattttaacttgggcaaggcatacagtgataatcccctggcatgccacgattccagctcttcccacccccttgaaatcttacctcccaccgtggtggttttgtaaacccacagtcaattggatttgcccagaacctcccctacaggcgctcccagcccaggatccaggagacccgcaacatggtacagtaactcttcaccaaccgtcatcaataggttttcttagaaactacaactttaagcaaaatgaggtataatgaaactaattttggctggtctcaaacttctgacctcggatgattgcctgcctcgccctcccaaagtgctgggattacaggtgtaagtcactgtacccagcccaaatgctgtttaaaaaa

SEQ ID NO: 425510 - DNA, 2924 bp, Homo sapiens
gccgcggcggacacttccctgggcgggactgtctcgtggcacccggtggaaccgaggagaacgtggagcgccgggagcggcgaatatggacgactacagcctggatgagttccgtcggcgctggcaggaggagctggcgcaggcccaggcgccgaagaagcggcgacggcccgaggctgccgagaggcgggctcggcggccggagaatgaaatgaatgatgtgcctttctttgatatccaactgccttacgaattggcaatcaatatatttcagtatctggacaggaaagaactaggaagatgtgcacaggtgagcaagacgtggaaggtgattgcagaggatgaggtgctgtggtacaggctgtgccagcaggaagggcaccttccggatagcagcatctctgactattcttgctggaagctcatcttccaagagtgccgagccaaggaacacatgttacaaaccaactggaagaatcgcaaaggtgccgtgagcgagctggagcatgttcctgacacagttttgtgtgatgtgcattctcacgatggtgtggtcattgcgggatatacatcaggggatgtgagagtgtgggacacccgcacctgggactacgtagcccccttcctggaatcagaggacgaggaggatgagcctggaatgcagccaaatgtctcctttgtgaggataaacagctcgttggcagtagcagcttatgaggatgggtttcttaatatttgggatttaaggaccggaaagtaccctgttcatcgttttgagcacgatgcaagaatacaggcactagccctcagccaggacgatgcaaccgtggccacagcttctgcttttgatgtcgtgatgttatcccccaatgaggaggggtactggcagatagctgcggaatttgaagttccgaaactggttcagtaccttgaaatagttccagaaaccagaaggtaccctgtggcagtagccgctgctggagatctgatgtacctgctcaaagccgaagactccgccagaaccctcctttacgcccacggcccgcctgtcacatgtctagacgtctcggccaaccaagttgcttttggtgtacagggtctgggatgggtgtacgaaggaagcaagatcctggtgtatagcctggaagcaggacgccgcctcttgaagctgggtaacgttctccgtgacttcacgtgtgtcaacctcagcgacagccctcccaacctcatggtcagtggcaacatggacgggagggtgaggatccacgacctccgcagtggtaacatcgccctgtcgctctccgcccatcagctcagggtctctgctgtgcagatggatgactggaagatcgtcagtggaggcgaggaaggcctggtgtccgtgtgggattatcggatgaaccagaagctgtgggaggtgtattccgggcacccggtgcagcacatctcattcagcagccacagcctcatcacggccaacgtgccttaccagacggtaatgcgaaacgccgacctggacagcttcactactcacaggagacaccgggggctgatccgcgcctacgagtttgcggtggaccagctggccttccagagccctctccctgtctgccgttcatcctgtgacgccatggccactcactactacgacctcgcactggcctttccctataaccatgtttagggatgtgcctcagttgggagcaaggagaaaaatgggaagaaccagttttatccatcttaaaacgccaggcacctcttcacaggtggtaaacatttaggggaagaaagcagcccagggtgccatgcctgacagcacgcatctccctgacccctgcacttcccccagcgcctggggcaagctggcgtgtgccagggctcgagtcccacgtgctgccaactcaaacatagcctccttccccacccagctggccaccctggcctcagctccctcaggacgcctcagggatctcgctgcgcggtcctatacggtccctgcttagccagcttctgtgtgtccgccctcccagctccagccctgcaggccgtcttttccgtctccagccccttacctcttttcctccgagggcctttggatgtgcttgttcctggcctccaaggcaataacctccatgtccttttccctgtatttacttggggtgctcttctgtgacacttgccaccaccaccttccagtagcaagctggtagagctgtactttttcttcacagcttttaccatggtttataattatatacttatacagtttagtcatcaatgactattttgcttactattgtgtctatgatatgtgatacaaagcaaatattttctaaatattcattgactaaacagccatcaagatgaaacaggacaggagagaactgttcagtgtgatacagagctgccatttccaaagtattctggaagcaagccattgccttactcttgattttcaacagttctaaacagcaacagcatccacctaatataccttcagaatatcaaagcgaaaactgatagaactacaaagagaaataaaatccattctcacggcaggcaaatcagtgagaaaaatgtaaagatctggaggatttacttagtatcgctaacaagctggatccagtagatgcgtatggaatttcaaatacacatagacgatgcacaaaaaaccaccctgtacgaaggccacaaagaacagctcagatgcacaaagattcacaccatacaggccaaattatagaatcccccaaccccaagacactgcaccctatgggctataccctcaggcagggccctgcttttctaggaattgactccaatgcagaatagtgagaaatcaacaaaaagcaaaataagacaattccagacactcctgaatttacttggatttaaagaggttaataaaaacaaactataaactc

SEQ ID NO: 425511 - DNA, 1268 bp, Homo sapiens
aggacacagcgaggaaggcccgggcgcaacgtgtgcagtcagctccaaactgagcttccgagaaacactatttctaaagacacagaaagttcccagaatccctgttccaactacaacagggcctttttttttttgagacggggtctcactctatcacccaggatggagtaaatggcaactttaagcaaaatgatatataatgaaactaattttactataggctaatggatgtaaacaagagttaagttcccacggcatattgctggccataaaaacttcaccaaactttagaactttaaaccaaacacttctaatattaaacattaaatagacatgagttagttatacatacatttaagaaaaattactaaaaacaagataattacccaatttttggtgactctgagtgctggcagttgcagcgatggtgagttatatcacagaataaatgtttgcaaagcaaaaattgtcaggagcgcctccttccaccacgcaggtcaaacaccagaatgaacgggctcactgggcacttccgtacagcgtcatttactattgtgcatttgtatggttatgggaggcaatttttattttacaataattttttattcattccttctttcattttccaactcagttattccagtttaaggtggtgggcgaccagagcctatcccaacagctcagtgtgcaaggcagggaccaccctggacaggatgccctcccatcacagggcacactcaccccccacacacactcagactgcgaccagacaccaacaaacctcacctgcacatctttggggcgtgggaggaaaccagagtgcccagaaagctctccgaccgggaggacgtctagacggtgcacagacagtggccccagccgggaatcaatttttttctcaatgttataacaaaatgacattgaataaaacgatgctattcaaggacccactgtgtgtgaaatggtgcatgagggcattttctgggaaaaagcgtggttacctcgcatcagattctccaagggactacagcccccctgagaatttcatctctgccactagagtgtgttttgtaacccaagccatgtgccaccctggtgctgctgttgcccaggcaataatttatgtttcagagatactccagggacggcatcaccttctcctaccaagcacaactccctgcgccggctgaacgctagggtttcagctgatcggagggaaactgaatttccccaagagagggcttggtcctttctgaaaggaaaggctg

SEQ ID NO: 425512 - DNA, 754 bp, Homo sapiens
gacagatacgaatcgagctggtaccgaatctcgacatattgtgcatttgtatggttatgggaggcaatttttattttacaataattttttattcattccttctttcattttccaactcagttattccagtttaaggtggtgggcgaccagagcctatcccaacagctcagtgtgcaaggcagggaccaccctggacaggatgccctcccatcacagggcacactcaccccccacacacactcagactgcgaccagacaccaacaaacctcacctgcacatctttggggcgtgggaggaaaccagagtgcccagaaagctctccgaccgggaggacgtctagacggtgcacagacagtggccccagccgggaatcaatttttttctcaatgttataacaaaatgacattgaataaaacgatgctattcaaggacccactgtgtgtgaaatggtgcatgagggcattttctgggaaaaagcgtggttacctcgcatcagattctccaagggactacagcccccctgagaatttcatctctgccactagagtgtgttttgtaacccaagccatgtgccaccctggtgctgctgttgcccaggcaataatttatgtttcagagatactccagggacggcatcaccttctcctaccaagcacaactccctgcgccggctgaacgctagggtttcagctgatcggagggaaactgaatttccccaagagagggcttggtcctttctgaaaggaaaggctg

SEQ ID NO: 425513 - DNA, 4343 bp, Homo sapiens
gccgcggcggacacttccctgggcgggactgtctcgtggcacccggtggaaccgaggagaacgtggagcgccgggagcggcgaatatggacgactacagcctggatgagttccgtcggcgctggcaggaggagctggcgcaggcccaggcgccgaagaagcggcgacggcccgaggctgccgagaggcgggctcggcggccggagaatgaaatgaatgatgtgcctttctttgatatccaactgccttacgaattggcaatcaatatatttcagtatctggacaggaaagaactaggaagatgtgcacaggtgagcaagacgtggaaggtgattgcagaggatgaggtgctgtggtacaggctgtgccagcaggaagggcaccttccggatagcagcatctctgactattcttgctggaagctcatcttccaagagtgccgagccaaggaacacatgttacaaaccaactggaagaatcgcaaaggtgccgtgagcgagctggagcatgttcctgacacagttttgtgtgatgtgcattctcacgatggtgtggtcattgcgggatatacatcaggggatgtgagagtgtgggacacccgcacctgggactacgtagcccccttcctggaatcagaggacgaggaggatgagcctggaatgcagccaaatgtctcctttgtgaggataaacagctcgttggcagtagcagcttatgaggatgggtttcttaatatttgggatttaaggaccggaaagtaccctgttcatcgttttgagcacgatgcaagaatacaggcactagccctcagccaggacgatgcaaccgtggccacagcttctgcttttgatgtcgtgatgttatcccccaatgaggaggggtactggcagatagctgcggaatttgaagttccgaaactggttcagtaccttgaaatagttccagaaaccagaaggtaccctgtggcagtagccgctgctggagatctgatgtacctgctcaaagccgaagactccgccagaaccctcctttacgcccacggcccgcctgtcacatgtctagacgtctcggccaaccaagttgcttttggtgtacagggtctgggatgggtgtacgaaggaagcaagatcctggtgtatagcctggaagcaggacgccgcctcttgaagctgggtaacgttctccgtgacttcacgtgtgtcaacctcagcgacagccctcccaacctcatggtcagtggcaacatggacgggagggtgaggatccacgacctccgcagtggtaacatcgccctgtcgctctccgcccatcagctcagggtctctgctgtgcagatggatgactggaagatcgtcagtggaggcgaggaaggcctggtgtccgtgtgggattatcggatgaaccagaagctgtgggaggtgtattccgggcacccggtgcagcacatctcattcagcagccacagcctcatcacggccaacgtgccttaccagacggtaatgcgaaacgccgacctggacagcttcactactcacaggagacaccgggggctgatccgcgcctacgagtttgcggtggaccagctggccttccagagccctctccctgtctgccgttcatcctgtgacgccatggccactcactactacgacctcgcactggcctttccctataaccatgtttagggatgtgcctcagttgggagcaaggagaaaaatgggaagaaccagttttatccatcttaaaacgccaggcacctcttcacaggtggtaaacatttaggggaagaaagcagcccagggtgccatgcctgacagcacgcatctccctgacccctgcacttcccccagcgcctggggcaagctggcgtgtgccagggctcgagtcccacgtgctgccaactcaaacatagcctccttccccacccagctggccaccctggcctcagctccctcaggacgcctcagggatctcgctgcgcggtcctatacggtccctgcttagccagcttctgtgtgtccgccctcccagctccagccctgcaggccgtcttttccgtctccagccccttacctcttttcctccgagggcctttggatgtgcttgttcctggcctccaaggcaataacctccatgtccttttccctgtatttacttggggtgctcttctgtgacacttgccaccaccaccttccagtagcaagctggtagagctgtactttttcttcacagcttttaccatggtttataattatatacttatacagtttagtcatcaatgactattttgcttactattgtgtctatgatatgtgatacaaagcaaatattttctaaatattcattgactaaacagccatcaagatgaaacaggacaggagagaactgttcagtgtgatacagagctgccatttccaaagtattctggaagcaagccattgccttactcttgattttcaacagttctaaacagcaacagcatccacctaatataccttcagaatatcaaagcgaaaactgatagaactacaaagagaaataaaatccattctcacggcaggcaaatcagtgagaaaaatgtaaagatctggaggatttacttagtatcgctaacaagctggatccagtagatgcgtatggaatttcaaatacacatagacgatgcacaaaaaaccaccctgtacgaaggccacaaagaacagctcagatgcacaaagattcacaccatacaggccaaattatagaatcccccaaccccaagacactgcaccctatgggctataccctcaggcagggccctgcttttctaggaattgactccaatgcagaatagtgagaaatcaacaaaaagcaaaataagacaattccagacactcctgaatttacttggatttaaagaggttaataaaaacaaactataaactctctagactgggctgacagtaaaagcacagaatacaaaacccaggggatggggctgggaggggctgtgaggggctggcacctcagctcagaaaaggtagcagcaatcccaaagcagcagaaggcaggggttaaatcaggataaaaacagacatcagtggaatcgaaaaccaatagttagttaatataaagccagaaggttttgttttttttcaggtggggtctcgctctgtcacctagactagactggagttgcagtgagctgagatcgcaccactgcactccagcctgggcgacagagcgagacttcgtctcaaaaaaagaaatggcaactttaagcaaaatgatatataatgaaactaattttactataggctaatggatgtaaacaagagttaagttcccacggcatattgctggccataaaaacttcaccaaactttagaactttaaaccaaacacttctaatattaaacattaaatagacatgagttagttatacatacatttaagaaaaattactaaaaacaagataattacccaatttttggtgactctgagtgctggcagttgcagcgatggtgagttatatcacagaataaatgtttgcaaagcaaaaattgtcaggagcgcctccttccaccacgcaggtcaaacaccagaatgaacgggctcactgggcacttccgtacagcgtcatttactattgtgcatttgtatggttatgggaggcaatttttattttacaataattttttattcattccttctttcattttccaactcagttattccagtttaaggtggtgggcgaccagagcctatcccaacagctcagtgtgcaaggcagggaccaccctggacaggatgccctcccatcacagggcacactcaccccccacacacactcagactgcgaccagacaccaacaaacctcacctgcacatctttggggcgtgggaggaaaccagagtgcccagaaagctctccgaccgggaggacgtctagacggtgcacagacagtggccccagccgggaatcaatttttttctcaatgttataacaaaatgacattgaataaaacgatgctattcaaggacccactgtgtgtgaaatggtgcatgagggcattttctgggaaaaagcgtggttacctcgcatcagattctccaagggactacagcccccctgagaatttcatctctgccactagagtgtgttttgtaacccaagccatgtgccaccctggtgctgctgttgcccaggcaataatttatgtttcagagatactccagggacggcatcaccttctcctaccaagcacaactccctgcgccggctgaacgctagggtttcagctgatcggagggaaactgaatttccccaagagagggcttggtcctttctgaaaggaaaggctg

SEQ ID NO: 425514 - DNA, 6530 bp, Homo sapiens
gccgcggcggacacttccctgggcgggactgtctcgtggcacccggtggaaccgaggagaacgtggagcgccgggagcggcgaatatggacgactacagcctggatgagttccgtcggcgctggcaggaggagctggcgcaggcccaggcgccgaagaagcggcgacggcccgaggctgccgagaggcgggctcggcggccggaggtgggctccgggcgcggcgaacaggcctcgggggacccggcgctggcccagggtctcctggagggcgcggggaggcccccggcggcgcgggcgactcgggccgaggggcaggacgtagcgagccgctcacgttctcctctggcccgcgagggcgccgggggcggggagcagctggtggaccagctcatccgcgacctgaatgaaatgaatgatgtgcctttctttgatatccaactgccttacgaattggcaatcaatatatttcagtatctggacaggaaagaactaggaagatgtgcacaggtgagcaagacgtggaaggtgattgcagaggatgaggtgctgtggtacaggctgtgccagcaggaagggcaccttccggatagcagcatctctgactattcttgctggaagctcatcttccaagagtgccgagccaaggaacacatgttacaaaccaactggaagaatcgcaaaggtgccgtgagcgagctggagcatgttcctgacacagttttgtgtgatgtgcattctcacgatggtgtggtcattgcgggatatacatcaggggatgtgagagtgtgggacacccgcacctgggactacgtagcccccttcctggaatcagaggacgaggaggatgagcctggaatgcagccaaatgtctcctttgtgaggataaacagctcgttggcagtagcagcttatgaggatgggtttcttaatatttgggatttaaggaccggaaagtaccctgttcatcgttttgagcacgatgcaagaatacaggcactagccctcagccaggacgatgcaaccgtggccacagcttctgcttttgatgtcgtgatgttatcccccaatgaggaggggtactggcagatagctgcggaatttgaagttccgaaactggttcagtaccttgaaatagttccagaaaccagaaggtaccctgtggcagtagccgctgctggagatctgatgtacctgctcaaagccgaagactccgccagaaccctcctttacgcccacggcccgcctgtcacatgtctagacgtctcggccaaccaagttgcttttggtgtacagggtctgggatgggtgtacgaaggaagcaagatcctggtgtatagcctggaagcaggacgccgcctcttgaagctgggtaacgttctccgtgacttcacgtgtgtcaacctcagcgacagccctcccaacctcatggtcagtggcaacatggacgggagggtgaggatccacgacctccgcagtggtaacatcgccctgtcgctctccgcccatcagctcagggtctctgctgtgcagatggatgactggaagatcgtcagtggaggcgaggaaggcctggtgtccgtgtgggattatcggatgaaccagaagctgtgggaggtgtattccgggcacccggtgcagcacatctcattcagcagccacagcctcatcacggccaacgtgccttaccagacggtaatgcgaaacgccgacctggacagcttcactactcacaggagacaccgggggctgatccgcgcctacgagtttgcggtggaccagctggccttccagagccctctccctgtctgccgttcatcctgtgacgccatggccactcactactacgacctcgcactggcctttccctataaccatgtttagggatgtgcctcagttgggagcaaggagaaaaatgggaagaaccagttttatccatcttaaaacgccaggcacctcttcacaggtggtaaacatttaggggaagaaagcagcccagggtgccatgcctgacagcacgcatctccctgacccctgcacttcccccagcgcctggggcaagctggcgtgtgccagggctcgagtcccacgtgctgccaactcaaacatagcctccttccccacccagctggccaccctggcctcagctccctcaggacgcctcagggatctcgctgcgcggtcctatacggtccctgcttagccagcttctgtgtgtccgccctcccagctccagccctgcaggccgtcttttccgtctccagccccttacctcttttcctccgagggcctttggatgtgcttgttcctggcctccaaggcaataacctccatgtccttttccctgtatttacttggggtgctcttctgtgacacttgccaccaccaccttccagtagcaagctggtagagctgtactttttcttcacagcttttaccatggtttataattatatacttatacagtttagtcatcaatgactattttgcttactattgtgtctatgatatgtgatacaaagcaaatattttctaaatattcattgactaaacagccatcaagatgaaacaggacaggagagaactgttcagtgtgatacagagctgccatttccaaagtattctggaagcaagccattgccttactcttgattttcaacagttctaaacagcaacagcatccacctaatataccttcagaatatcaaagcgaaaactgatagaactacaaagagaaataaaatccattctcacggcaggcaaatcagtgagaaaaatgtaaagatctggaggatttacttagtatcgctaacaagctggatccagtagatgcgtatggaatttcaaatacacatagacgatgcacaaaaaaccaccctgtacgaaggccacaaagaacagctcagatgcacaaagattcacaccatacaggccaaattatagaatcccccaaccccaagacactgcaccctatgggctataccctcaggcagggccctgcttttctaggaattgactccaatgcagaatagtgagaaatcaacaaaaagcaaaataagacaattccagacactcctgaatttacttggatttaaagaggttaataaaaacaaactataaactctctagactgggctgacagtaaaagcacagaatacaaaacccaggggatggggctgggaggggctgtgaggggctggcacctcagctcagaaaaggtagcagcaatcccaaagcagcagaaggcaggggttaaatcaggataaaaacagacatcagtggaatcgaaaaccaatagttagttaatataaagccagaaggttttgttttttttcaggtggggtctcgctctgtcacctagactagactggagtgcaatggcctgatctcggctcactgcaacctctgcctcccgagttcaagcaattctcctgcctcagcctcctgagtagctgggattacaggcgtccgctaccacaactggctaatttttacatttttagtagagacgggggatattgctatgttggccaggctggtctcaaacttctgacctcaaatgattgcctgcctcagcctcccaaagtgctgggattacaggtgtaagtcactgtacccagcccaaaagcagtttaaaaaaaaaaaagacaaaatatacaactcttgataaaacataaaggtacagtggtctatgaggaagagaaaaggtacctgaggatgcagaagtacctaccacatgggaaccgtttgtccacactcattccagagaaaaccgagtcctctcagttgcacacgtgtacgtatcagtgggaagtgcttgccattactccaaagcctagaaccttcacgtcatgaaggttctggaaggtttttcagattgcttaagatacgcagccattccatattcatctccaactacacaggggaacggagcagatagagctgcgactgggaagcgtcaccttcccgtccagagcgctttctttcagaccctgcctacctgcaggcagatggaccggagggttttctgcttcctttcaaccagataacttcctaagtggagatggcctgtaggtagcaaatgcaggattttgtttactttcatcatgtcatgtggtggtcagactgctcgctggtggcctcgctttagaaggttttcatcaagccccgccctttctctctcatagtcttaatgcgtctggaccactggggaaaatatttttcttttcaaaaagcagccccttcagtctgcgttcccagttcattttgcaggcgcattcgcccttcctagtttgcagcaattaaagataacggagtgtaaagtcattagacccagaattagagcagccagcagctggcccagtgtaaaaatgtcccaagtgtagcccctcccaccgcagagcctgtttctaacgtacctgccattcgtggaagtcgcctgggttttgtaaaggagaattttttggactcaagctgtcatcttcaagcacgccaacttcaggcagtgttttctactgcaaacctccacatcctggaatcaatcacactgacagggaaaggataaatgctcctttataagccaacatgtatccaaattaagcccccttacctttatccagaccctttcacaaacaagttctgagtttttagccaattgatcctctactttccttctttagtccctctcagggacgcctccatccccggctcccctaaaggtagaagatactcgagcatgctgccaggggagctggatggtgaaacacctgaagatctcatatcgcctctcaaaacactgtcggacttgctttctgctttatgatgtccgtagttgttctaatattaaatgctttgaatttctttattggtcaagttattttaacttgggcaaggcatacagtgataatcccctggcatgccacgattccagctcttcccacccccttgaaatcttacctcccaccgtggtggttttgtaaacccacagtcaattggatttgcccagaacctcccctacaggcgctcccagcccaggatccaggagacccgcaacatggtacagtaactcttcaccaaccgtcatcaataggttttcttagaaactacaactttaagcaaaatgaggtataatgaaactaattttggctgggcaaggtggctcaggcctgtaatccctgcactttgggagaccgaggcaggcgtatcacctgaggtcaggagctcaagaccagcctggccaacatggcaaaaccccatctctactaaaaatacaaaaattagccaggcctggtggcgtgtgcctgtaatcacaactactcgggaggctgaggcaggagaatcgcttgcagccaagaggcagaggttgcagtgagctgagatcgcaccactgcactccagcctgggcgacagagcgagacttcgtctcaaaaaaagaaatggcaactttaagcaaaatgatatataatgaaactaattttactataggctaatggatgtaaacaagagttaagttcccacggcatattgctggccataaaaacttcaccaaactttagaactttaaaccaaacacttctaatattaaacattaaatagacatgagttagttatacatacatttaagaaaaattactaaaaacaagataattacccaatttttggtgactctgagtgctggcagttgcagcgatggtgagttatatcacagaataaatgtttgcaaagcaaaaattgtcaggagcgcctccttccaccacgcaggtcaaacaccagaatgaacgggctcactgggcacttccgtacagcgtcatttactattgtgcatttgtatggttatgggaggcaatttttattttacaataattttttattcattccttctttcattttccaactcagttattccagtttaaggtggtgggcgaccagagcctatcccaacagctcagtgtgcaaggcagggaccaccctggacaggatgccctcccatcacagggcacactcaccccccacacacactcagactgcgaccagacaccaacaaacctcacctgcacatctttggggcgtgggaggaaaccagagtgcccagaaagctctccgaccgggaggacgtctagacggtgcacagacagtggccccagccgggaatcaatttttttctcaatgttataacaaaatgacattgaataaaacgatgctattcaaggacccactgtgtgtgaaatggtgcatgagggcattttctgggaaaaagcgtggttacctcgcatcagattctccaagggactacagcccccctgagaatttcatctctgccactagagtgtgttttgtaacccaagccatgtgccaccctggtgctgctgttgcccaggcaataatttatgtttcagagatactccagggacggcatcaccttctcctaccaagcacaactccctgcgccggctgaacgctagggtttcagctgatcggagggaaactgaatttccccaagagagggcttggtcctttctgaaaggaaaggctg

SEQ ID NO: 425515 - DNA, 1683 bp, Homo sapiens
gagccaaagggaagtgctgcgaggtttacaaccagctgcagtggttcgatgggaaggatctttctccaagtggttcctcttgaggggagcatttctgctggctccaggactttggccatctataaagcttggcaatgagaaataagaaaattctcaaggaggacgagctcttgagtgagacccaacaagctgcttttcaccaaattgcaatggagcctttcgaaatcaatgttccaaagcccaagaggagaaatggggtgaacttctccctagctgtggtggtcatctacctgatcctgctcaccgctggcgctgggctgctggtggtccaagttctgaatctgcaggcgcggctccgggtcctggagatgtatttcctcaatgacactctggcggctgaggacagcccgtccttctccttgctgcagtcagcacaccctggagaacacctggctcagggtgcatcgaggctgcaagtcctgcaggcccaactcacctgggtccgcgtcagccatgagcacttgctgcagcgggtagacaacttcactcagaacccagggatgttcagaatcaaaggtgaacaaggcgccccaggtcttcaaggtcacaagggggccatgggcatgcctggtgcccctggcccgccgggaccacctgctgagaagggagccaagggggctatgggacgagatggagcaacaggcccctcgggaccccaaggcccaccgggagtcaagggagaggcgggcctccaaggaccccagggtgctccagggaagcaaggagccactggcaccccaggaccccaaggagagaagggcagcaaaggcgatgggggtctcattggcccaaaaggggaaactggaactaagggagagaaaggagacctgggtctcccaggaagcaaaggggacaggggcatgaaaggagatgcaggggtcatggggcctcctggagcccaggggagtaaaggtgacttcgggaggccaggcccaccaggtttggctggttttcctggagctaaaggagatcaaggacaacctggactgcagggtgttccgggccctcctggtgcagtgggacacccaggtgccaagggtgagcctggcagtgctggctcccctgggcgagcaggacttccagggagccccgggagtccaggagccacaggcctgaaaggaagcaaaggggacacaggacttcaaggacagcaaggaagaaaaggagaatcaggagttccaggccctgcaggtgtgaagggagaacaggggagcccagggctggcaggtcccaagggagcccctggacaagctggccagaagggagaccagggagtgaaaggatcttctggggagcaaggagtaaagggagaaaaaggtgaaagaggtgaaaactcagtgtccgtcaggattgtgcactgggcagatctggctggataatgttcagtgtcggggcacggagagtaccctgtggagctgcaccaagaatagctggggccatcatgactgcagccacgaggaggacgcaggcgtggagtgcagcgtctgacccggaaaccctttcacttctctgctcccgaggtgtcctcgggctcatatgtgggaaggcagaggatctctgaggagttccctggggacaactgagcagcctctggagaggggccattaataaagctcaacatca

SEQ ID NO: 425516 - DNA, 1832 bp, Homo sapiens
gagccaaagggaagtgctgcgaggtttacaaccagctgcagtggttcgatgggaaggatctttctccaagtggttcctcttgaggggagcatttctgctggctccaggactttggccatctataaagcttggcaatgagaaataagaaaattctcaaggaggacgagctcttgagtgagacccaacaagctgcttttcaccaaattgcaatggagcctttcgaaatcaatgttccaaagcccaagaggagaaatggggtgaacttctccctagctgtggtggtcatctacctgatcctgctcaccgctggcgctgggctgctggtggtccaagttctgaatctgcaggcgcggctccgggtcctggagatgtatttcctcaatgacactctggcggctgaggacagcccgtccttctccttgctgcagtcagcacaccctggagaacacctggctcagggtgcatcgaggctgcaagtcctgcaggcccaactcacctgggtccgcgtcagccatgagcacttgctgcagcgggtagacaacttcactcagaacccagggatgttcagaatcaaaggtgaacaaggcgccccaggtcttcaaggtcacaagggggccatgggcatgcctggtgcccctggcccgccgggaccacctgctgagaagggagccaagggggctatgggacgagatggagcaacaggcccctcgggaccccaaggcccaccgggagtcaagggagaggcgggcctccaaggaccccagggtgctccagggaagcaaggagccactggcaccccaggaccccaaggagagaagggcagcaaaggcgatgggggtctcattggcccaaaaggggaaactggaactaagggagagaaaggagacctgggtctcccaggaagcaaaggggacaggggcatgaaaggagatgcaggggtcatggggcctcctggagcccaggggagtaaaggtgacttcgggaggccaggcccaccaggtttggctggttttcctggagctaaaggagatcaaggacaacctggactgcagggtgttccgggccctcctggtgcagtgggacacccaggtgccaagggtgagcctggcagtgctggctcccctgggcgagcaggacttccagggagccccgggagtccaggagccacaggcctgaaaggaagcaaaggggacacaggacttcaaggacagcaaggaagaaaaggagaatcaggagttccaggccctgcaggtgtgaagggagaacaggggagcccagggctggcaggtcccaagggagcccctggacaagctggccagaagggagaccagggagtgaaaggatcttctggggagcaaggagtaaagggagaaaaaggtgaaagaggtgaaaactcagtgtccgtcaggattgtcggcagtagtaaccgaggccgggctgaagtttactacagtggtacctgggggacaatttgcgatgacgagtggcaaaattctgatgccattgtcttctgccgcatgctgggttactccaaaggaagggccctgtacaaagtgggagctggcactgggcagatctggctggataatgttcagtgtcggggcacggagagtaccctgtggagctgcaccaagaatagctggggccatcatgactgcagccacgaggaggacgcaggcgtggagtgcagcgtctgacccggaaaccctttcacttctctgctcccgaggtgtcctcgggctcatatgtgggaaggcagaggatctctgaggagttccctggggacaactgagcagcctctggagaggggccattaataaagctcaacatca

SEQ ID NO: 425517 - DNA, 1327 bp, Homo sapiens
gagccaaagggaagtgctgcgaggtttacaaccagctgcagtggttcgatgggaaggatctttctccaagtggttcctcttgaggggagcatttctgctggctccaggactttggccatctataaagcttggcaatgagaaataagaaaattctcaaggaggacgagctcttgagtgagacccaacaagctgcttttcaccaaattgcaatggagcctttcgaaatcaatgttccaaagcccaagaggagaaatggggtgaacttctccctagctgtggtggtcatctacctgatcctgctcaccgctggcgctgggctgctggtggtccaagttctgaatctgcaggcgcggctccgggtcctggagatgtatttcctcaatgacactctggcggctgaggacagcccgtccttctccttgctgcagtcagcacaccctggagaacacctggctcagggtgcatcgaggctgcaagtcctgcaggcccaactcacctgggtccgcgtcagccatgagcacttgctgcagcgggtagacaacttcactcagaacccagggatgttcagaatcaaaggtgaacaaggcgccccaggtcttcaaggtcacaagggggccatgggcatgcctggtgcccctggcccgccgggaccacctgctgagaagggagccaagggggctatgggacgagatggagcaacaggcccctcgggaccccaaggcccaccgggagtcaagggagaggcgggcctccaaggaccccagggtgctccagggaagcaaggagccactggcaccccaggaccccaaggagagaagggcagcaaaggcgatgggggtctcattggcccaaaaggggaaactggaactaagggagagaaaggagacctgggtctcccaggaagcaaaggggacaggggcatgaaaggagatgcaggggtcatggggcctcctggagcccaggggagtaaaggtgacttcgggaggccaggcccaccaggtttggctggttttcctggagctaaaggagatcaaggacaacctggactgcagggtgttccgggccctcctggtgcagtgggacacccaggtgccaagggtgagcctggcagtgctggctcccctgggcgagcaggacttccagggagccccgggagtccaggagccacaggcctgaaaggaagcaaaggggacacaggacttcaaggacagcaaggaagaaaaggagaatcaggagttccaggcccgaatgcagtggtgccaggacaggatagctcactgtagccttggcctcccgggatcaagtgatcctcccaccttcgtctccc

SEQ ID NO: 425518 - DNA, 8617 bp, Homo sapiens
ttcacgacgggggaggtgctgtacgtccaagatggcggcgccctgtaggctggagggactgtgaggtaaacagctgagggggaggagacggtggtgaccatgaaagacaccaggttgacagcactggaaactgaagtaccagttgtcgctagaacagtttggtagtggccccaatgaagaaccttcagaacctgtagcacacgtcctggagccagcacagcgccttcgagcgagagaatggcccaacaagcaaatgtcggggagcttcttgccatgctggactcccccatgctgggtgtgcgggacgacgtgacagctgtctttaaagagaacctcaattctgaccgtggccctatgcttgtaaacaccttggtggattattacctggaaaccagctctcagccggcattgcacatcctgaccaccttgcaagagccacatgacaagcacctcttggacaggattaacgaatatgtgggcaaagccgccactcgtttatccatcctctcgttactgggtcatgtcataagactgcagccatcttggaagcataagctctctcaagcacctcttttgccttctttactaaaatgtctcaagatggacactgacgtcgttgtcctcacaacaggcgtcttggtgttgataaccatgctaccaatgattccacagtctgggaaacagcatcttcttgatttctttgacatttttggccgtctgtcatcatggtgcctgaagaaaccaggccacgtggcggaagtctatctcgtccatctccatgccagtgtgtacgcactctttcatcgcctttatggaatgtacccttgcaacttcgtctcctttttgcgttctcattacagtatgaaagaaaacctggagacttttgaagaagtggtcaagccaatgatggagcatgtgcgaattcatccggaattagtgactggatccaaggaccatgaactggaccctcgaaggtggaagagattagaaactcatgatgttgtgatcgagtgtgccaaaatctctctggatcccacagaagcctcatatgaagatggctattctgtgtctcaccaaatctcagcccgctttcctcatcgttcagccgatgtcaccaccagcccttatgctgacacacagaatagctatgggtgtgctacttctaccccttactccacgtctcggctgatgttgttaaatatgccagggcagctacctcagactctgagttccccatcgacacggctgataactgaaccaccacaagctactctttggagcccatctatggtttgtggtatgaccactcctccaacttctcctggaaatgtcccacctgatctgtcacacccttacagtaaagtctttggtacaactgcaggtggaaaaggaactcctctgggaaccccagcaacctctcctcctccagccccactctgtcattcggatgactacgtgcacatttcactcccccaggccacagtcacaccccccaggaaggaagagagaatggattctgcaagaccatgtctacacagacaacaccatcttctgaatgacagaggatcagaagagccacctggcagcaaaggttctgtcactctaagtgatcttccagggtttttaggtgatctggcctctgaagaagatagtattgaaaaagataaagaagaagctgcaatatctagagaactttctgagatcaccacagcagaggcagagcctgtggttcctcgaggaggctttgactctcccttttaccgagacagtctcccaggttctcagcggaagacccactcggcagcctccagttctcagggcgccagcgtgaaccctgagcctttacactcctccctggacaagcttgggcctgacacaccaaagcaagcctttactcccatagacctgccctgcggcagtgctgatgaaagccctgcgggagacagggaatgccagacttctttggagaccagtatcttcactcccagtccttgtaaaattccacctccgacgagagtgggctttggaagcgggcagcctcccccgtatgatcatctttttgaggtggcattgccaaagacagcccatcattttgtcatcaggaagactgaggagctgttaaagaaagcaaaaggaaacacagaggaagatggtgtgccctctacctccccaatggaagtgctggacagactgatacagcagggagcagacgcgcacagcaaggagctgaacaagttgcctttacccagcaagtctgtcgactggacccactttggaggctctcctccttcagatgagatccgcaccctccgagaccagttgcttttactgcacaaccagttactctatgagcgttttaagaggcagcagcatgccctccggaacaggcggctcctccgcaaggtgatcaaagcagcagctctggaggaacataatgctgccatgaaagatcagttgaagttacaagagaaggacatccagatgtggaaggttagtctgcagaaagaacaagctagatacaatcagctccaggagcagcgtgacactatggtaaccaagctccacagccagatcagacagctgcagcatgaccgagaggaattctacaaccagagccaggaattacagacgaagctggaggactgcaggaacatgattgcggagctgcggatagaactgaagaaggccaacaacaaggtgtgtcacactgagctgctgctcagtcaggtttcccaaaagctctcaaacagtgagtcggtccagcagcagatggagttcttgaacaggcagctgttggttcttggggaggtcaacgagctctatttggaacaactgcagaacaagcactcagataccacaaaggaagtagaaatgatgaaagccgcctatcggaaagagctagaaaaaaacagaagccatgttctccagcagactcagaggcttgatacctcccaaaaacggattttggaactggaatctcacctggccaagaaagaccaccttcttttggaacagaagaaatatctagaggatgtcaaactccaggcaagaggacagctgcaggccgcagagagcaggtatgaggctcagaaaaggataacccaggtgtttgaattggagatcttagatttatatggcaggttggagaaagatggcctcctgaaaaaacttgaagaagaaaaagcagaagcagctgaagcagcagaagaaaggcttgactgttgtaatgacgggtgctcagattccatggtagggcacaatgaagaggcatctggccacaacggtgagaccaagacccccaggcccagcagcgcccggggcagtagtggaagcagaggtggtggaggcagcagcagcagcagcagcgagctttctaccccagagaaacccccacaccagagggcaggcccattcagcagtcggtgggagacgactatgggagaagcgtctgccagcatccccaccactgtgggctcacttcccagttcaaaaagcttcctgggtatgaaggctcgagagttatttcgtaataagagcgagagccagtgtgatgaggacggcatgaccagtagcctttctgagagcctaaagacagaactgggcaaagacttgggtgtggaagccaagattcccctgaacctagatggccctcacccgtctcccccgaccccggacagtgttggacagctacatatcatggactacaatgagactcatcatgaacacagctaaggaatgatggtcaatcagtgttaacttgcatattgttggcacagaacaggaggtgtgaatgcacgtttcaaagctttcctgtttccagggtctgagtgcaagttcatgtgtggaaatgggacggaggtcctttggacagctgactgaatgcagaacggtttttggatctggcattgaaatgcctcttgaccttcccctccacccgccctaaccccctctcatttacctcgcagtgtgttctaatccaagggccagttggtgttcctcagtagctttactttcttccttcccccccaaatggttgcgtcctttgaacctgtgcaatatgaggccaaatttaatctttgagtctaacacaccactttctgctttcccgaagttcagataactgggttggctctcaattagaccaggtagtttgttgcattgcaggtaagtctggttttgtcccttccaggaggacatagcctgcaaagctggttgtctttacatgaaagcgtttacatgagactttccgactgcttttttgattctgaagttcagcatctaaagcagcaggtctagaagaacaacggtttattcatacttgcattcttttggcagttctgataagcttcctagaaagttctgtgtaaacagaagcctgtttcagaaatctggagctggcactgtggagaccacacaccctttgggaaagctcttgtctcttcttcccccactacctcttatttatttggtgtttgcttgaatgctggtactattgtgaccacaggctggtgtgtaggtggtaaaacctgttctccataggagggaaggagcagtcactgggagaggttacccgagaagcacttgagcatgaggaactgcacctttaggccatctcagcttgctgggccttttgttaaacccttctgtctactggcctccctttgtgtgcatacgcctcttgttcatgtcagcttatatgtgacactgcagcagaaaggctctgaaggtccaaagagtttctgcaaagtgtatgtgaccatcatttcccaggccattagggttgcctcactgtagcaggttctaggctaccagaagaggggcagctttttcataccaattccaactttcaggggctgactctccagggagctgatgtcatcacactctccatgttagtaatggcagagcagtctaaacagagtccgggagaatgctggcaaaggctggctgtgtatacccactaggctgccccacgtgctcccgagagatgacactagtcagaaaagtggcagtggcagagaatccaaactcaacaagtgctcctgaaagaaatgctagaagcctaagaactgtggtctggtgttccagctgaggcagggggatttggtaggaaggagccagtgaacttggctttcctgtttctatctttcattaaaaagaatagaaggattcagtcataaagaggtaaaaaactgtcacggtacgaaatcttagtgcctacggaggcctcgagcagaaagaatgaaagtcttttttttttttttttttttttagcatggcaataaatattctagcatccctaactaaaggggactagacagttagagactctgtcaccctagctataccagcagaaaacctgttcaggcaggctttctgggtgtgactgattcccagcctgtggcagggcgtggtcccaactactcagcctagcacaggctggcagttggtactgaattgtcagatgtggagtattagtgacaccacacatttaattcagctttgtccaaaggaaagcttaaaacccaatacagtctagtttcctggttccgttttagaaaaggaaaacgtgaacaaacttagaaagggaaggaaatcccatcagtgaatcctgaaactggttttaagtgctttccttctcctcatgcccaagagatctgtgccatagaacaagataccaggcacttaaagccttttcctgaattggaaaggaaaagaggcccaagtgcaaaagaaaaaacattttagaaacggacagcttataaaaataaagggaagaaaggaggcagcatggagagaggcctgtgctagaagctccatggacgtgtctgcacagggtcctcagctcatccatgcggcctgggtgtccttttactcagctttataacaaatgtggctccaagctcaggtgcctttgagttctaggaggctgtgggttttattcaactacggttgggagaatgagacctggagtcatgttgaaggtgcccaacctaaaaatgtaggctttcatgttgcaaagaactccagagtcagtagttaggtttggtttggttttggacatgataaacctgccaagagtcaacaggtcacttgatcatgctgcagtgggtagttctaaggatggaaaggtgacagtattactctcgagaggcaattcagtcctgggcaaaggtattagtacaataagcgttaagggcagagtctaccttgaaaccaattaagcagcttggtattcataaatattgggattggatggcctccatccagaaatcactatgggtgagcatacctgtctcagctgtttggccaatgtgcataacctactcggatccccacctgacactaaccagagtcagcacaggccccgaggagcccgaagtctgctgctgtgcagcatggaattcctttaaaaaggtgcactacagttttagcggggagggggataggaagacgcagagcaaatgagctccggagtccctgcaggtgaataaacacacagatctgcatctgatagaactttgatggattttcaaaaagccgttgacaaggctctgctatacagtctataaaaattgttattatgggattggaagaaacacgtggtcatgaatagaaaaaaaacaaacccaaaggtaggaaggtcaaggtcatttcttagatggagaagttgtgaaagatgtccttggagatgagttttaggaccagcattactaaggcaggtgggcagacagtgacctctctaggtgtgtccacagagtttttcaggagagaaaactgcctgacctttgggactaagctgcggaatcttcttactaagcttgaagagtggagaggcgagaggtgagctactttgtgagccaaagcttatgtgacatggttggggaaacagtccaaactgttctgagaaggtgaactgttacgacccaggacaattagaaaaattcacccaccatgccgcacattactgggtaaaagcagggcagcagggaacaaaactccagactcttgggccgtccccatttgcaacagcacacatagtttctggtatatttgttgggaaagataaaactctagcagttgttgaggggaggatgtataaaatggtcatggggatgaaaggatctctgagaccacagaggctcagactcactgttaagaatagaaaactgggtatgcgtttcatgtagccagcagaactgaagtgtgctgtgacaagccaatgtgaatttctaccaaatagtagagcataccacttgaagaaggaaagaaccgaagagcaaacaaaagttctgcgtaatgagactcaccttttctcgctgaaagcactaagaggtgggaggaggcctgcacaggctggaggagggtttgggcagagcgaagacccggccaggaccttggtgagatggagtgccgcccacctcctgcggatactcttggagagttgttcccccagggggctctgccccacctggagaaggaagctgcctggtgtggagtgactcaaatcagtatacctatctgctgcaccttcactctccagggtacatgctttaaaaccgacccgcaacaagtattggaaaaatgtatccagtctgaagatgtttgtgtatctgtttacatccagagttctgtgacacatgccccccagattgctgcaaagatcccaaggcattgattgcacttgattaagcttttgtctgtaggtgaaagaacaagtttaggtcgaggactggcccctaggctgctgctgtgacccttgtcccatgtggcttgtttgcctgtccgggactcttcgatgtgcccaggggagcgtgttcctgtctcttccatgccgtcctgcagtccttatctgctcgcctgagggaagagtagctgtagctacaagggaagcctgcctggaagagccgagcacctgtgcccatggcttctggtcatgaaacgagttaatgatggcagaggagcttcctccccacttcgcagcgccacattatccatcctctgagataagtaggctggtttaaccattggaatggacctttcagtggaaaccctgagagtctgagaacccccagaccaacccttccctccctttccccacctcttacagtgtttggacaggagggtatggtgctgctctgtgtagcaagtactttggcttatgaaagaggcagccacgcattttgcactaggaagaatcagtaatcacttttcagaagacttctatggaccacaaatatattacggaggaacagattttgctaagacataatctagttttataactcaatcatgaatgaaccatgtgtggcaaacttgcagtttaaaggggtcccatcagtgaaagaaactgattttttttaacggactgcttttagttaaattgaagaaagtcagctcttgtcaaaaggtctaaactttcccgcctcaatcctaaaagcatgtcaacaatccacatcagatgccataaatatgaactgcaggataaaatggtacaatcttagtgaatgggaattggaatcaaaagagtttgctgtccttcttagaatgttctaaaatgtcaaggcagttgcttgtgtttaactgtgaacaaataaaaatttattgttttgcacta

SEQ ID NO: 425519 - DNA, 523 bp, Homo sapiens
agcggggaacaatcacttagagtgacagagccatgtccagccttctctgttcagcatgaagagttattacagacatattctatacagtgtaagcagttttacacttacagggattacactgtatttctttgacttcagttgtctttgtttctcttcagaagagccacctggcagcaaaggttctgtcactctaagtgatcttccagggtttttaggtgatctggcctctgaagaagatagtattgaaaaagataaagaagaaggtaatgtatgtgggattgctatgagttgataaaacctgaccctcgctctgctataaatctgggattttgtgccattgctcacaggcttgctggatttttcttctcttgaggtaacaagatgggtggtttagtctgggacctatgccaggtaaagtgattgttccccgctagcggggaacaatcactttgggcatttttaagtgccagtctgggccttgaacgtccacatctgggacatcaatgtccactttggggccctt

SEQ ID NO: 425520 - DNA, 8554 bp, Homo sapiens
ttcacgacgggggaggtgctgtacgtccaagatggcggcgccctgtaggctggagggactgtgaggtaaacagctgagggggaggagacggtggtttggtagtggccccaatgaagaaccttcagaacctgtagcacacgtcctggagccagcacagcgccttcgagcgagagaatggcccaacaagcaaatgtcggggagcttcttgccatgctggactcccccatgctgggtgtgcgggacgacgtgacagctgtctttaaagagaacctcaattctgaccgtggccctatgcttgtaaacaccttggtggattattacctggaaaccagctctcagccggcattgcacatcctgaccaccttgcaagagccacatgacaagcacctcttggacaggattaacgaatatgtgggcaaagccgccactcgtttatccatcctctcgttactgggtcatgtcataagactgcagccatcttggaagcataagctctctcaagcacctcttttgccttctttactaaaatgtctcaagatggacactgacgtcgttgtcctcacaacaggcgtcttggtgttgataaccatgctaccaatgattccacagtctgggaaacagcatcttcttgatttctttgacatttttggccgtctgtcatcatggtgcctgaagaaaccaggccacgtggcggaagtctatctcgtccatctccatgccagtgtgtacgcactctttcatcgcctttatggaatgtacccttgcaacttcgtctcctttttgcgttctcattacagtatgaaagaaaacctggagacttttgaagaagtggtcaagccaatgatggagcatgtgcgaattcatccggaattagtgactggatccaaggaccatgaactggaccctcgaaggtggaagagattagaaactcatgatgttgtgatcgagtgtgccaaaatctctctggatcccacagaagcctcatatgaagatggctattctgtgtctcaccaaatctcagcccgctttcctcatcgttcagccgatgtcaccaccagcccttatgctgacacacagaatagctatgggtgtgctacttctaccccttactccacgtctcggctgatgttgttaaatatgccagggcagctacctcagactctgagttccccatcgacacggctgataactgaaccaccacaagctactctttggagcccatctatggtttgtggtatgaccactcctccaacttctcctggaaatgtcccacctgatctgtcacacccttacagtaaagtctttggtacaactgcaggtggaaaaggaactcctctgggaaccccagcaacctctcctcctccagccccactctgtcattcggatgactacgtgcacatttcactcccccaggccacagtcacaccccccaggaaggaagagagaatggattctgcaagaccatgtctacacagacaacaccatcttctgaatgacagaggatcagaagagccacctggcagcaaaggttctgtcactctaagtgatcttccagggtttttaggtgatctggcctctgaagaagatagtattgaaaaagataaagaagaagctgcaatatctagagaactttctgagatcaccacagcagaggcagagcctgtggttcctcgaggaggctttgactctcccttttaccgagacagtctcccaggttctcagcggaagacccactcggcagcctccagttctcagggcgccagcgtgaaccctgagcctttacactcctccctggacaagcttgggcctgacacaccaaagcaagcctttactcccatagacctgccctgcggcagtgctgatgaaagccctgcgggagacagggaatgccagacttctttggagaccagtatcttcactcccagtccttgtaaaattccacctccgacgagagtgggctttggaagcgggcagcctcccccgtatgatcatctttttgaggtggcattgccaaagacagcccatcattttgtcatcaggaagactgaggagctgttaaagaaagcaaaaggaaacacagaggaagatggtgtgccctctacctccccaatggaagtgctggacagactgatacagcagggagcagacgcgcacagcaaggagctgaacaagttgcctttacccagcaagtctgtcgactggacccactttggaggctctcctccttcagatgagatccgcaccctccgagaccagttgcttttactgcacaaccagttactctatgagcgttttaagaggcagcagcatgccctccggaacaggcggctcctccgcaaggtgatcaaagcagcagctctggaggaacataatgctgccatgaaagatcagttgaagttacaagagaaggacatccagatgtggaaggttagtctgcagaaagaacaagctagatacaatcagctccaggagcagcgtgacactatggtaaccaagctccacagccagatcagacagctgcagcatgaccgagaggaattctacaaccagagccaggaattacagacgaagctggaggactgcaggaacatgattgcggagctgcggatagaactgaagaaggccaacaacaaggtgtgtcacactgagctgctgctcagtcaggtttcccaaaagctctcaaacagtgagtcggtccagcagcagatggagttcttgaacaggcagctgttggttcttggggaggtcaacgagctctatttggaacaactgcagaacaagcactcagataccacaaaggaagtagaaatgatgaaagccgcctatcggaaagagctagaaaaaaacagaagccatgttctccagcagactcagaggcttgatacctcccaaaaacggattttggaactggaatctcacctggccaagaaagaccaccttcttttggaacagaagaaatatctagaggatgtcaaactccaggcaagaggacagctgcaggccgcagagagcaggtatgaggctcagaaaaggataacccaggtgtttgaattggagatcttagatttatatggcaggttggagaaagatggcctcctgaaaaaacttgaagaagaaaaagcagaagcagctgaagcagcagaagaaaggcttgactgttgtaatgacgggtgctcagattccatggtagggcacaatgaagaggcatctggccacaacggtgagaccaagacccccaggcccagcagcgcccggggcagtagtggaagcagaggtggtggaggcagcagcagcagcagcagcgagctttctaccccagagaaacccccacaccagagggcaggcccattcagcagtcggtgggagacgactatgggagaagcgtctgccagcatccccaccactgtgggctcacttcccagttcaaaaagcttcctgggtatgaaggctcgagagttatttcgtaataagagcgagagccagtgtgatgaggacggcatgaccagtagcctttctgagagcctaaagacagaactgggcaaagacttgggtgtggaagccaagattcccctgaacctagatggccctcacccgtctcccccgaccccggacagtgttggacagctacatatcatggactacaatgagactcatcatgaacacagctaaggaatgatggtcaatcagtgttaacttgcatattgttggcacagaacaggaggtgtgaatgcacgtttcaaagctttcctgtttccagggtctgagtgcaagttcatgtgtggaaatgggacggaggtcctttggacagctgactgaatgcagaacggtttttggatctggcattgaaatgcctcttgaccttcccctccacccgccctaaccccctctcatttacctcgcagtgtgttctaatccaagggccagttggtgttcctcagtagctttactttcttccttcccccccaaatggttgcgtcctttgaacctgtgcaatatgaggccaaatttaatctttgagtctaacacaccactttctgctttcccgaagttcagataactgggttggctctcaattagaccaggtagtttgttgcattgcaggtaagtctggttttgtcccttccaggaggacatagcctgcaaagctggttgtctttacatgaaagcgtttacatgagactttccgactgcttttttgattctgaagttcagcatctaaagcagcaggtctagaagaacaacggtttattcatacttgcattcttttggcagttctgataagcttcctagaaagttctgtgtaaacagaagcctgtttcagaaatctggagctggcactgtggagaccacacaccctttgggaaagctcttgtctcttcttcccccactacctcttatttatttggtgtttgcttgaatgctggtactattgtgaccacaggctggtgtgtaggtggtaaaacctgttctccataggagggaaggagcagtcactgggagaggttacccgagaagcacttgagcatgaggaactgcacctttaggccatctcagcttgctgggccttttgttaaacccttctgtctactggcctccctttgtgtgcatacgcctcttgttcatgtcagcttatatgtgacactgcagcagaaaggctctgaaggtccaaagagtttctgcaaagtgtatgtgaccatcatttcccaggccattagggttgcctcactgtagcaggttctaggctaccagaagaggggcagctttttcataccaattccaactttcaggggctgactctccagggagctgatgtcatcacactctccatgttagtaatggcagagcagtctaaacagagtccgggagaatgctggcaaaggctggctgtgtatacccactaggctgccccacgtgctcccgagagatgacactagtcagaaaagtggcagtggcagagaatccaaactcaacaagtgctcctgaaagaaatgctagaagcctaagaactgtggtctggtgttccagctgaggcagggggatttggtaggaaggagccagtgaacttggctttcctgtttctatctttcattaaaaagaatagaaggattcagtcataaagaggtaaaaaactgtcacggtacgaaatcttagtgcctacggaggcctcgagcagaaagaatgaaagtcttttttttttttttttttttttagcatggcaataaatattctagcatccctaactaaaggggactagacagttagagactctgtcaccctagctataccagcagaaaacctgttcaggcaggctttctgggtgtgactgattcccagcctgtggcagggcgtggtcccaactactcagcctagcacaggctggcagttggtactgaattgtcagatgtggagtattagtgacaccacacatttaattcagctttgtccaaaggaaagcttaaaacccaatacagtctagtttcctggttccgttttagaaaaggaaaacgtgaacaaacttagaaagggaaggaaatcccatcagtgaatcctgaaactggttttaagtgctttccttctcctcatgcccaagagatctgtgccatagaacaagataccaggcacttaaagccttttcctgaattggaaaggaaaagaggcccaagtgcaaaagaaaaaacattttagaaacggacagcttataaaaataaagggaagaaaggaggcagcatggagagaggcctgtgctagaagctccatggacgtgtctgcacagggtcctcagctcatccatgcggcctgggtgtccttttactcagctttataacaaatgtggctccaagctcaggtgcctttgagttctaggaggctgtgggttttattcaactacggttgggagaatgagacctggagtcatgttgaaggtgcccaacctaaaaatgtaggctttcatgttgcaaagaactccagagtcagtagttaggtttggtttggttttggacatgataaacctgccaagagtcaacaggtcacttgatcatgctgcagtgggtagttctaaggatggaaaggtgacagtattactctcgagaggcaattcagtcctgggcaaaggtattagtacaataagcgttaagggcagagtctaccttgaaaccaattaagcagcttggtattcataaatattgggattggatggcctccatccagaaatcactatgggtgagcatacctgtctcagctgtttggccaatgtgcataacctactcggatccccacctgacactaaccagagtcagcacaggccccgaggagcccgaagtctgctgctgtgcagcatggaattcctttaaaaaggtgcactacagttttagcggggagggggataggaagacgcagagcaaatgagctccggagtccctgcaggtgaataaacacacagatctgcatctgatagaactttgatggattttcaaaaagccgttgacaaggctctgctatacagtctataaaaattgttattatgggattggaagaaacacgtggtcatgaatagaaaaaaaacaaacccaaaggtaggaaggtcaaggtcatttcttagatggagaagttgtgaaagatgtccttggagatgagttttaggaccagcattactaaggcaggtgggcagacagtgacctctctaggtgtgtccacagagtttttcaggagagaaaactgcctgacctttgggactaagctgcggaatcttcttactaagcttgaagagtggagaggcgagaggtgagctactttgtgagccaaagcttatgtgacatggttggggaaacagtccaaactgttctgagaaggtgaactgttacgacccaggacaattagaaaaattcacccaccatgccgcacattactgggtaaaagcagggcagcagggaacaaaactccagactcttgggccgtccccatttgcaacagcacacatagtttctggtatatttgttgggaaagataaaactctagcagttgttgaggggaggatgtataaaatggtcatggggatgaaaggatctctgagaccacagaggctcagactcactgttaagaatagaaaactgggtatgcgtttcatgtagccagcagaactgaagtgtgctgtgacaagccaatgtgaatttctaccaaatagtagagcataccacttgaagaaggaaagaaccgaagagcaaacaaaagttctgcgtaatgagactcaccttttctcgctgaaagcactaagaggtgggaggaggcctgcacaggctggaggagggtttgggcagagcgaagacccggccaggaccttggtgagatggagtgccgcccacctcctgcggatactcttggagagttgttcccccagggggctctgccccacctggagaaggaagctgcctggtgtggagtgactcaaatcagtatacctatctgctgcaccttcactctccagggtacatgctttaaaaccgacccgcaacaagtattggaaaaatgtatccagtctgaagatgtttgtgtatctgtttacatccagagttctgtgacacatgccccccagattgctgcaaagatcccaaggcattgattgcacttgattaagcttttgtctgtaggtgaaagaacaagtttaggtcgaggactggcccctaggctgctgctgtgacccttgtcccatgtggcttgtttgcctgtccgggactcttcgatgtgcccaggggagcgtgttcctgtctcttccatgccgtcctgcagtccttatctgctcgcctgagggaagagtagctgtagctacaagggaagcctgcctggaagagccgagcacctgtgcccatggcttctggtcatgaaacgagttaatgatggcagaggagcttcctccccacttcgcagcgccacattatccatcctctgagataagtaggctggtttaaccattggaatggacctttcagtggaaaccctgagagtctgagaacccccagaccaacccttccctccctttccccacctcttacagtgtttggacaggagggtatggtgctgctctgtgtagcaagtactttggcttatgaaagaggcagccacgcattttgcactaggaagaatcagtaatcacttttcagaagacttctatggaccacaaatatattacggaggaacagattttgctaagacataatctagttttataactcaatcatgaatgaaccatgtgtggcaaacttgcagtttaaaggggtcccatcagtgaaagaaactgattttttttaacggactgcttttagttaaattgaagaaagtcagctcttgtcaaaaggtctaaactttcccgcctcaatcctaaaagcatgtcaacaatccacatcagatgccataaatatgaactgcaggataaaatggtacaatcttagtgaatgggaattggaatcaaaagagtttgctgtccttcttagaatgttctaaaatgtcaaggcagttgcttgtgtttaactgtgaacaaataaaaatttattgttttgcacta

SEQ ID NO: 425521 - DNA, 9265 bp, Homo sapiens
ttcacgacgggggaggtgctgtacgtccaagatggcggcgccctgtaggctggagggactgtgaggtaaacagctgagggggaggagacggtggtgaccatgaaagacaccaggttgacagcactggaaactgaagtaccagttgtcgctagaacagtttggtagtggccccaatgaagaaccttcagaacctgtagcacacgtcctggagccagcacagcgccttcgagcgagagaatggcccaacaagcaaatgtcggggagcttcttgccatgctggactcccccatgctgggtgtgcgggacgacgtgacagctgtctttaaagagaacctcaattctgaccgtggccctatgcttgtaaacaccttggtggattattacctggaaaccagctctcagccggcattgcacatcctgaccaccttgcaagagccacatgacaagcacctcttggacaggattaacgaatatgtgggcaaagccgccactcgtttatccatcctctcgttactgggtcatgtcataagactgcagccatcttggaagcataagctctctcaagcacctcttttgccttctttactaaaatgtctcaagatggacactgacgtcgttgtcctcacaacaggcgtcttggtgttgataaccatgctaccaatgattccacagtctgggaaacagcatcttcttgatttctttgacatttttggccgtctgtcatcatggtgcctgaagaaaccaggccacgtggcggaagtctatctcgtccatctccatgccagtgtgtacgcactctttcatcgcctttatggaatgtacccttgcaacttcgtctcctttttgcgttctcattacagtatgaaagaaaacctggagacttttgaagaagtggtcaagccaatgatggagcatgtgcgaattcatccggaattagtgactggatccaaggaccatgaactggaccctcgaaggtggaagagattagaaactcatgatgttgtgatcgagtgtgccaaaatctctctggatcccacagaagcctcatatgaagatggctattctgtgtctcaccaaatctcagcccgctttcctcatcgttcagccgatgtcaccaccagcccttatgctgacacacagaatagctatgggtgtgctacttctaccccttactccacgtctcggctgatgttgttaaatatgccagggcagctacctcagactctgagttccccatcgacacggctgataactgaaccaccacaagtatggtgtcaactagtgtgcctgctctctcctctgctttctggtgaagctgaccctttgggtcagatttagtatgtggttgggaaaatttcacactgctcatttcaggagtcacttttaaggatccatgatattagcaaagaaagttactgttgcctcttagattcatcttgaagtcttgatttacaaaatgcaacttgtttcttgatacgcttttaataagatgcctttttctagatgaaaaagctaaatttaagctgaacactggccatggatataaacctcgtggatgacttagcattcctttgccactgctgatgtactttattaacttcccaggctactctttggagcccatctatggtttgtggtatgaccactcctccaacttctcctggaaatgtcccacctgatctgtcacacccttacagtaaagtctttggtacaactggtatgtatgtcttaggttggatttgattagttggttttggcctgcctttaatggcaggaggagctctcttttagatctaagggaccacttgctgttgtaaacttgtttttgacacttattgcaaatccctggggctttcagaatgtgtaaagtgaacctaaaaacaaaaaagagagagactgatctagatccccagaaagttaactctagcagctttatttatagtaatagttataggctgaaaaaaaatcggcagtttttctaatagttgggctcagtgttcatatatgttctgcccttgtctctaagcaggtggaaaaggaactcctctgggaaccccagcaacctctcctcctccagccccactctgtcattcggatgactacgtgcacatttcactcccccaggccacagtcacaccccccaggaaggaagagagaatggattctgcaagaccatgtctacacagacaacaccatcttctgaatgacagaggatcagaagagccacctggcagcaaaggttctgtcactctaagtgatcttccagggtttttaggtgatctggcctctgaagaagatagtattgaaaaagataaagaagaagctgcaatatctagagaactttctgagatcaccacagcagaggcagagcctgtggttcctcgaggaggctttgactctcccttttaccgagacagtctcccaggttctcagcggaagacccactcggcagcctccagttctcagggcgccagcgtgaaccctgagcctttacactcctccctggacaagcttgggcctgacacaccaaagcaagcctttactcccatagacctgccctgcggcagtgctgatgaaagccctgcgggagacagggaatgccagacttctttggagaccagtatcttcactcccagtccttgtaaaattccacctccgacgagagtgggctttggaagcgggcagcctcccccgtatgatcatctttttgaggtggcattgccaaagacagcccatcattttgtcatcaggaagactgaggagctgttaaagaaagcaaaaggaaacacagaggaagatggtgtgccctctacctccccaatggaagtgctggacagactgatacagcagggagcagacgcgcacagcaaggagctgaacaagttgcctttacccagcaagtctgtcgactggacccactttggaggctctcctccttcagatgagatccgcaccctccgagaccagttgcttttactgcacaaccagttactctatgagcgttttaagaggcagcagcatgccctccggaacaggcggctcctccgcaaggtgatcaaagcagcagctctggaggaacataatgctgccatgaaagatcagttgaagttacaagagaaggacatccagatgtggaaggttagtctgcagaaagaacaagctagatacaatcagctccaggagcagcgtgacactatggtaaccaagctccacagccagatcagacagctgcagcatgaccgagaggaattctacaaccagagccaggaattacagacgaagctggaggactgcaggaacatgattgcggagctgcggatagaactgaagaaggccaacaacaaggtgtgtcacactgagctgctgctcagtcaggtttcccaaaagctctcaaacagtgagtcggtccagcagcagatggagttcttgaacaggcagctgttggttcttggggaggtcaacgagctctatttggaacaactgcagaacaagcactcagataccacaaaggaagtagaaatgatgaaagccgcctatcggaaagagctagaaaaaaacagaagccatgttctccagcagactcagaggcttgatacctcccaaaaacggattttggaactggaatctcacctggccaagaaagaccaccttcttttggaacagaagaaatatctagaggatgtcaaactccaggcaagaggacagctgcaggccgcagagagcaggtatgaggctcagaaaaggataacccaggtgtttgaattggagatcttagatttatatggcaggttggagaaagatggcctcctgaaaaaacttgaagaagaaaaagcagaagcagctgaagcagcagaagaaaggcttgactgttgtaatgacgggtgctcagattccatggtagggcacaatgaagaggcatctggccacaacggtgagaccaagacccccaggcccagcagcgcccggggcagtagtggaagcagaggtggtggaggcagcagcagcagcagcagcgagctttctaccccagagaaacccccacaccagagggcaggcccattcagcagtcggtgggagacgactatgggagaagcgtctgccagcatccccaccactgtgggctcacttcccagttcaaaaagcttcctgggtatgaaggctcgagagttatttcgtaataagagcgagagccagtgtgatgaggacggcatgaccagtagcctttctgagagcctaaagacagaactgggcaaagacttgggtgtggaagccaagattcccctgaacctagatggccctcacccgtctcccccgaccccggacagtgttggacagctacatatcatggactacaatgagactcatcatgaacacagctaaggaatgatggtcaatcagtgttaacttgcatattgttggcacagaacaggaggtgtgaatgcacgtttcaaagctttcctgtttccagggtctgagtgcaagttcatgtgtggaaatgggacggaggtcctttggacagctgactgaatgcagaacggtttttggatctggcattgaaatgcctcttgaccttcccctccacccgccctaaccccctctcatttacctcgcagtgtgttctaatccaagggccagttggtgttcctcagtagctttactttcttccttcccccccaaatggttgcgtcctttgaacctgtgcaatatgaggccaaatttaatctttgagtctaacacaccactttctgctttcccgaagttcagataactgggttggctctcaattagaccaggtagtttgttgcattgcaggtaagtctggttttgtcccttccaggaggacatagcctgcaaagctggttgtctttacatgaaagcgtttacatgagactttccgactgcttttttgattctgaagttcagcatctaaagcagcaggtctagaagaacaacggtttattcatacttgcattcttttggcagttctgataagcttcctagaaagttctgtgtaaacagaagcctgtttcagaaatctggagctggcactgtggagaccacacaccctttgggaaagctcttgtctcttcttcccccactacctcttatttatttggtgtttgcttgaatgctggtactattgtgaccacaggctggtgtgtaggtggtaaaacctgttctccataggagggaaggagcagtcactgggagaggttacccgagaagcacttgagcatgaggaactgcacctttaggccatctcagcttgctgggccttttgttaaacccttctgtctactggcctccctttgtgtgcatacgcctcttgttcatgtcagcttatatgtgacactgcagcagaaaggctctgaaggtccaaagagtttctgcaaagtgtatgtgaccatcatttcccaggccattagggttgcctcactgtagcaggttctaggctaccagaagaggggcagctttttcataccaattccaactttcaggggctgactctccagggagctgatgtcatcacactctccatgttagtaatggcagagcagtctaaacagagtccgggagaatgctggcaaaggctggctgtgtatacccactaggctgccccacgtgctcccgagagatgacactagtcagaaaagtggcagtggcagagaatccaaactcaacaagtgctcctgaaagaaatgctagaagcctaagaactgtggtctggtgttccagctgaggcagggggatttggtaggaaggagccagtgaacttggctttcctgtttctatctttcattaaaaagaatagaaggattcagtcataaagaggtaaaaaactgtcacggtacgaaatcttagtgcctacggaggcctcgagcagaaagaatgaaagtcttttttttttttttttttttttagcatggcaataaatattctagcatccctaactaaaggggactagacagttagagactctgtcaccctagctataccagcagaaaacctgttcaggcaggctttctgggtgtgactgattcccagcctgtggcagggcgtggtcccaactactcagcctagcacaggctggcagttggtactgaattgtcagatgtggagtattagtgacaccacacatttaattcagctttgtccaaaggaaagcttaaaacccaatacagtctagtttcctggttccgttttagaaaaggaaaacgtgaacaaacttagaaagggaaggaaatcccatcagtgaatcctgaaactggttttaagtgctttccttctcctcatgcccaagagatctgtgccatagaacaagataccaggcacttaaagccttttcctgaattggaaaggaaaagaggcccaagtgcaaaagaaaaaacattttagaaacggacagcttataaaaataaagggaagaaaggaggcagcatggagagaggcctgtgctagaagctccatggacgtgtctgcacagggtcctcagctcatccatgcggcctgggtgtccttttactcagctttataacaaatgtggctccaagctcaggtgcctttgagttctaggaggctgtgggttttattcaactacggttgggagaatgagacctggagtcatgttgaaggtgcccaacctaaaaatgtaggctttcatgttgcaaagaactccagagtcagtagttaggtttggtttggttttggacatgataaacctgccaagagtcaacaggtcacttgatcatgctgcagtgggtagttctaaggatggaaaggtgacagtattactctcgagaggcaattcagtcctgggcaaaggtattagtacaataagcgttaagggcagagtctaccttgaaaccaattaagcagcttggtattcataaatattgggattggatggcctccatccagaaatcactatgggtgagcatacctgtctcagctgtttggccaatgtgcataacctactcggatccccacctgacactaaccagagtcagcacaggccccgaggagcccgaagtctgctgctgtgcagcatggaattcctttaaaaaggtgcactacagttttagcggggagggggataggaagacgcagagcaaatgagctccggagtccctgcaggtgaataaacacacagatctgcatctgatagaactttgatggattttcaaaaagccgttgacaaggctctgctatacagtctataaaaattgttattatgggattggaagaaacacgtggtcatgaatagaaaaaaaacaaacccaaaggtaggaaggtcaaggtcatttcttagatggagaagttgtgaaagatgtccttggagatgagttttaggaccagcattactaaggcaggtgggcagacagtgacctctctaggtgtgtccacagagtttttcaggagagaaaactgcctgacctttgggactaagctgcggaatcttcttactaagcttgaagagtggagaggcgagaggtgagctactttgtgagccaaagcttatgtgacatggttggggaaacagtccaaactgttctgagaaggtgaactgttacgacccaggacaattagaaaaattcacccaccatgccgcacattactgggtaaaagcagggcagcagggaacaaaactccagactcttgggccgtccccatttgcaacagcacacatagtttctggtatatttgttgggaaagataaaactctagcagttgttgaggggaggatgtataaaatggtcatggggatgaaaggatctctgagaccacagaggctcagactcactgttaagaatagaaaactgggtatgcgtttcatgtagccagcagaactgaagtgtgctgtgacaagccaatgtgaatttctaccaaatagtagagcataccacttgaagaaggaaagaaccgaagagcaaacaaaagttctgcgtaatgagactcaccttttctcgctgaaagcactaagaggtgggaggaggcctgcacaggctggaggagggtttgggcagagcgaagacccggccaggaccttggtgagatggagtgccgcccacctcctgcggatactcttggagagttgttcccccagggggctctgccccacctggagaaggaagctgcctggtgtggagtgactcaaatcagtatacctatctgctgcaccttcactctccagggtacatgctttaaaaccgacccgcaacaagtattggaaaaatgtatccagtctgaagatgtttgtgtatctgtttacatccagagttctgtgacacatgccccccagattgctgcaaagatcccaaggcattgattgcacttgattaagcttttgtctgtaggtgaaagaacaagtttaggtcgaggactggcccctaggctgctgctgtgacccttgtcccatgtggcttgtttgcctgtccgggactcttcgatgtgcccaggggagcgtgttcctgtctcttccatgccgtcctgcagtccttatctgctcgcctgagggaagagtagctgtagctacaagggaagcctgcctggaagagccgagcacctgtgcccatggcttctggtcatgaaacgagttaatgatggcagaggagcttcctccccacttcgcagcgccacattatccatcctctgagataagtaggctggtttaaccattggaatggacctttcagtggaaaccctgagagtctgagaacccccagaccaacccttccctccctttccccacctcttacagtgtttggacaggagggtatggtgctgctctgtgtagcaagtactttggcttatgaaagaggcagccacgcattttgcactaggaagaatcagtaatcacttttcagaagacttctatggaccacaaatatattacggaggaacagattttgctaagacataatctagttttataactcaatcatgaatgaaccatgtgtggcaaacttgcagtttaaaggggtcccatcagtgaaagaaactgattttttttaacggactgcttttagttaaattgaagaaagtcagctcttgtcaaaaggtctaaactttcccgcctcaatcctaaaagcatgtcaacaatccacatcagatgccataaatatgaactgcaggataaaatggtacaatcttagtgaatgggaattggaatcaaaagagtttgctgtccttcttagaatgttctaaaatgtcaaggcagttgcttgtgtttaactgtgaacaaataaaaatttattgttttgcacta

SEQ ID NO: 425522 - DNA, 8080 bp, Homo sapiens
ggttggaagcattatgtctactcctcaggcacctctttgccttcttgactaaaaggtctcaagatggacactgacgtcgttgtcctcacaacaggcgtcttggtgttgataaccatgctaccaatgattccacagtctgggaaacagcatcttcttgatttctttgacatttttggccgtctgtcatcatggtgcctgaagaaaccaggccacgtggcggaagtctatctcgtccatctccatgccagtgtgtacgcactctttcatcgcctttatggaatgtacccttgcaacttcgtctcctttttgcgttctcattacagtatgaaagaaaacctggagacttttgaagaagtggtcaagccaatgatggagcatgtgcgaattcatccggaattagtgactggatccaaggaccatgaactggaccctcgaaggtggaagagattagaaactcatgatgttgtgatcgagtgtgccaaaatctctctggatcccacagaagcctcatatgaagatggctattctgtgtctcaccaaatctcagcccgctttcctcatcgttcagccgatgtcaccaccagcccttatgctgacacacagaatagctatgggtgtgctacttctaccccttactccacgtctcggctgatgttgttaaatatgccagggcagctacctcagactctgagttccccatcgacacggctgataactgaaccaccacaagctactctttggagcccatctatggtttgtggtatgaccactcctccaacttctcctggaaatgtcccacctgatctgtcacacccttacagtaaagtctttggtacaactgcaggtggaaaaggaactcctctgggaaccccagcaacctctcctcctccagccccactctgtcattcggatgactacgtgcacatttcactcccccaggccacagtcacaccccccaggaaggaagagagaatggattctgcaagaccatgtctacacagacaacaccatcttctgaatgacagaggatcagaagagccacctggcagcaaaggttctgtcactctaagtgatcttccagggtttttaggtgatctggcctctgaagaagatagtattgaaaaagataaagaagaagctgcaatatctagagaactttctgagatcaccacagcagaggcagagcctgtggttcctcgaggaggctttgactctcccttttaccgagacagtctcccaggttctcagcggaagacccactcggcagcctccagttctcagggcgccagcgtgaaccctgagcctttacactcctccctggacaagcttgggcctgacacaccaaagcaagcctttactcccatagacctgccctgcggcagtgctgatgaaagccctgcgggagacagggaatgccagacttctttggagaccagtatcttcactcccagtccttgtaaaattccacctccgacgagagtgggctttggaagcgggcagcctcccccgtatgatcatctttttgaggtggcattgccaaagacagcccatcattttgtcatcaggaagactgaggagctgttaaagaaagcaaaaggaaacacagaggaagatggtgtgccctctacctccccaatggaagtgctggacagactgatacagcagggagcagacgcgcacagcaaggagctgaacaagttgcctttacccagcaagtctgtcgactggacccactttggaggctctcctccttcagatgagatccgcaccctccgagaccagttgcttttactgcacaaccagttactctatgagcgttttaagaggcagcagcatgccctccggaacaggcggctcctccgcaaggtgatcaaagcagcagctctggaggaacataatgctgccatgaaagatcagttgaagttacaagagaaggacatccagatgtggaaggttagtctgcagaaagaacaagctagatacaatcagctccaggagcagcgtgacactatggtaaccaagctccacagccagatcagacagctgcagcatgaccgagaggaattctacaaccagagccaggaattacagacgaagctggaggactgcaggaacatgattgcggagctgcggatagaactgaagaaggccaacaacaaggtgtgtcacactgagctgctgctcagtcaggtttcccaaaagctctcaaacagtgagtcggtccagcagcagatggagttcttgaacaggcagctgttggttcttggggaggtcaacgagctctatttggaacaactgcagaacaagcactcagataccacaaaggaagtagaaatgatgaaagccgcctatcggaaagagctagaaaaaaacagaagccatgttctccagcagactcagaggcttgatacctcccaaaaacggattttggaactggaatctcacctggccaagaaagaccaccttcttttggaacagaagaaatatctagaggatgtcaaactccaggcaagaggacagctgcaggccgcagagagcaggtatgaggctcagaaaaggataacccaggtgtttgaattggagatcttagatttatatggcaggttggagaaagatggcctcctgaaaaaacttgaagaagaaaaagcagaagcagctgaagcagcagaagaaaggcttgactgttgtaatgacgggtgctcagattccatggtagggcacaatgaagaggcatctggccacaacggtgagaccaagacccccaggcccagcagcgcccggggcagtagtggaagcagaggtggtggaggcagcagcagcagcagcagcgagctttctaccccagagaaacccccacaccagagggcaggcccattcagcagtcggtgggagacgactatgggagaagcgtctgccagcatccccaccactgtgggctcacttcccagttcaaaaagcttcctgggtatgaaggctcgagagttatttcgtaataagagcgagagccagtgtgatgaggacggcatgaccagtagcctttctgagagcctaaagacagaactgggcaaagacttgggtgtggaagccaagattcccctgaacctagatggccctcacccgtctcccccgaccccggacagtgttggacagctacatatcatggactacaatgagactcatcatgaacacagctaaggaatgatggtcaatcagtgttaacttgcatattgttggcacagaacaggaggtgtgaatgcacgtttcaaagctttcctgtttccagggtctgagtgcaagttcatgtgtggaaatgggacggaggtcctttggacagctgactgaatgcagaacggtttttggatctggcattgaaatgcctcttgaccttcccctccacccgccctaaccccctctcatttacctcgcagtgtgttctaatccaagggccagttggtgttcctcagtagctttactttcttccttcccccccaaatggttgcgtcctttgaacctgtgcaatatgaggccaaatttaatctttgagtctaacacaccactttctgctttcccgaagttcagataactgggttggctctcaattagaccaggtagtttgttgcattgcaggtaagtctggttttgtcccttccaggaggacatagcctgcaaagctggttgtctttacatgaaagcgtttacatgagactttccgactgcttttttgattctgaagttcagcatctaaagcagcaggtctagaagaacaacggtttattcatacttgcattcttttggcagttctgataagcttcctagaaagttctgtgtaaacagaagcctgtttcagaaatctggagctggcactgtggagaccacacaccctttgggaaagctcttgtctcttcttcccccactacctcttatttatttggtgtttgcttgaatgctggtactattgtgaccacaggctggtgtgtaggtggtaaaacctgttctccataggagggaaggagcagtcactgggagaggttacccgagaagcacttgagcatgaggaactgcacctttaggccatctcagcttgctgggccttttgttaaacccttctgtctactggcctccctttgtgtgcatacgcctcttgttcatgtcagcttatatgtgacactgcagcagaaaggctctgaaggtccaaagagtttctgcaaagtgtatgtgaccatcatttcccaggccattagggttgcctcactgtagcaggttctaggctaccagaagaggggcagctttttcataccaattccaactttcaggggctgactctccagggagctgatgtcatcacactctccatgttagtaatggcagagcagtctaaacagagtccgggagaatgctggcaaaggctggctgtgtatacccactaggctgccccacgtgctcccgagagatgacactagtcagaaaagtggcagtggcagagaatccaaactcaacaagtgctcctgaaagaaatgctagaagcctaagaactgtggtctggtgttccagctgaggcagggggatttggtaggaaggagccagtgaacttggctttcctgtttctatctttcattaaaaagaatagaaggattcagtcataaagaggtaaaaaactgtcacggtacgaaatcttagtgcctacggaggcctcgagcagaaagaatgaaagtcttttttttttttttttttttttagcatggcaataaatattctagcatccctaactaaaggggactagacagttagagactctgtcaccctagctataccagcagaaaacctgttcaggcaggctttctgggtgtgactgattcccagcctgtggcagggcgtggtcccaactactcagcctagcacaggctggcagttggtactgaattgtcagatgtggagtattagtgacaccacacatttaattcagctttgtccaaaggaaagcttaaaacccaatacagtctagtttcctggttccgttttagaaaaggaaaacgtgaacaaacttagaaagggaaggaaatcccatcagtgaatcctgaaactggttttaagtgctttccttctcctcatgcccaagagatctgtgccatagaacaagataccaggcacttaaagccttttcctgaattggaaaggaaaagaggcccaagtgcaaaagaaaaaacattttagaaacggacagcttataaaaataaagggaagaaaggaggcagcatggagagaggcctgtgctagaagctccatggacgtgtctgcacagggtcctcagctcatccatgcggcctgggtgtccttttactcagctttataacaaatgtggctccaagctcaggtgcctttgagttctaggaggctgtgggttttattcaactacggttgggagaatgagacctggagtcatgttgaaggtgcccaacctaaaaatgtaggctttcatgttgcaaagaactccagagtcagtagttaggtttggtttggttttggacatgataaacctgccaagagtcaacaggtcacttgatcatgctgcagtgggtagttctaaggatggaaaggtgacagtattactctcgagaggcaattcagtcctgggcaaaggtattagtacaataagcgttaagggcagagtctaccttgaaaccaattaagcagcttggtattcataaatattgggattggatggcctccatccagaaatcactatgggtgagcatacctgtctcagctgtttggccaatgtgcataacctactcggatccccacctgacactaaccagagtcagcacaggccccgaggagcccgaagtctgctgctgtgcagcatggaattcctttaaaaaggtgcactacagttttagcggggagggggataggaagacgcagagcaaatgagctccggagtccctgcaggtgaataaacacacagatctgcatctgatagaactttgatggattttcaaaaagccgttgacaaggctctgctatacagtctataaaaattgttattatgggattggaagaaacacgtggtcatgaatagaaaaaaaacaaacccaaaggtaggaaggtcaaggtcatttcttagatggagaagttgtgaaagatgtccttggagatgagttttaggaccagcattactaaggcaggtgggcagacagtgacctctctaggtgtgtccacagagtttttcaggagagaaaactgcctgacctttgggactaagctgcggaatcttcttactaagcttgaagagtggagaggcgagaggtgagctactttgtgagccaaagcttatgtgacatggttggggaaacagtccaaactgttctgagaaggtgaactgttacgacccaggacaattagaaaaattcacccaccatgccgcacattactgggtaaaagcagggcagcagggaacaaaactccagactcttgggccgtccccatttgcaacagcacacatagtttctggtatatttgttgggaaagataaaactctagcagttgttgaggggaggatgtataaaatggtcatggggatgaaaggatctctgagaccacagaggctcagactcactgttaagaatagaaaactgggtatgcgtttcatgtagccagcagaactgaagtgtgctgtgacaagccaatgtgaatttctaccaaatagtagagcataccacttgaagaaggaaagaaccgaagagcaaacaaaagttctgcgtaatgagactcaccttttctcgctgaaagcactaagaggtgggaggaggcctgcacaggctggaggagggtttgggcagagcgaagacccggccaggaccttggtgagatggagtgccgcccacctcctgcggatactcttggagagttgttcccccagggggctctgccccacctggagaaggaagctgcctggtgtggagtgactcaaatcagtatacctatctgctgcaccttcactctccagggtacatgctttaaaaccgacccgcaacaagtattggaaaaatgtatccagtctgaagatgtttgtgtatctgtttacatccagagttctgtgacacatgccccccagattgctgcaaagatcccaaggcattgattgcacttgattaagcttttgtctgtaggtgaaagaacaagtttaggtcgaggactggcccctaggctgctgctgtgacccttgtcccatgtggcttgtttgcctgtccgggactcttcgatgtgcccaggggagcgtgttcctgtctcttccatgccgtcctgcagtccttatctgctcgcctgagggaagagtagctgtagctacaagggaagcctgcctggaagagccgagcacctgtgcccatggcttctggtcatgaaacgagttaatgatggcagaggagcttcctccccacttcgcagcgccacattatccatcctctgagataagtaggctggtttaaccattggaatggacctttcagtggaaaccctgagagtctgagaacccccagaccaacccttccctccctttccccacctcttacagtgtttggacaggagggtatggtgctgctctgtgtagcaagtactttggcttatgaaagaggcagccacgcattttgcactaggaagaatcagtaatcacttttcagaagacttctatggaccacaaatatattacggaggaacagattttgctaagacataatctagttttataactcaatcatgaatgaaccatgtgtggcaaacttgcagtttaaaggggtcccatcagtgaaagaaactgattttttttaacggactgcttttagttaaattgaagaaagtcagctcttgtcaaaaggtctaaactttcccgcctcaatcctaaaagcatgtcaacaatccacatcagatgccataaatatgaactgcaggataaaatggtacaatcttagtgaatgggaattggaatcaaaagagtttgctgtccttcttagaatgttctaaaatgtcaaggcagttgcttgtgtttaactgtgaacaaataaaaatttattgttttgcacta

SEQ ID NO: 425523 - DNA, 4500 bp, Homo sapiens
ttcacgacgggggaggtgctgtacgtccaagatggcggcgccctgtaggctggagggactgtgaggtaaacagctgagggggaggagacggtggtgaccatgaaagacaccaggttgacagcactggaaactgaagtaccagttgtcgctagaacagtttggtagtggccccaatgaagaaccttcagaacctgtagcacacgtcctggagccagcacagcgccttcgagcgagagaatggcccaacaagcaaatgtcggggagcttcttgccatgctggactcccccatgctgggtgtgcgggacgacgtgacagctgtctttaaagagaacctcaattctgaccgtggccctatgcttgtaaacaccttggtggattattacctggaaaccagctctcagccggcattgcacatcctgaccaccttgcaagagccacatgacaagcacctcttggacaggattaacgaatatgtgggcaaagccgccactcgtttatccatcctctcgttactgggtcatgtcataagactgcagccatcttggaagcataagctctctcaagcacctcttttgccttctttactaaaatgtctcaagatggacactgacgtcgttgtcctcacaacaggcgtcttggtgttgataaccatgctaccaatgattccacagtctgggaaacagcatcttcttgatttctttgacatttttggccgtctgtcatcatggtgcctgaagaaaccaggccacgtggcggaagtctatctcgtccatctccatgccagtgtgtacgcactctttcatcgcctttatggaatgtacccttgcaacttcgtctcctttttgcgttctcattacagtatgaaagaaaacctggagacttttgaagaagtggtcaagccaatgatggagcatgtgcgaattcatccggaattagtgactggatccaaggaccatgaactggaccctcgaaggtggaagagattagaaactcatgatgttgtgatcgagtgtgccaaaatctctctggatcccacagaagcctcatatgaagatggctattctgtgtctcaccaaatctcagcccgctttcctcatcgttcagccgatgtcaccaccagcccttatgctgacacacagaatagctatgggtgtgctacttctaccccttactccacgtctcggctgatgttgttaaatatgccagggcagctacctcagactctgagttccccatcgacacggctgataactgaaccaccacaagctactctttggagcccatctatggtttgtggtatgaccactcctccaacttctcctggaaatgtcccacctgatctgtcacacccttacagtaaagtctttggtacaactgcaggtggaaaaggaactcctctgggaaccccagcaacctctcctcctccagccccactctgtcattcggatgactacgtgcacatttcactcccccaggccacagtcacaccccccaggaaggaagagagaatggattctgcaagaccatgtctacacagacaacaccatcttctgaatgacagaggatcagaagagccacctggcagcaaaggttctgtcactctaagtgatcttccagggtttttaggtgatctggcctctgaagaagatagtattgaaaaagataaagaagaagctgcaatatctagagaactttctgagatcaccacagcagaggcagagcctgtggttcctcgaggaggctttgactctcccttttaccgagacagtctcccaggttctcagcggaagacccactcggcagcctccagttctcagggcgccagcgtgaaccctgagcctttacactcctccctggacaagcttgggcctgacacaccaaagcaagcctttactcccatagacctgccctgcggcagtgctgatgaaagccctgcgggagacagggaatgccagacttctttggagaccagtatcttcactcccagtccttgtaaaattccacctccgacgagagtgggctttggaagcgggcagcctcccccgtatgatcatctttttgaggtggcattgccaaagacagcccatcattttgtcatcaggaagactgaggagctgttaaagaaagcaaaaggaaacacagaggaagatggtgtgccctctacctccccaatggaagtgctggacagactgatacagcagggagcagacgcgcacagcaaggagctgaacaagttgcctttacccagcaagtctgtcgactggacccactttggaggctctcctccttcagatgagatccgcaccctccgagaccagttgcttttactgcacaaccagttactctatgagcgttttaagaggcagcagcatgccctccggaacaggcggctcctccgcaaggtgatcaaagcagcagctctggaggaacataatgctgccatgaaagatcagttgaagttacaagagaaggacatccagatgtggaaggttagtctgcagaaagaacaagctagatacaatcagctccaggagcagcgtgacactatggtaaccaagctccacagccagatcagacagctgcagcatgaccgagaggaattctacaaccagagccaggaattacagacgaagctggaggactgcaggaacatgattgcggagctgcggatagaactgaagaaggccaacaacaaggtgtgtcacactgagctgctgctcagtcaggtttcccaaaagctctcaaacagtgagtcggtccagcagcagatggagttcttgaacaggcagctgttggttcttggggaggtcaacgagctctatttggaacaactgcagaacaagcactcagataccacaaaggaagtagaaatgatgaaagccgcctatcggaaagagctagaaaaaaacagaagccatgttctccagcagactcagaggcttgatacctcccaaaaacggattttggaactggaatctcacctggccaagaaagaccaccttcttttggaacagaagaaatatctagaggatgtcaaactccaggcaagaggacagctgcaggccgcagagagcaggtatgaggctcagaaaaggataacccaggtgtttgaattggagatcttagatttatatggcaggttggagaaagatggcctcctgaaaaaacttgaagaagaaaaagcagaagcagctgaagcagcagaagaaaggcttgactgttgtaatgacgggtgctcagattccatggtagggcacaatgaagaggcatctggccacaacggtgagaccaagacccccaggcccagcagcgcccggggcagtagtggaagcagaggtggtggaggcagcagcagcagcagcagcgagctttctaccccagagaaacccccacaccagagggcaggcccattcagcagtcggtgggagacgactatgggagaagcgtctgccagcatccccaccactgtgggctcacttcccagttcaaaaagcttcctgggtatgaaggctcgagagttatttcgtaataagagcgagagccagtgtgatgaggacggcatgaccagtagcctttctgagagcctaaagacagaactgggcaaagacttgggtgtggaagccaagattcccctgaacctagatggccctcacccgtctcccccgaccccggacagtgttggacagctacatatcatggactacaatgagactcatcatgaacacagctaaggaatgatggtcaatcagtgttaacttgcatattgttggcacagaacaggaggtgtgaatgcacgtttcaaagctttcctgtttccagggtctgagtgcaagttcatgtgtggaaatgggacggaggtcctttggacagctgactgaatgcagaacggtttttggatctggcattgaaatgcctcttgaccttcccctccacccgccctaaccccctctcatttacctcgcagtgtgttctaatccaagggccagttggtgttaaaaaaaaaaaaaaaaaaaaaaaaaaaaaaaaaaaacaaagggggcaaaacaacacaaaaaaaacaaacaaaaaacaatggtgggggccaccgacccccggagaaatgttaaaaaccaaaggggggccgggcggcgccacaaaaagaaaagagcaaaaggaagcaaacgggttacacaggaaccacgtgggaaaaacaaaagggcgggagtcacaacacaaataaaaagcgacggggggaaccacagcggagctatgacgaacacaacacgagagagggagatctcgaggagcacaaaagggggggaacaaaacagaggaggctcacacaagaggggggagagaataaaaaaaaaaccggcagggagtgtaggggcggggaacagaacacccgaaaagaagagagagcacaagacacacaaacgcaggacacaagacaagacagacagagcaacagagacacaaatcggaggaagacgaaggacacacgaacacagacacaacaa

SEQ ID NO: 425524 - DNA, 1552 bp, Homo sapiens
ttcacgacgggggaggtgctgtacgtccaagatggcggcgccctgtaggctggagggactgtgaggtaaacagctgagggggaggagacggtggtgaccatgaaagacaccaggttgacagcactggaaactgaagtaccagttgtcgctagaacagtttggtagtggccccaatgaagaaccttcagaacctgtagcacacgtcctggagccagcacagcgccttcgagcgagagaatggcccaacaagcaaatgtcggggagcttcttgccatgctggactcccccatgctgggtgtgcgggacgacgtgacagctgtctttaaagagaacctcaattctgaccgtggccctatgcttgtaaacaccttggtggattattacctggaaaccagctctcagccggcattgcacatcctgaccaccttgcaagagccacatgacaagcacctcttggacaggattaacgaatatgtgggcaaagccgccactcgtttatccatcctctcgttactgggtcatgtcataagactgcagccatcttggaagcataagctctctcaagcacctcttttgccttctttactaaaatgtctcaagatggacactgacgtcgttgtcctcacaacaggcgtcttggtgttgataaccatgctaccaatgattccacagtctgggaaacagcatcttcttgatttctttgacatttttggccgtctgtcatcatggtgcctgaagaaaccaggccacgtggcggaagtctatctcgtccatctccatgccagtgtgtacgcactctttcatcgcctttatggaatgtacccttgcaacttcgtctcctttttgcgttctcattacagtatgaaagaaaacctggagacttttgaagaagtggtcaagccaatgatggagcatgtgcgaattcatccggaattagtgactggatccaaggaccatgaactggaccctcgaaggtggaagagattagaaactcatgatgttgtgatcgagtgtgccaaaatctctctggatcccacagaagcctcatatgaagatggctattctgtgtctcaccaaatctcagcccgctttcctcatcgttcagccgatgtcaccaccagcccttatgctgacacacagaatagctatgggtgtgctacttctaccccttactccacgtctcggctgatgttgttaaatatgccagggcagctacctcagactctgagttccccatcgacacggctgataactgaaccaccacaagctactctttggagcccatctatggtttgtggtatgaccactcctccaacttctcctggaaatgtcccacctgatctgtcacacccttacagtaaagtctttggtacaactgcaggtggaaaaggaactcctctgggaaccccagcaacctctcctcctccagccccactctgtcattcggatgactacgtgcacatttcactcccccaggccacagtcacaccccccaggaaggtgcgatccagctcgtctgctatccctctgcccaggcacagtgactcacttg

SEQ ID NO: 425525 - DNA, 8588 bp, Homo sapiens
ttcacgacgggggaggtgctgtacgtccaagatggcggcgccctgtaggctggagggactgtgagtgaccatgaaagacaccaggttgacagcactggaaactgaagtaccagttgtcgctagaacagtttggtagtggccccaatgaagaaccttcagaacctgtagcacacgtcctggagccagcacagcgccttcgagcgagagaatggcccaacaagcaaatgtcggggagcttcttgccatgctggactcccccatgctgggtgtgcgggacgacgtgacagctgtctttaaagagaacctcaattctgaccgtggccctatgcttgtaaacaccttggtggattattacctggaaaccagctctcagccggcattgcacatcctgaccaccttgcaagagccacatgacaagcacctcttggacaggattaacgaatatgtgggcaaagccgccactcgtttatccatcctctcgttactgggtcatgtcataagactgcagccatcttggaagcataagctctctcaagcacctcttttgccttctttactaaaatgtctcaagatggacactgacgtcgttgtcctcacaacaggcgtcttggtgttgataaccatgctaccaatgattccacagtctgggaaacagcatcttcttgatttctttgacatttttggccgtctgtcatcatggtgcctgaagaaaccaggccacgtggcggaagtctatctcgtccatctccatgccagtgtgtacgcactctttcatcgcctttatggaatgtacccttgcaacttcgtctcctttttgcgttctcattacagtatgaaagaaaacctggagacttttgaagaagtggtcaagccaatgatggagcatgtgcgaattcatccggaattagtgactggatccaaggaccatgaactggaccctcgaaggtggaagagattagaaactcatgatgttgtgatcgagtgtgccaaaatctctctggatcccacagaagcctcatatgaagatggctattctgtgtctcaccaaatctcagcccgctttcctcatcgttcagccgatgtcaccaccagcccttatgctgacacacagaatagctatgggtgtgctacttctaccccttactccacgtctcggctgatgttgttaaatatgccagggcagctacctcagactctgagttccccatcgacacggctgataactgaaccaccacaagctactctttggagcccatctatggtttgtggtatgaccactcctccaacttctcctggaaatgtcccacctgatctgtcacacccttacagtaaagtctttggtacaactgcaggtggaaaaggaactcctctgggaaccccagcaacctctcctcctccagccccactctgtcattcggatgactacgtgcacatttcactcccccaggccacagtcacaccccccaggaaggaagagagaatggattctgcaagaccatgtctacacagacaacaccatcttctgaatgacagaggatcagaagagccacctggcagcaaaggttctgtcactctaagtgatcttccagggtttttaggtgatctggcctctgaagaagatagtattgaaaaagataaagaagaagctgcaatatctagagaactttctgagatcaccacagcagaggcagagcctgtggttcctcgaggaggctttgactctcccttttaccgagacagtctcccaggttctcagcggaagacccactcggcagcctccagttctcagggcgccagcgtgaaccctgagcctttacactcctccctggacaagcttgggcctgacacaccaaagcaagcctttactcccatagacctgccctgcggcagtgctgatgaaagccctgcgggagacagggaatgccagacttctttggagaccagtatcttcactcccagtccttgtaaaattccacctccgacgagagtgggctttggaagcgggcagcctcccccgtatgatcatctttttgaggtggcattgccaaagacagcccatcattttgtcatcaggaagactgaggagctgttaaagaaagcaaaaggaaacacagaggaagatggtgtgccctctacctccccaatggaagtgctggacagactgatacagcagggagcagacgcgcacagcaaggagctgaacaagttgcctttacccagcaagtctgtcgactggacccactttggaggctctcctccttcagatgagatccgcaccctccgagaccagttgcttttactgcacaaccagttactctatgagcgttttaagaggcagcagcatgccctccggaacaggcggctcctccgcaaggtgatcaaagcagcagctctggaggaacataatgctgccatgaaagatcagttgaagttacaagagaaggacatccagatgtggaaggttagtctgcagaaagaacaagctagatacaatcagctccaggagcagcgtgacactatggtaaccaagctccacagccagatcagacagctgcagcatgaccgagaggaattctacaaccagagccaggaattacagacgaagctggaggactgcaggaacatgattgcggagctgcggatagaactgaagaaggccaacaacaaggtgtgtcacactgagctgctgctcagtcaggtttcccaaaagctctcaaacagtgagtcggtccagcagcagatggagttcttgaacaggcagctgttggttcttggggaggtcaacgagctctatttggaacaactgcagaacaagcactcagataccacaaaggaagtagaaatgatgaaagccgcctatcggaaagagctagaaaaaaacagaagccatgttctccagcagactcagaggcttgatacctcccaaaaacggattttggaactggaatctcacctggccaagaaagaccaccttcttttggaacagaagaaatatctagaggatgtcaaactccaggcaagaggacagctgcaggccgcagagagcaggtatgaggctcagaaaaggataacccaggtgtttgaattggagatcttagatttatatggcaggttggagaaagatggcctcctgaaaaaacttgaagaagaaaaagcagaagcagctgaagcagcagaagaaaggcttgactgttgtaatgacgggtgctcagattccatggtagggcacaatgaagaggcatctggccacaacggtgagaccaagacccccaggcccagcagcgcccggggcagtagtggaagcagaggtggtggaggcagcagcagcagcagcagcgagctttctaccccagagaaacccccacaccagagggcaggcccattcagcagtcggtgggagacgactatgggagaagcgtctgccagcatccccaccactgtgggctcacttcccagttcaaaaagcttcctgggtatgaaggctcgagagttatttcgtaataagagcgagagccagtgtgatgaggacggcatgaccagtagcctttctgagagcctaaagacagaactgggcaaagacttgggtgtggaagccaagattcccctgaacctagatggccctcacccgtctcccccgaccccggacagtgttggacagctacatatcatggactacaatgagactcatcatgaacacagctaaggaatgatggtcaatcagtgttaacttgcatattgttggcacagaacaggaggtgtgaatgcacgtttcaaagctttcctgtttccagggtctgagtgcaagttcatgtgtggaaatgggacggaggtcctttggacagctgactgaatgcagaacggtttttggatctggcattgaaatgcctcttgaccttcccctccacccgccctaaccccctctcatttacctcgcagtgtgttctaatccaagggccagttggtgttcctcagtagctttactttcttccttcccccccaaatggttgcgtcctttgaacctgtgcaatatgaggccaaatttaatctttgagtctaacacaccactttctgctttcccgaagttcagataactgggttggctctcaattagaccaggtagtttgttgcattgcaggtaagtctggttttgtcccttccaggaggacatagcctgcaaagctggttgtctttacatgaaagcgtttacatgagactttccgactgcttttttgattctgaagttcagcatctaaagcagcaggtctagaagaacaacggtttattcatacttgcattcttttggcagttctgataagcttcctagaaagttctgtgtaaacagaagcctgtttcagaaatctggagctggcactgtggagaccacacaccctttgggaaagctcttgtctcttcttcccccactacctcttatttatttggtgtttgcttgaatgctggtactattgtgaccacaggctggtgtgtaggtggtaaaacctgttctccataggagggaaggagcagtcactgggagaggttacccgagaagcacttgagcatgaggaactgcacctttaggccatctcagcttgctgggccttttgttaaacccttctgtctactggcctccctttgtgtgcatacgcctcttgttcatgtcagcttatatgtgacactgcagcagaaaggctctgaaggtccaaagagtttctgcaaagtgtatgtgaccatcatttcccaggccattagggttgcctcactgtagcaggttctaggctaccagaagaggggcagctttttcataccaattccaactttcaggggctgactctccagggagctgatgtcatcacactctccatgttagtaatggcagagcagtctaaacagagtccgggagaatgctggcaaaggctggctgtgtatacccactaggctgccccacgtgctcccgagagatgacactagtcagaaaagtggcagtggcagagaatccaaactcaacaagtgctcctgaaagaaatgctagaagcctaagaactgtggtctggtgttccagctgaggcagggggatttggtaggaaggagccagtgaacttggctttcctgtttctatctttcattaaaaagaatagaaggattcagtcataaagaggtaaaaaactgtcacggtacgaaatcttagtgcctacggaggcctcgagcagaaagaatgaaagtcttttttttttttttttttttttagcatggcaataaatattctagcatccctaactaaaggggactagacagttagagactctgtcaccctagctataccagcagaaaacctgttcaggcaggctttctgggtgtgactgattcccagcctgtggcagggcgtggtcccaactactcagcctagcacaggctggcagttggtactgaattgtcagatgtggagtattagtgacaccacacatttaattcagctttgtccaaaggaaagcttaaaacccaatacagtctagtttcctggttccgttttagaaaaggaaaacgtgaacaaacttagaaagggaaggaaatcccatcagtgaatcctgaaactggttttaagtgctttccttctcctcatgcccaagagatctgtgccatagaacaagataccaggcacttaaagccttttcctgaattggaaaggaaaagaggcccaagtgcaaaagaaaaaacattttagaaacggacagcttataaaaataaagggaagaaaggaggcagcatggagagaggcctgtgctagaagctccatggacgtgtctgcacagggtcctcagctcatccatgcggcctgggtgtccttttactcagctttataacaaatgtggctccaagctcaggtgcctttgagttctaggaggctgtgggttttattcaactacggttgggagaatgagacctggagtcatgttgaaggtgcccaacctaaaaatgtaggctttcatgttgcaaagaactccagagtcagtagttaggtttggtttggttttggacatgataaacctgccaagagtcaacaggtcacttgatcatgctgcagtgggtagttctaaggatggaaaggtgacagtattactctcgagaggcaattcagtcctgggcaaaggtattagtacaataagcgttaagggcagagtctaccttgaaaccaattaagcagcttggtattcataaatattgggattggatggcctccatccagaaatcactatgggtgagcatacctgtctcagctgtttggccaatgtgcataacctactcggatccccacctgacactaaccagagtcagcacaggccccgaggagcccgaagtctgctgctgtgcagcatggaattcctttaaaaaggtgcactacagttttagcggggagggggataggaagacgcagagcaaatgagctccggagtccctgcaggtgaataaacacacagatctgcatctgatagaactttgatggattttcaaaaagccgttgacaaggctctgctatacagtctataaaaattgttattatgggattggaagaaacacgtggtcatgaatagaaaaaaaacaaacccaaaggtaggaaggtcaaggtcatttcttagatggagaagttgtgaaagatgtccttggagatgagttttaggaccagcattactaaggcaggtgggcagacagtgacctctctaggtgtgtccacagagtttttcaggagagaaaactgcctgacctttgggactaagctgcggaatcttcttactaagcttgaagagtggagaggcgagaggtgagctactttgtgagccaaagcttatgtgacatggttggggaaacagtccaaactgttctgagaaggtgaactgttacgacccaggacaattagaaaaattcacccaccatgccgcacattactgggtaaaagcagggcagcagggaacaaaactccagactcttgggccgtccccatttgcaacagcacacatagtttctggtatatttgttgggaaagataaaactctagcagttgttgaggggaggatgtataaaatggtcatggggatgaaaggatctctgagaccacagaggctcagactcactgttaagaatagaaaactgggtatgcgtttcatgtagccagcagaactgaagtgtgctgtgacaagccaatgtgaatttctaccaaatagtagagcataccacttgaagaaggaaagaaccgaagagcaaacaaaagttctgcgtaatgagactcaccttttctcgctgaaagcactaagaggtgggaggaggcctgcacaggctggaggagggtttgggcagagcgaagacccggccaggaccttggtgagatggagtgccgcccacctcctgcggatactcttggagagttgttcccccagggggctctgccccacctggagaaggaagctgcctggtgtggagtgactcaaatcagtatacctatctgctgcaccttcactctccagggtacatgctttaaaaccgacccgcaacaagtattggaaaaatgtatccagtctgaagatgtttgtgtatctgtttacatccagagttctgtgacacatgccccccagattgctgcaaagatcccaaggcattgattgcacttgattaagcttttgtctgtaggtgaaagaacaagtttaggtcgaggactggcccctaggctgctgctgtgacccttgtcccatgtggcttgtttgcctgtccgggactcttcgatgtgcccaggggagcgtgttcctgtctcttccatgccgtcctgcagtccttatctgctcgcctgagggaagagtagctgtagctacaagggaagcctgcctggaagagccgagcacctgtgcccatggcttctggtcatgaaacgagttaatgatggcagaggagcttcctccccacttcgcagcgccacattatccatcctctgagataagtaggctggtttaaccattggaatggacctttcagtggaaaccctgagagtctgagaacccccagaccaacccttccctccctttccccacctcttacagtgtttggacaggagggtatggtgctgctctgtgtagcaagtactttggcttatgaaagaggcagccacgcattttgcactaggaagaatcagtaatcacttttcagaagacttctatggaccacaaatatattacggaggaacagattttgctaagacataatctagttttataactcaatcatgaatgaaccatgtgtggcaaacttgcagtttaaaggggtcccatcagtgaaagaaactgattttttttaacggactgcttttagttaaattgaagaaagtcagctcttgtcaaaaggtctaaactttcccgcctcaatcctaaaagcatgtcaacaatccacatcagatgccataaatatgaactgcaggataaaatggtacaatcttagtgaatgggaattggaatcaaaagagtttgctgtccttcttagaatgttctaaaatgtcaaggcagttgcttgtgtttaactgtgaacaaataaaaatttattgttttgcacta

SEQ ID NO: 425526 - DNA, 8857 bp, Homo sapiens
ggggctcagtgttctgttgagtctgtttgaatgttatcccttcagtaatccttagggatagggaaatgagtacgtgagtcaacttgtgatttgtgattctctcagtgtttagagcctcttcatgtactgtacaatgccgatcctggtgccagtgcctgacagacgtttcctgtttgaccttttctcctgcagatggacactgacgtcgttgtcctcacaacaggcgtcttggtgttgataaccatgctaccaatgattccacagtctgggaaacagcatcttcttgatttctttgacatttttggccgtctgtcatcatggtgcctgaagaaaccaggccacgtggcggaagtctatctcgtccatctccatgccagtgtgtacgcactctttcatcgcctttatggaatgtacccttgcaacttcgtctcctttttgcgttctcattacagtatgaaagaaaacctggagacttttgaagaagtggtcaagccaatgatggagcatgtgcgaattcatccggaattagtgactggatccaaggaccatgaactggaccctcgaaggtggaagagattagaaactcatgatgttgtgatcgagtgtgccaaaatctctctggatcccacagaagcctcatatgaagatggctattctgtgtctcaccaaatctcagcccgctttcctcatcgttcagccgatgtcaccaccagcccttatgctgacacacagaatagctatgggtgtgctacttctaccccttactccacgtctcggctgatgttgttaaatatgccagggcagctacctcagactctgagttccccatcgacacggctgataactgaaccaccacaagtatggtgtcaactagtgtgcctgctctctcctctgctttctggtgaagctgaccctttgggtcagatttagtatgtggttgggaaaatttcacactgctcatttcaggagtcacttttaaggatccatgatattagcaaagaaagttactgttgcctcttagattcatcttgaagtcttgatttacaaaatgcaacttgtttcttgatacgcttttaataagatgcctttttctagatgaaaaagctaaatttaagctgaacactggccatggatataaacctcgtggatgacttagcattcctttgccactgctgatgtactttattaacttcccaggctactctttggagcccatctatggtttgtggtatgaccactcctccaacttctcctggaaatgtcccacctgatctgtcacacccttacagtaaagtctttggtacaactggtatgtatgtcttaggttggatttgattagttggttttggcctgcctttaatggcaggaggagctctcttttagatctaagggaccacttgctgttgtaaacttgtttttgacacttattgcaaatccctggggctttcagaatgtgtaaagtgaacctaaaaacaaaaaagagagagactgatctagatccccagaaagttaactctagcagctttatttatagtaatagttataggctgaaaaaaaatcggcagtttttctaatagttgggctcagtgttcatatatgttctgcccttgtctctaagcaggtggaaaaggaactcctctgggaaccccagcaacctctcctcctccagccccactctgtcattcggatgactacgtgcacatttcactcccccaggccacagtcacaccccccaggaaggaagagagaatggattctgcaagaccatgtctacacagacaacaccatcttctgaatgacagaggatcagaagagccacctggcagcaaaggttctgtcactctaagtgatcttccagggtttttaggtgatctggcctctgaagaagatagtattgaaaaagataaagaagaagctgcaatatctagagaactttctgagatcaccacagcagaggcagagcctgtggttcctcgaggaggctttgactctcccttttaccgagacagtctcccaggttctcagcggaagacccactcggcagcctccagttctcagggcgccagcgtgaaccctgagcctttacactcctccctggacaagcttgggcctgacacaccaaagcaagcctttactcccatagacctgccctgcggcagtgctgatgaaagccctgcgggagacagggaatgccagacttctttggagaccagtatcttcactcccagtccttgtaaaattccacctccgacgagagtgggctttggaagcgggcagcctcccccgtatgatcatctttttgaggtggcattgccaaagacagcccatcattttgtcatcaggaagactgaggagctgttaaagaaagcaaaaggaaacacagaggaagatggtgtgccctctacctccccaatggaagtgctggacagactgatacagcagggagcagacgcgcacagcaaggagctgaacaagttgcctttacccagcaagtctgtcgactggacccactttggaggctctcctccttcagatgagatccgcaccctccgagaccagttgcttttactgcacaaccagttactctatgagcgttttaagaggcagcagcatgccctccggaacaggcggctcctccgcaaggtgatcaaagcagcagctctggaggaacataatgctgccatgaaagatcagttgaagttacaagagaaggacatccagatgtggaaggttagtctgcagaaagaacaagctagatacaatcagctccaggagcagcgtgacactatggtaaccaagctccacagccagatcagacagctgcagcatgaccgagaggaattctacaaccagagccaggaattacagacgaagctggaggactgcaggaacatgattgcggagctgcggatagaactgaagaaggccaacaacaaggtgtgtcacactgagctgctgctcagtcaggtttcccaaaagctctcaaacagtgagtcggtccagcagcagatggagttcttgaacaggcagctgttggttcttggggaggtcaacgagctctatttggaacaactgcagaacaagcactcagataccacaaaggaagtagaaatgatgaaagccgcctatcggaaagagctagaaaaaaacagaagccatgttctccagcagactcagaggcttgatacctcccaaaaacggattttggaactggaatctcacctggccaagaaagaccaccttcttttggaacagaagaaatatctagaggatgtcaaactccaggcaagaggacagctgcaggccgcagagagcaggtatgaggctcagaaaaggataacccaggtgtttgaattggagatcttagatttatatggcaggttggagaaagatggcctcctgaaaaaacttgaagaagaaaaagcagaagcagctgaagcagcagaagaaaggcttgactgttgtaatgacgggtgctcagattccatggtagggcacaatgaagaggcatctggccacaacggtgagaccaagacccccaggcccagcagcgcccggggcagtagtggaagcagaggtggtggaggcagcagcagcagcagcagcgagctttctaccccagagaaacccccacaccagagggcaggcccattcagcagtcggtgggagacgactatgggagaagcgtctgccagcatccccaccactgtgggctcacttcccagttcaaaaagcttcctgggtatgaaggctcgagagttatttcgtaataagagcgagagccagtgtgatgaggacggcatgaccagtagcctttctgagagcctaaagacagaactgggcaaagacttgggtgtggaagccaagattcccctgaacctagatggccctcacccgtctcccccgaccccggacagtgttggacagctacatatcatggactacaatgagactcatcatgaacacagctaaggaatgatggtcaatcagtgttaacttgcatattgttggcacagaacaggaggtgtgaatgcacgtttcaaagctttcctgtttccagggtctgagtgcaagttcatgtgtggaaatgggacggaggtcctttggacagctgactgaatgcagaacggtttttggatctggcattgaaatgcctcttgaccttcccctccacccgccctaaccccctctcatttacctcgcagtgtgttctaatccaagggccagttggtgttcctcagtagctttactttcttccttcccccccaaatggttgcgtcctttgaacctgtgcaatatgaggccaaatttaatctttgagtctaacacaccactttctgctttcccgaagttcagataactgggttggctctcaattagaccaggtagtttgttgcattgcaggtaagtctggttttgtcccttccaggaggacatagcctgcaaagctggttgtctttacatgaaagcgtttacatgagactttccgactgcttttttgattctgaagttcagcatctaaagcagcaggtctagaagaacaacggtttattcatacttgcattcttttggcagttctgataagcttcctagaaagttctgtgtaaacagaagcctgtttcagaaatctggagctggcactgtggagaccacacaccctttgggaaagctcttgtctcttcttcccccactacctcttatttatttggtgtttgcttgaatgctggtactattgtgaccacaggctggtgtgtaggtggtaaaacctgttctccataggagggaaggagcagtcactgggagaggttacccgagaagcacttgagcatgaggaactgcacctttaggccatctcagcttgctgggccttttgttaaacccttctgtctactggcctccctttgtgtgcatacgcctcttgttcatgtcagcttatatgtgacactgcagcagaaaggctctgaaggtccaaagagtttctgcaaagtgtatgtgaccatcatttcccaggccattagggttgcctcactgtagcaggttctaggctaccagaagaggggcagctttttcataccaattccaactttcaggggctgactctccagggagctgatgtcatcacactctccatgttagtaatggcagagcagtctaaacagagtccgggagaatgctggcaaaggctggctgtgtatacccactaggctgccccacgtgctcccgagagatgacactagtcagaaaagtggcagtggcagagaatccaaactcaacaagtgctcctgaaagaaatgctagaagcctaagaactgtggtctggtgttccagctgaggcagggggatttggtaggaaggagccagtgaacttggctttcctgtttctatctttcattaaaaagaatagaaggattcagtcataaagaggtaaaaaactgtcacggtacgaaatcttagtgcctacggaggcctcgagcagaaagaatgaaagtcttttttttttttttttttttttagcatggcaataaatattctagcatccctaactaaaggggactagacagttagagactctgtcaccctagctataccagcagaaaacctgttcaggcaggctttctgggtgtgactgattcccagcctgtggcagggcgtggtcccaactactcagcctagcacaggctggcagttggtactgaattgtcagatgtggagtattagtgacaccacacatttaattcagctttgtccaaaggaaagcttaaaacccaatacagtctagtttcctggttccgttttagaaaaggaaaacgtgaacaaacttagaaagggaaggaaatcccatcagtgaatcctgaaactggttttaagtgctttccttctcctcatgcccaagagatctgtgccatagaacaagataccaggcacttaaagccttttcctgaattggaaaggaaaagaggcccaagtgcaaaagaaaaaacattttagaaacggacagcttataaaaataaagggaagaaaggaggcagcatggagagaggcctgtgctagaagctccatggacgtgtctgcacagggtcctcagctcatccatgcggcctgggtgtccttttactcagctttataacaaatgtggctccaagctcaggtgcctttgagttctaggaggctgtgggttttattcaactacggttgggagaatgagacctggagtcatgttgaaggtgcccaacctaaaaatgtaggctttcatgttgcaaagaactccagagtcagtagttaggtttggtttggttttggacatgataaacctgccaagagtcaacaggtcacttgatcatgctgcagtgggtagttctaaggatggaaaggtgacagtattactctcgagaggcaattcagtcctgggcaaaggtattagtacaataagcgttaagggcagagtctaccttgaaaccaattaagcagcttggtattcataaatattgggattggatggcctccatccagaaatcactatgggtgagcatacctgtctcagctgtttggccaatgtgcataacctactcggatccccacctgacactaaccagagtcagcacaggccccgaggagcccgaagtctgctgctgtgcagcatggaattcctttaaaaaggtgcactacagttttagcggggagggggataggaagacgcagagcaaatgagctccggagtccctgcaggtgaataaacacacagatctgcatctgatagaactttgatggattttcaaaaagccgttgacaaggctctgctatacagtctataaaaattgttattatgggattggaagaaacacgtggtcatgaatagaaaaaaaacaaacccaaaggtaggaaggtcaaggtcatttcttagatggagaagttgtgaaagatgtccttggagatgagttttaggaccagcattactaaggcaggtgggcagacagtgacctctctaggtgtgtccacagagtttttcaggagagaaaactgcctgacctttgggactaagctgcggaatcttcttactaagcttgaagagtggagaggcgagaggtgagctactttgtgagccaaagcttatgtgacatggttggggaaacagtccaaactgttctgagaaggtgaactgttacgacccaggacaattagaaaaattcacccaccatgccgcacattactgggtaaaagcagggcagcagggaacaaaactccagactcttgggccgtccccatttgcaacagcacacatagtttctggtatatttgttgggaaagataaaactctagcagttgttgaggggaggatgtataaaatggtcatggggatgaaaggatctctgagaccacagaggctcagactcactgttaagaatagaaaactgggtatgcgtttcatgtagccagcagaactgaagtgtgctgtgacaagccaatgtgaatttctaccaaatagtagagcataccacttgaagaaggaaagaaccgaagagcaaacaaaagttctgcgtaatgagactcaccttttctcgctgaaagcactaagaggtgggaggaggcctgcacaggctggaggagggtttgggcagagcgaagacccggccaggaccttggtgagatggagtgccgcccacctcctgcggatactcttggagagttgttcccccagggggctctgccccacctggagaaggaagctgcctggtgtggagtgactcaaatcagtatacctatctgctgcaccttcactctccagggtacatgctttaaaaccgacccgcaacaagtattggaaaaatgtatccagtctgaagatgtttgtgtatctgtttacatccagagttctgtgacacatgccccccagattgctgcaaagatcccaaggcattgattgcacttgattaagcttttgtctgtaggtgaaagaacaagtttaggtcgaggactggcccctaggctgctgctgtgacccttgtcccatgtggcttgtttgcctgtccgggactcttcgatgtgcccaggggagcgtgttcctgtctcttccatgccgtcctgcagtccttatctgctcgcctgagggaagagtagctgtagctacaagggaagcctgcctggaagagccgagcacctgtgcccatggcttctggtcatgaaacgagttaatgatggcagaggagcttcctccccacttcgcagcgccacattatccatcctctgagataagtaggctggtttaaccattggaatggacctttcagtggaaaccctgagagtctgagaacccccagaccaacccttccctccctttccccacctcttacagtgtttggacaggagggtatggtgctgctctgtgtagcaagtactttggcttatgaaagaggcagccacgcattttgcactaggaagaatcagtaatcacttttcagaagacttctatggaccacaaatatattacggaggaacagattttgctaagacataatctagttttataactcaatcatgaatgaaccatgtgtggcaaacttgcagtttaaaggggtcccatcagtgaaagaaactgattttttttaacggactgcttttagttaaattgaagaaagtcagctcttgtcaaaaggtctaaactttcccgcctcaatcctaaaagcatgtcaacaatccacatcagatgccataaatatgaactgcaggataaaatggtacaatcttagtgaatgggaattggaatcaaaagagtttgctgtccttcttagaatgttctaaaatgtcaaggcagttgcttgtgtttaactgtgaacaaataaaaatttattgttttgcacta

SEQ ID NO: 425527 - DNA, 7205 bp, Homo sapiens
agcggggaacaatcacttagagtgacagagccatgtccagccttctctgttcagcatgaagagttattacagacatattctatacagtgtaagcagttttacacttacagggattacactgtatttctttgacttcagttgtctttgtttctcttcagaagagccacctggcagcaaaggttctgtcactctaagtgatcttccagggtttttaggtgatctggcctctgaagaagatagtattgaaaaagataaagaagaagctgcaatatctagagaactttctgagatcaccacagcagaggcagagcctgtggttcctcgaggaggctttgactctcccttttaccgagacagtctcccaggttctcagcggaagacccactcggcagcctccagttctcagggcgccagcgtgaaccctgagcctttacactcctccctggacaagcttgggcctgacacaccaaagcaagcctttactcccatagacctgccctgcggcagtgctgatgaaagccctgcgggagacagggaatgccagacttctttggagaccagtatcttcactcccagtccttgtaaaattccacctccgacgagagtgggctttggaagcgggcagcctcccccgtatgatcatctttttgaggtggcattgccaaagacagcccatcattttgtcatcaggaagactgaggagctgttaaagaaagcaaaaggaaacacagaggaagatggtgtgccctctacctccccaatggaagtgctggacagactgatacagcagggagcagacgcgcacagcaaggagctgaacaagttgcctttacccagcaagtctgtcgactggacccactttggaggctctcctccttcagatgagatccgcaccctccgagaccagttgcttttactgcacaaccagttactctatgagcgttttaagaggcagcagcatgccctccggaacaggcggctcctccgcaaggtgatcaaagcagcagctctggaggaacataatgctgccatgaaagatcagttgaagttacaagagaaggacatccagatgtggaaggttagtctgcagaaagaacaagctagatacaatcagctccaggagcagcgtgacactatggtaaccaagctccacagccagatcagacagctgcagcatgaccgagaggaattctacaaccagagccaggaattacagacgaagctggaggactgcaggaacatgattgcggagctgcggatagaactgaagaaggccaacaacaaggtgtgtcacactgagctgctgctcagtcaggtttcccaaaagctctcaaacagtgagtcggtccagcagcagatggagttcttgaacaggcagctgttggttcttggggaggtcaacgagctctatttggaacaactgcagaacaagcactcagataccacaaaggaagtagaaatgatgaaagccgcctatcggaaagagctagaaaaaaacagaagccatgttctccagcagactcagaggcttgatacctcccaaaaacggattttggaactggaatctcacctggccaagaaagaccaccttcttttggaacagaagaaatatctagaggatgtcaaactccaggcaagaggacagctgcaggccgcagagagcaggtatgaggctcagaaaaggataacccaggtgtttgaattggagatcttagatttatatggcaggttggagaaagatggcctcctgaaaaaacttgaagaagaaaaagcagaagcagctgaagcagcagaagaaaggcttgactgttgtaatgacgggtgctcagattccatggtagggcacaatgaagaggcatctggccacaacggtgagaccaagacccccaggcccagcagcgcccggggcagtagtggaagcagaggtggtggaggcagcagcagcagcagcagcgagctttctaccccagagaaacccccacaccagagggcaggcccattcagcagtcggtgggagacgactatgggagaagcgtctgccagcatccccaccactgtgggctcacttcccagttcaaaaagcttcctgggtatgaaggctcgagagttatttcgtaataagagcgagagccagtgtgatgaggacggcatgaccagtagcctttctgagagcctaaagacagaactgggcaaagacttgggtgtggaagccaagattcccctgaacctagatggccctcacccgtctcccccgaccccggacagtgttggacagctacatatcatggactacaatgagactcatcatgaacacagctaaggaatgatggtcaatcagtgttaacttgcatattgttggcacagaacaggaggtgtgaatgcacgtttcaaagctttcctgtttccagggtctgagtgcaagttcatgtgtggaaatgggacggaggtcctttggacagctgactgaatgcagaacggtttttggatctggcattgaaatgcctcttgaccttcccctccacccgccctaaccccctctcatttacctcgcagtgtgttctaatccaagggccagttggtgttcctcagtagctttactttcttccttcccccccaaatggttgcgtcctttgaacctgtgcaatatgaggccaaatttaatctttgagtctaacacaccactttctgctttcccgaagttcagataactgggttggctctcaattagaccaggtagtttgttgcattgcaggtaagtctggttttgtcccttccaggaggacatagcctgcaaagctggttgtctttacatgaaagcgtttacatgagactttccgactgcttttttgattctgaagttcagcatctaaagcagcaggtctagaagaacaacggtttattcatacttgcattcttttggcagttctgataagcttcctagaaagttctgtgtaaacagaagcctgtttcagaaatctggagctggcactgtggagaccacacaccctttgggaaagctcttgtctcttcttcccccactacctcttatttatttggtgtttgcttgaatgctggtactattgtgaccacaggctggtgtgtaggtggtaaaacctgttctccataggagggaaggagcagtcactgggagaggttacccgagaagcacttgagcatgaggaactgcacctttaggccatctcagcttgctgggccttttgttaaacccttctgtctactggcctccctttgtgtgcatacgcctcttgttcatgtcagcttatatgtgacactgcagcagaaaggctctgaaggtccaaagagtttctgcaaagtgtatgtgaccatcatttcccaggccattagggttgcctcactgtagcaggttctaggctaccagaagaggggcagctttttcataccaattccaactttcaggggctgactctccagggagctgatgtcatcacactctccatgttagtaatggcagagcagtctaaacagagtccgggagaatgctggcaaaggctggctgtgtatacccactaggctgccccacgtgctcccgagagatgacactagtcagaaaagtggcagtggcagagaatccaaactcaacaagtgctcctgaaagaaatgctagaagcctaagaactgtggtctggtgttccagctgaggcagggggatttggtaggaaggagccagtgaacttggctttcctgtttctatctttcattaaaaagaatagaaggattcagtcataaagaggtaaaaaactgtcacggtacgaaatcttagtgcctacggaggcctcgagcagaaagaatgaaagtcttttttttttttttttttttttagcatggcaataaatattctagcatccctaactaaaggggactagacagttagagactctgtcaccctagctataccagcagaaaacctgttcaggcaggctttctgggtgtgactgattcccagcctgtggcagggcgtggtcccaactactcagcctagcacaggctggcagttggtactgaattgtcagatgtggagtattagtgacaccacacatttaattcagctttgtccaaaggaaagcttaaaacccaatacagtctagtttcctggttccgttttagaaaaggaaaacgtgaacaaacttagaaagggaaggaaatcccatcagtgaatcctgaaactggttttaagtgctttccttctcctcatgcccaagagatctgtgccatagaacaagataccaggcacttaaagccttttcctgaattggaaaggaaaagaggcccaagtgcaaaagaaaaaacattttagaaacggacagcttataaaaataaagggaagaaaggaggcagcatggagagaggcctgtgctagaagctccatggacgtgtctgcacagggtcctcagctcatccatgcggcctgggtgtccttttactcagctttataacaaatgtggctccaagctcaggtgcctttgagttctaggaggctgtgggttttattcaactacggttgggagaatgagacctggagtcatgttgaaggtgcccaacctaaaaatgtaggctttcatgttgcaaagaactccagagtcagtagttaggtttggtttggttttggacatgataaacctgccaagagtcaacaggtcacttgatcatgctgcagtgggtagttctaaggatggaaaggtgacagtattactctcgagaggcaattcagtcctgggcaaaggtattagtacaataagcgttaagggcagagtctaccttgaaaccaattaagcagcttggtattcataaatattgggattggatggcctccatccagaaatcactatgggtgagcatacctgtctcagctgtttggccaatgtgcataacctactcggatccccacctgacactaaccagagtcagcacaggccccgaggagcccgaagtctgctgctgtgcagcatggaattcctttaaaaaggtgcactacagttttagcggggagggggataggaagacgcagagcaaatgagctccggagtccctgcaggtgaataaacacacagatctgcatctgatagaactttgatggattttcaaaaagccgttgacaaggctctgctatacagtctataaaaattgttattatgggattggaagaaacacgtggtcatgaatagaaaaaaaacaaacccaaaggtaggaaggtcaaggtcatttcttagatggagaagttgtgaaagatgtccttggagatgagttttaggaccagcattactaaggcaggtgggcagacagtgacctctctaggtgtgtccacagagtttttcaggagagaaaactgcctgacctttgggactaagctgcggaatcttcttactaagcttgaagagtggagaggcgagaggtgagctactttgtgagccaaagcttatgtgacatggttggggaaacagtccaaactgttctgagaaggtgaactgttacgacccaggacaattagaaaaattcacccaccatgccgcacattactgggtaaaagcagggcagcagggaacaaaactccagactcttgggccgtccccatttgcaacagcacacatagtttctggtatatttgttgggaaagataaaactctagcagttgttgaggggaggatgtataaaatggtcatggggatgaaaggatctctgagaccacagaggctcagactcactgttaagaatagaaaactgggtatgcgtttcatgtagccagcagaactgaagtgtgctgtgacaagccaatgtgaatttctaccaaatagtagagcataccacttgaagaaggaaagaaccgaagagcaaacaaaagttctgcgtaatgagactcaccttttctcgctgaaagcactaagaggtgggaggaggcctgcacaggctggaggagggtttgggcagagcgaagacccggccaggaccttggtgagatggagtgccgcccacctcctgcggatactcttggagagttgttcccccagggggctctgccccacctggagaaggaagctgcctggtgtggagtgactcaaatcagtatacctatctgctgcaccttcactctccagggtacatgctttaaaaccgacccgcaacaagtattggaaaaatgtatccagtctgaagatgtttgtgtatctgtttacatccagagttctgtgacacatgccccccagattgctgcaaagatcccaaggcattgattgcacttgattaagcttttgtctgtaggtgaaagaacaagtttaggtcgaggactggcccctaggctgctgctgtgacccttgtcccatgtggcttgtttgcctgtccgggactcttcgatgtgcccaggggagcgtgttcctgtctcttccatgccgtcctgcagtccttatctgctcgcctgagggaagagtagctgtagctacaagggaagcctgcctggaagagccgagcacctgtgcccatggcttctggtcatgaaacgagttaatgatggcagaggagcttcctccccacttcgcagcgccacattatccatcctctgagataagtaggctggtttaaccattggaatggacctttcagtggaaaccctgagagtctgagaacccccagaccaacccttccctccctttccccacctcttacagtgtttggacaggagggtatggtgctgctctgtgtagcaagtactttggcttatgaaagaggcagccacgcattttgcactaggaagaatcagtaatcacttttcagaagacttctatggaccacaaatatattacggaggaacagattttgctaagacataatctagttttataactcaatcatgaatgaaccatgtgtggcaaacttgcagtttaaaggggtcccatcagtgaaagaaactgattttttttaacggactgcttttagttaaattgaagaaagtcagctcttgtcaaaaggtctaaactttcccgcctcaatcctaaaagcatgtcaacaatccacatcagatgccataaatatgaactgcaggataaaatggtacaatcttagtgaatgggaattggaatcaaaagagtttgctgtccttcttagaatgttctaaaatgtcaaggcagttgcttgtgtttaactgtgaacaaataaaaatttattgttttgcacta

SEQ ID NO: 425528 - DNA, 1498 bp, Homo sapiens
ttcacgacgggggaggtgctgtacgtccaagatggcggcgccctgtaggctggagggactgtgaggtaaacagctgagggggaggagacggtggtgaccatgaaagacaccaggttgacagcactggaaactgaagtaccagttgtcgctagaacagtttggtagtggccccaatgaagaaccttcagaacctgtagcacacgtcctggagccagcacagcgccttcgagcgagagaatggcccaacaagcaaatgtcggggagcttcttgccatgctggactcccccatgctgggtgtgcgggacgacgtgacagctgtctttaaagagaacctcaattctgaccgtggccctatgcttgtaaacaccttggtggattattacctggaaaccagctctcagccggcattgcacatcctgaccaccttgcaagagccacatgacaagcacctcttggacaggattaacgaatatgtgggcaaagccgccactcgtttatccatcctctcgttactgggtcatgtcataagactgcagccatcttggaagcataagctctctcaagcacctcttttgccttctttactaaaatgtctcaagatggacactgacgtcgttgtcctcacaacaggcgtcttggtgttgataaccatgctaccaatgattccacagtctgggaaacagcatcttcttgatttctttgacatttttggccgtctgtcatcatggtgcctgaagaaaccaggccacgtggcggaagtctatctcgtccatctccatgccagtgtgtacgcactctttcatcgcctttatggaatgtacccttgcaacttcgtctcctttttgcgttctcattacagtatgaaagaaaacctggagacttttgaagaagtggtcaagccaatgatggagcatgtgcgaattcatccggaattagtgactggatccaaggaccatgaactggaccctcgaaggtggaagagattagaaactcatgatgttgtgatcgagtgtgccaaaatctctctggatcccacagaagcctcatatgaagatggctattctgtgtctcaccaaatctcagcccgctttcctcatcgttcagccgatgtcaccaccagcccttatgctgacacacagaatagctatgggtgtgctacttctaccccttactccacgtctcggctgatgttgttaaatatgccagggcagctacctcagactctgagttccccatcgacacggctgataactgaaccaccacaagctactcttggagccatctatggtcgggtatgaccatcctcagctcttcggaatgtccaacgatcgcaccctacagcaaagctggcaaacggggaaggatcctgggaccagaactctctctcaagccactggacgagacagggcagtactcctcaggcagccccaggaggcaaaggccgaaccgtacagaaccaatcgagacagacaaaccggcactcgccaggaggaccgg

SEQ ID NO: 425529 - DNA, 644 bp, Homo sapiens
aaataatgttttctggtactaaaactggcatggtaagtgcatacttagagtaaggactttaaatcacgggccagttagatctacctagttagtggtttggtacgcaagaagtacccatgggtgtattacacaaatgcaggaataccatatctagaaatacacctttgatattcatagtgtacctgagaatggtttcacgcataattttaggtaaactgccttagtcactctggttttacggatctttgcccacagttcctcgttcataacttctatagcccttgttatagtcatgttgtgtgtgttaggccacaggaaactcacttcacttctgcccttttaccttcactaagacgggactcttgatcttcccctacctttctgtgagtcctaagacccccatttcagagagggttctgtcctatactctgcggaaaggaatgctgtcatcttgaagcctccctacaaaaccaagaggactgagtttggatatgtgaacgtatggaggttcctggaggatggcacacccaggcaaggcattaaagctttgcaccctttcccccataccttgtcctatgcatctcttcaactgagtcctttgtaatatctttataataaagcaaatgtggccaggcgtggtggct

SEQ ID NO: 425530 - DNA, 5453 bp, Homo sapiens
tggcagtttggtctggagcagctgaaaccggtttgagcgtggctgcttcctgccgctcgacgccgcggcaggccgcctgggggagcgctggcgaggcacggacggcgggcgcccggtacctctgcccgcggtcctcgctctcgggcggggcggcggcgacgcggacctgcggactagcgaacccggagcacgacatcataaaataaatccatcagaatgacaccttctcaggttgcctttgaaataagaggaactcttttaccaggagaagtttttgcgatatgtggaagctgtgatgctttgggaaactggaatcctcaaaatgctgtggctcttcttccagagaatgacacaggtgaaagcatgctatggaaagcaaccattgtactcagtagaggagtatcagttcagtatcgctacttcaaagggtactttttagaaccaaagactatcggtggtccatgtcaagtgatagttcacaagtgggagactcatctacaaccacgatcaataacccctttagaaagcgaaattattattgacgatggacaatttggaatccacaatggtgttgaaactctggattctggatggctgacatgtcagactgaaataagattacgtttgcattattctgaaaaacctcctgtgtcaataaccaagaaaaaattaaaaaaatctagatttagggtgaagctgacactagaaggcctggaggaagatgacgatgatagggtatctcccactgtactccacaaaatgtccaatagcttggagatatccttaataagcgacaatgagttcaagtgcaggcattcacagccggagtgtggttatggcttgcagcctgatcgttggacagagtacagcatacagacgatggaaccagataacctggaactaatctttgattttttcgaagaagatctcagtgagcacgtagttcagggtgatgcccttcctggacatgtgggtacagcttgtctcttatcatccaccattgctgagagtggaaagagtgctggaattcttactcttcccatcatgagcagaaattcccggaaaacaataggcaaagtgagagttgactatataattattaagccattaccaggatacagttgtgacatgaaatcttcattttccaagtattggaagccaagaataccattggatgttggccatcgaggtgcaggaaactctacaacaactgcccagctggctaaagttcaagaaaatactattgcttctttaagaaatgctgctagtcatggtgcagcctttgtagaatttgacgtacacctttcaaaggactttgtgcccgtggtatatcatgatcttacctgttgtttgactatgaaaaagaaatttgatgctgatccagttgaattatttgaaattccagtaaaagaattaacatttgaccaactccagttgttaaagctcactcatgtgactgcactgaaatctaaggatcggaaagaatctgtggttcaggaggaaaattccttttcagaaaatcagccatttccttctcttaagatggttttagagtctttgccagaagatgtagggtttaacattgaaataaaatggatctgccagcaaagggatggaatgtgggatggtaacttatcaacatattttgacatgaatctgtttttggatataattttaaaaactgttttagaaaattctgggaagaggagaatagtgttttcttcatttgatgcagatatttgcacaatggttcggcaaaagcagaacaaatatccgatactatttttaactcaaggaaaatctgagatttatcctgaactcatggacctcagatctcggacaacccccattgcaatgagctttgcacagtttgaaaatctactggggataaatgtacatactgaagacttgctcagaaacccatcctatattcaagaggcaaaagctaagggactagtcatattctgctggggtgatgataccaatgatcctgaaaacagaaggaaattgaaggaacttggagttaatggtctaatttatgataggatatatgattggatgcctgaacaaccaaatatattccaagtggagcaattggaacgcctgaagcaggaattgccagagcttaagagctgtttgtgtcccactgttagccgctttgttccctcatctttgtgtggggagtctgatatccatgtggatgccaacggcattgataacgtggagaatgcttagtttttattgcacagaggtcattttgggggcgtgcaccgctgttctgggtattcatttttcatcactgagcattgttgatctatgccttttgggcttctcagttcaatgaagcaataatgaagtatttaactctttcactacagttcttgcaagtatgctatttaaattacttggccaggtataattgccagtcagtctctttatagtgagaaaatttattggttagtaatataaatattttaaactaaatatataaatctataatgttaaacatatgttcattaaaagcatagcactttgaaattaactatataaatagctcatatttacacttacagcttttcatttgatcaggtctgaaatctttagcacttaaggaaaatgactatgcataattatacctgaccatgaaaaaaataagtacctcaaatgcatgcatttgcactggtgattccaactgcacaaatctttgtgccatcttgtatataggtattttttacatgggttgacatgcacacaacaccattttcattcagtatgaaccttgaggctgctgccatttttccacttaaccaaaccagcctgaaggtgaacctcgaaacttgtttcataaatctttcaaaagttgttttacatcaatgttaaaatttcaaaatgctgcagggtaatttaatgtataaaatattagtaagaaaaagtatgtattgcatacttagtagaatagatcacaacatacaaattcaattcagtgcatgctttaggtgttaagcatgagattgtacatgtttactgttaggtccttgcatctgtggtgctaggtgagtatgagaagatgtcaaggactggacgtattttgttgcctaaaaaaaaaaggctgtttgtaggcgttttaaatatgcttattttgtgtgtctctcactacctattacacactgttgctttgtgggtttgttttgtatgtgcgtgtgttatacagtagttaaatttccatgcagaaaaataaatgtcctgaattttcatattagtattctttattgtatatcatgcatgtaatttatttagaaatgtaggtcttactaaatgtatatgcatgtatttcagattatactaggatttcttggattagaagcagattgtgttaactgtaacttaaagaatgaatgttaaataaaatgatacagatttattttcttcattacaaaatgaaatttcaagaaggtgttacttttgtagaatggttttataatatgacaagaaattttaatatagtgtctaccctaaagggatggcttatttgcatctaccttttactgcatgtttttcacaaggcagtttattcatatattgacatattttggtagtagctgagaacctaagacttgaaattatacattgtgtagtattttttaagctaagcaatgcaattttggtcagatcttatttgtgtgaagataggctctgaaatcctatggtattgcgtttgtaacgttgatattaatgcaaaatagtttaggaaatggagtcttctgcaagggttctgtatacttttcccacattgtatgagattttccaaaattttggtgtgaattgggcacttttggaaaactcctgaaaaagaattagtttccttcatctgcagacctttgtccaatacggttaccatttctttatagtaactcgattagccatatatgtttgtttctagtcctgctcctttgctcctctcctatgccttcccagtgctggctccattttgaagactcaaggacagaggggaagcagatcataaagagaaaaaggagacagaagaaaggatgaaggaaggaggtcatggggagtgtggcttctgagcagtttagttgctggggagagcagacagtcactgcctacaatacagacagaaccttcctgctcactttctgtcctatctcttcctgaccttatgaaccagtgttagtagatgattaaaacatgacaagcaatggctccttattttcacaggactaagtccgggccttcgtatcactagctgttgccttttacaccctgcttcagccaccctgtccctgtcattggccctggacttcctctctgtgcccgtgtgtcctctgcctgggagccctctcctcccatagtcactttctctctgccaaactcatttcttcttgtgcccaagacctctctcctgagcccctgtggaaacttcaggaaggatgaatccgtctttgtgctccacggctcgtaccttgatcaggctgtgcatcacagtaattccgttctaggtaggcagagttgatctttgtctcatctgccaggctgcgggctcttcaagggcagggaccttgtcatagtcatttttattttcacagtgcttggaacatggtggaaaatgaatgttggaattattggagtaatataatttgtatcaaatgtccttttgaattaagagatttagttatgtttactaagaatgtaaactttgaattggtttgcattttaacaattaggatggtttattgatgtgaattttgaaatgtagaggtataatgttaaattattttatactttatggaaatcaagtgaaatgtttgaaaaaatgccgccattatcctctggtattttctactctctggaattatgtgctgtaaatgatcggctgtaaatgtgaggcacaccacccacccctgtgtggaaagtgttgtggcgcttcctgccacccacccacctctctgccgttgctccttgtgacacttgtctgtcgtctcccatccaaactccaagcttacagctacctcagtactgctttgcttgtctgaaacacctcctttgccttccttcagtgtcccgctcaggtgcagcctcctccctaaagctcatctcagcttttgatctgaatgatgatggaaacatgcagacagcctctcagtcttactatttaatgttgtagctgggaaaaaacccagagaggttaactgatatactgggttgggactaggatgtgggttttgtgactctgaatcccatgttctcaaactacgctgccttccgaagtctggcatttgttagctcatgcttccttgtagtccagcttcttatgtgcctgttatattctccagtaagattgtaagccccttaagggcagggacgtctttgcatctctagcactgctatagtgttctatccttagttatgaactagataaataaatggtggtggca

SEQ ID NO: 425531 - DNA, 2310 bp, Homo sapiens
agtttgatatataaaaaacacatttaaaaaatatttcaggaaaaatgttatagtaaacatcatctagaattaatttgattttctttttagtataatggatacgaaagtcaccatatttttaaaagagcaatttcacattacatttttaaaaaatctacccagtctaccaattaaggtgaactattatagcagggaagtgtttagctagagaaaaagagaattttatttagtatcccaggagtaatgatttgaagaaatatatcgtgctattttagtttttaaacttcagaagtttgaggatttcagaaaagaatttagcctggttattttaagtgacaggattatttattgcatttaataattaataatgtgcctaatttgttacatatttgttattgtttggcttatcgtcaaatttaatcaatattaaaatcctatagaaagtgtaggagaatattttaatccattattaatgccttctaaagataatagagaagcttttatgcctaggctttttaagagtatgtataggctgggcacagtggctcacacctgtaatcccagcacattgggaggctgaggtgggtggatcacgaggttaggagttcgagactagcctggccaacatggtgaagccccatctctactaaaaatacaaaaattacctgggtgtggtggcacgtgcctttaattccagctactcaggaggccgaggcaggggaatcacttgaacccaggaggcaagggtgcagtgagccgagattgtgccattgcactctagcctgggtgacagagtgagactctgtctaaaaaaaaaaaagagtatgtgtaatataatgcctagaaaagggctcaaagattatatgtgaaaatcttgatggtgattatccctaaatggtatgatatgggtgagttttgtattttctttttgcttctctgtatttaattacatttatgtaacaaataaaataccttgtaagattatagtttgaaaatgtgcttccaaaatgtgtatttaagggttttatttcagcataataactagtgagtttctttttaaaaattaaaggaaaattagaacacttaaattttagtcttttaggtatactcagggaatctttcatggttactcactaccgcatatgttatcaacacatagctttatgttcttttttagtaggggagcttgataatggaaaacagtatgaggaattgtcacactgtatgagattttaaactaaggcataagaatgaaaccggatgttagttcctcttttatcacacttgctcttcaagtttacctggccacatgtcccttctagaatttcccgtgttctttagaaacactggttcctatgatatgagaaatcttcctgtttttcacttagtattcttaaatatatgtaataaataactttattatggttctttagttccttgagtagcttgcgataattgttcttgagtacttgttcctactatttttactattgtaggcttgtttaggctttttctaaatgcatagagcaggaggtacatactttatctagcaatacctcattgatggctgacataccaaagaaagtatatatgatatttatcttaagaattaatatcagttaaaaatgaaaatttctttgaaacaattgagtattgtaggcagatttaggaatgggtttgagacagttctgtgtgccagttcatctcatttttctttgtttactgcctcactctaattttcttccagcatttcatcttgttttgtgatctggtacattccaggcttttggcatataatattgataataagatgaatcttttggtctcatatttagtataagatttaggccacaaacatctaatggagtcatgggtagaaaataagatataagaaattattgcagacgtttaacttttaaattgcagactatcggtggtccatgtcaagtgatagttcacaagtgggagactcatctacaaccacgatcaataacccctttaggtatgggcattaactgcatctgtttgaggcatatgcataaagttactaatatgctgcacaatggcttagtgggatttaataaatttttattctaaagttaaggtcaatgcattgtcagtgctacaaatttcactgagcatttcatggatctttcaaaacaacagtttttaattgcctcttaaaataaactttattagaaatatttacctagatatttttgttttcttgggttagattagtttattatgaaatattcactttcatttggaatggttaggaagtttataagataccattcttcttgactg

SEQ ID NO: 425532 - DNA, 1089 bp, Homo sapiens
tatatgtgatggattttagtatatatatatactaagtatatatatatatatactaagtatatttgttggacagatgatttattggtgataccttaattcatttcctgtagaagtgccttcaacagagtgacattgatcatttgatagacattaaaacctaatacaacagatttgcttgtgggggaaacatggtagctcagagtgcttaagtattatggtttatagctaatcagacaattttttcatgacatttggtgtgtctgctgtttttaatcagatgtttaaaagtcttcgaaaagattagaaacttacagaaataaattttatatagtactttcatattgatttctagtcacgtagtatggataagtatcaaagaaaatgtatagacagcataacaggaagtaggggagatgactgacttctggttctatcctcagctgtcttcagcgctacagctttctgccagctgcattttccttccaggtattctacactgcaataaaaatgaaagccagaatataagggctgggaggtggtgttaggttagaagggctgtcctgcatgggctcagtatggctactaacagttattctcattgttgagtaaatagagttgctaggcctgtctagtgtaagcattcagtaataatttagggcttacttttctcttaattttctttattctttctttttctttctttcttttttttttttttttagaaatttgatgctgatccagttgaattatttgaaattccagtaaaagaattaacatttgaccaactccagttgttaaagctcactcatgtgactgcactgaaatctaaggatcggaaaggtatgtaccaatatggaaacactgttttccttttgtagttagcattaataggatttttaaaatcgattttagcacatacttgatacttggtcatttttatgagtataatactgggccttctaaatgtaattttatagttcggaaatgaatttgcatttgttttctactaaatatatatcatgtgtatagtaaccattgcattgcttttcttagcttgatgatcaaagtgttaatacttatcaatctttc

SEQ ID NO: 425533 - DNA, 342 bp, Homo sapiens
aagattctccaataagacacagtagagtctctagccaaaagtgattgaggtcccttcatctctgctgtttgttcaatgtaaattagccatcatcctccctgtttgtttttctcatcttcccacatgggctcaacaccatccttaaaaagtgagtagtcacagccagacattaaattactagacaactggatatggttgtacagagcccaaaagtcaacaggatcaaacttagagatcagcggcaggtttgcttgtcaagttttgcttttatcttttttaaaaaaaccagagtgcccatctgttctgtagaggatgtttaatatagtgttctgggttagcaac

SEQ ID NO: 425534 - DNA, 5793 bp, Homo sapiens
agggtggggttttacagcttttctcattgagttgaaatttctgttaggagaaggggttgtgctagcgtttattcttttggtagttcctcacagctctgtacatacaggtaagttcacgctgttcgtaaagcttttaactggcagtagtgaatagttgggatatgaggagaattacatttgagacaagttcagaatatgcactacataagaataagcattttaattgtgccaagacctttggtttgaaaatcaagaaggagttatcgttgtccagcaacctgtgagtcttgtacattggttagtgtagaagttaatcccagtgcctctagagcacctttctgaagagttttctttttcttctttttaacataatggacaatcaacgaagtatgtaagaaccattactgtttgctagcctcctttaaagggaattctttattgagggctacaataaatatgcttattcaccttgggctgcttttaagctgtagatttaatattataaacgatctttaaggtgggtaatttctcagttgttcactgggtatgcatcaagagttttaactaaattttctattttccttaaattctagaaagcgaaattattattgacgatggacaatttggaatccacaatggtgttgaaactctggattctggatggctgacatgtcagactgaaataagattacgtttgcattattctgaaaaacctcctgtgtcaataaccaagaaaaaattaaaaaaatctagatttagggtgaagctgacactagaaggcctggaggaagatgacgatgatagggtatctcccactgtactccacaaaatgtccaatagcttggagatatccttaataagcgacaatgagttcaagtgcaggcattcacagccggagtgtggttatggcttgcagcctgatcgttggacagagtacagcatacagacgatggaaccagataacctggaactaatctttgattttttcgaagaagatctcagtgagcacgtagttcagggtgatgcccttcctggacatgtgggtacagcttgtctcttatcatccaccattgctgagagtggaaagagtgctggaattcttactcttcccatcatgagcagaaattcccggaaaacaataggcaaagtgagaggtaaggttgaagacactgccaaataacccaaggttaagttagaattttaattagtttcaaattaagtatttgataatgataaagatgaaattaataatttgctttagtatcaatttaaggagcatgtctgttacattttgaatcttgtttttttttccgtttgacagaaactgataaagctgacttgagtggtatttaaatataatgtagctcataatggcccttttaatcatttttatttttgttcctccctcttttttcctatgaaagttgactatataattattaagccattaccaggatacagttgtgacatgaaatcttcattttccaagtattggaagccaagaataccattggatgttggccatcgaggtgcaggaaactctacaacaactgcccagctggctaaagttcaagaaaatactattgcttctttaagaaatgctgctagtcatggtgcagcctttgtagaatttgacgtacacctttcaaaggactttgtgcccgtggtatatcatgatcttacctgttgtttgactatgaaaaagaaatttgatgctgatccagttgaattatttgaaattccagtaaaagaattaacatttgaccaactccagttgttaaagctcactcatgtgactgcactgaaatctaaggatcggaaagaatctgtggttcaggaggaaaattccttttcagaaaatcagccatttccttctcttaagatggttttagagtctttgccagaagatgtagggtttaacattgaaataaaatggatctgccagcaaagggatggaatgtgggatggtaacttatcaacatattttgacatgaatctgtttttggatataattttaaaaactgttttagaaaattctgggaagaggagaatagtgttttcttcatttgatgcagatatttgcacaatggttcggcaaaagcagaacaaatatccgatactatttttaactcaaggaaaatctgagatttatcctgaactcatggacctcagatctcggacaacccccattgcaatgagctttgcacagtttgaaaatctactggggataaatgtacatactgaagacttgctcagaaacccatcctatattcaagaggcaaaagctaagggactagtcatattctgctggggtgatgataccaatgatcctgaaaacagaaggaaattgaaggaacttggagttaatggtctaatttatgataggatatatgattggatgcctgaacaaccaaatatattccaagtggagcaattggaacgcctgaagcaggaattgccagagcttaagagctgtttgtgtcccactgttagccgctttgttccctcatctttgtgtggggagtctgatatccatgtggatgccaacggcattgataacgtggagaatgcttagtttttattgcacagaggtcattttgggggcgtgcaccgctgttctgggtattcatttttcatcactgagcattgttgatctatgccttttgggcttctcagttcaatgaagcaataatgaagtatttaactctttcactacagttcttgcaagtatgctatttaaattacttggccaggtataattgccagtcagtctctttatagtgagaaaatttattggttagtaatataaatattttaaactaaatatataaatctataatgttaaacatatgttcattaaaagcatagcactttgaaattaactatataaatagctcatatttacacttacagcttttcatttgatcaggtctgaaatctttagcacttaaggaaaatgactatgcataattatacctgaccatgaaaaaaataagtacctcaaatgcatgcatttgcactggtgattccaactgcacaaatctttgtgccatcttgtatataggtattttttacatgggttgacatgcacacaacaccattttcattcagtatgaaccttgaggctgctgccatttttccacttaaccaaaccagcctgaaggtgaacctcgaaacttgtttcataaatctttcaaaagttgttttacatcaatgttaaaatttcaaaatgctgcagggtaatttaatgtataaaatattagtaagaaaaagtatgtattgcatacttagtagaatagatcacaacatacaaattcaattcagtgcatgctttaggtgttaagcatgagattgtacatgtttactgttaggtccttgcatctgtggtgctaggtgagtatgagaagatgtcaaggactggacgtattttgttgcctaaaaaaaaaaggctgtttgtaggcgttttaaatatgcttattttgtgtgtctctcactacctattacacactgttgctttgtgggtttgttttgtatgtgcgtgtgttatacagtagttaaatttccatgcagaaaaataaatgtcctgaattttcatattagtattctttattgtatatcatgcatgtaatttatttagaaatgtaggtcttactaaatgtatatgcatgtatttcagattatactaggatttcttggattagaagcagattgtgttaactgtaacttaaagaatgaatgttaaataaaatgatacagatttattttcttcattacaaaatgaaatttcaagaaggtgttacttttgtagaatggttttataatatgacaagaaattttaatatagtgtctaccctaaagggatggcttatttgcatctaccttttactgcatgtttttcacaaggcagtttattcatatattgacatattttggtagtagctgagaacctaagacttgaaattatacattgtgtagtattttttaagctaagcaatgcaattttggtcagatcttatttgtgtgaagataggctctgaaatcctatggtattgcgtttgtaacgttgatattaatgcaaaatagtttaggaaatggagtcttctgcaagggttctgtatacttttcccacattgtatgagattttccaaaattttggtgtgaattgggcacttttggaaaactcctgaaaaagaattagtttccttcatctgcagacctttgtccaatacggttaccatttctttatagtaactcgattagccatatatgtttgtttctagtcctgctcctttgctcctctcctatgccttcccagtgctggctccattttgaagactcaaggacagaggggaagcagatcataaagagaaaaaggagacagaagaaaggatgaaggaaggaggtcatggggagtgtggcttctgagcagtttagttgctggggagagcagacagtcactgcctacaatacagacagaaccttcctgctcactttctgtcctatctcttcctgaccttatgaaccagtgttagtagatgattaaaacatgacaagcaatggctccttattttcacaggactaagtccgggccttcgtatcactagctgttgccttttacaccctgcttcagccaccctgtccctgtcattggccctggacttcctctctgtgcccgtgtgtcctctgcctgggagccctctcctcccatagtcactttctctctgccaaactcatttcttcttgtgcccaagacctctctcctgagcccctgtggaaacttcaggaaggatgaatccgtctttgtgctccacggctcgtaccttgatcaggctgtgcatcacagtaattccgttctaggtaggcagagttgatctttgtctcatctgccaggctgcgggctcttcaagggcagggaccttgtcatagtcatttttattttcacagtgcttggaacatggtggaaaatgaatgttggaattattggagtaatataatttgtatcaaatgtccttttgaattaagagatttagttatgtttactaagaatgtaaactttgaattggtttgcattttaacaattaggatggtttattgatgtgaattttgaaatgtagaggtataatgttaaattattttatactttatggaaatcaagtgaaatgtttgaaaaaatgccgccattatcctctggtattttctactctctggaattatgtgctgtaaatgatcggctgtaaatgtgaggcacaccacccacccctgtgtggaaagtgttgtggcgcttcctgccacccacccacctctctgccgttgctccttgtgacacttgtctgtcgtctcccatccaaactccaagcttacagctacctcagtactgctttgcttgtctgaaacacctcctttgccttccttcagtgtcccgctcaggtgcagcctcctccctaaagctcatctcagcttttgatctgaatgatgatggaaacatgcagacagcctctcagtcttactatttaatgttgtagctgggaaaaaacccagagaggttaactgatatactgggttgggactaggatgtgggttttgtgactctgaatcccatgttctcaaactacgctgccttccgaagtctggcatttgttagctcatgcttccttgtagtccagcttcttatgtgcctgttatattctccagtaagattgtaagccccttaagggcagggacgtctttgcatctctagcactgctatagtgttctatccttagttatgaactagataaataaatggtggtggca

SEQ ID NO: 425535 - DNA, 5570 bp, Homo sapiens
tggcagtttggtctggagcagctgaaaccggtttgagcgtggctgcttcctgccgctcgacgccgcggcaggccgcctgggggagcgctggcgaggcacggacggcgggcgcccggtacctctgcccgcggtcctcgctctcgggcggggcggcggcgacgcggacctgcggactagcgaacccggaggagaagtttttgcgatatgtggaagctgtgatgctttgggaaactggaatcctcaaaatgctgtggctcttcttccagagaatgacacaggtgaaagcatgctatggaaagcaaccattgtactcagtagaggagtatcagttcagtatcgctacttcaaagggtactttttagaaccaaagaaagcgaaattattattgacgatggacaatttggaatccacaatggtgttgaaactctggattctggatggctgacatgtcagactgaaataagattacgtttgcattattctgaaaaacctcctgtgtcaataaccaagaaaaaattaaaaaaatctagatttagggtgaagctgacactagaaggcctggaggaagatgacgatgatagggtatctcccactgtactccacaaaatgtccaatagcttggagatatccttaataagcgacaatgagttcaagtgcaggcattcacagccggagtgtggttatggcttgcagcctgatcgttggacagagtacagcatacagacgatggaaccagataacctggaactaatctttgattttttcgaagaagatctcagtgagcacgtagttcagggtgatgcccttcctggacatgtgggtacagcttgtctcttatcatccaccattgctgagagtggaaagagtgctggaattcttactcttcccatcatgagcagaaattcccggaaaacaataggcaaagtgagaggtaaggttgaagacactgccaaataacccaaggttaagttagaattttaattagtttcaaattaagtatttgataatgataaagatgaaattaataatttgctttagtatcaatttaaggagcatgtctgttacattttgaatcttgtttttttttccgtttgacagaaactgataaagctgacttgagtggtatttaaatataatgtagctcataatggcccttttaatcatttttatttttgttcctccctcttttttcctatgaaagttgactatataattattaagccattaccaggatacagttgtgacatgaaatcttcattttccaagtattggaagccaagaataccattggatgttggccatcgaggtgcaggaaactctacaacaactgcccagctggctaaagttcaagaaaatactattgcttctttaagaaatgctgctagtcatggtgcagcctttgtagaatttgacgtacacctttcaaaggactttgtgcccgtggtatatcatgatcttacctgttgtttgactatgaaaaagaaatttgatgctgatccagttgaattatttgaaattccagtaaaagaattaacatttgaccaactccagttgttaaagctcactcatgtgactgcactgaaatctaaggatcggaaagaatctgtggttcaggaggaaaattccttttcagaaaatcagccatttccttctcttaagatggttttagagtctttgccagaagatgtagggtttaacattgaaataaaatggatctgccagcaaagggatggaatgtgggatggtaacttatcaacatattttgacatgaatctgtttttggatataattttaaaaactgttttagaaaattctgggaagaggagaatagtgttttcttcatttgatgcagatatttgcacaatggttcggcaaaagcagaacaaatatccgatactatttttaactcaaggaaaatctgagatttatcctgaactcatggacctcagatctcggacaacccccattgcaatgagctttgcacagtttgaaaatctactggggataaatgtacatactgaagacttgctcagaaacccatcctatattcaagaggcaaaagctaagggactagtcatattctgctggggtgatgataccaatgatcctgaaaacagaaggaaattgaaggaacttggagttaatggtctaatttatgataggatatatgattggatgcctgaacaaccaaatatattccaagtggagcaattggaacgcctgaagcaggaattgccagagcttaagagctgtttgtgtcccactgttagccgctttgttccctcatctttgtgtggggagtctgatatccatgtggatgccaacggcattgataacgtggagaatgcttagtttttattgcacagaggtcattttgggggcgtgcaccgctgttctgggtattcatttttcatcactgagcattgttgatctatgccttttgggcttctcagttcaatgaagcaataatgaagtatttaactctttcactacagttcttgcaagtatgctatttaaattacttggccaggtataattgccagtcagtctctttatagtgagaaaatttattggttagtaatataaatattttaaactaaatatataaatctataatgttaaacatatgttcattaaaagcatagcactttgaaattaactatataaatagctcatatttacacttacagcttttcatttgatcaggtctgaaatctttagcacttaaggaaaatgactatgcataattatacctgaccatgaaaaaaataagtacctcaaatgcatgcatttgcactggtgattccaactgcacaaatctttgtgccatcttgtatataggtattttttacatgggttgacatgcacacaacaccattttcattcagtatgaaccttgaggctgctgccatttttccacttaaccaaaccagcctgaaggtgaacctcgaaacttgtttcataaatctttcaaaagttgttttacatcaatgttaaaatttcaaaatgctgcagggtaatttaatgtataaaatattagtaagaaaaagtatgtattgcatacttagtagaatagatcacaacatacaaattcaattcagtgcatgctttaggtgttaagcatgagattgtacatgtttactgttaggtccttgcatctgtggtgctaggtgagtatgagaagatgtcaaggactggacgtattttgttgcctaaaaaaaaaaggctgtttgtaggcgttttaaatatgcttattttgtgtgtctctcactacctattacacactgttgctttgtgggtttgttttgtatgtgcgtgtgttatacagtagttaaatttccatgcagaaaaataaatgtcctgaattttcatattagtattctttattgtatatcatgcatgtaatttatttagaaatgtaggtcttactaaatgtatatgcatgtatttcagattatactaggatttcttggattagaagcagattgtgttaactgtaacttaaagaatgaatgttaaataaaatgatacagatttattttcttcattacaaaatgaaatttcaagaaggtgttacttttgtagaatggttttataatatgacaagaaattttaatatagtgtctaccctaaagggatggcttatttgcatctaccttttactgcatgtttttcacaaggcagtttattcatatattgacatattttggtagtagctgagaacctaagacttgaaattatacattgtgtagtattttttaagctaagcaatgcaattttggtcagatcttatttgtgtgaagataggctctgaaatcctatggtattgcgtttgtaacgttgatattaatgcaaaatagtttaggaaatggagtcttctgcaagggttctgtatacttttcccacattgtatgagattttccaaaattttggtgtgaattgggcacttttggaaaactcctgaaaaagaattagtttccttcatctgcagacctttgtccaatacggttaccatttctttatagtaactcgattagccatatatgtttgtttctagtcctgctcctttgctcctctcctatgccttcccagtgctggctccattttgaagactcaaggacagaggggaagcagatcataaagagaaaaaggagacagaagaaaggatgaaggaaggaggtcatggggagtgtggcttctgagcagtttagttgctggggagagcagacagtcactgcctacaatacagacagaaccttcctgctcactttctgtcctatctcttcctgaccttatgaaccagtgttagtagatgattaaaacatgacaagcaatggctccttattttcacaggactaagtccgggccttcgtatcactagctgttgccttttacaccctgcttcagccaccctgtccctgtcattggccctggacttcctctctgtgcccgtgtgtcctctgcctgggagccctctcctcccatagtcactttctctctgccaaactcatttcttcttgtgcccaagacctctctcctgagcccctgtggaaacttcaggaaggatgaatccgtctttgtgctccacggctcgtaccttgatcaggctgtgcatcacagtaattccgttctaggtaggcagagttgatctttgtctcatctgccaggctgcgggctcttcaagggcagggaccttgtcatagtcatttttattttcacagtgcttggaacatggtggaaaatgaatgttggaattattggagtaatataatttgtatcaaatgtccttttgaattaagagatttagttatgtttactaagaatgtaaactttgaattggtttgcattttaacaattaggatggtttattgatgtgaattttgaaatgtagaggtataatgttaaattattttatactttatggaaatcaagtgaaatgtttgaaaaaatgccgccattatcctctggtattttctactctctggaattatgtgctgtaaatgatcggctgtaaatgtgaggcacaccacccacccctgtgtggaaagtgttgtggcgcttcctgccacccacccacctctctgccgttgctccttgtgacacttgtctgtcgtctcccatccaaactccaagcttacagctacctcagtactgctttgcttgtctgaaacacctcctttgccttccttcagtgtcccgctcaggtgcagcctcctccctaaagctcatctcagcttttgatctgaatgatgatggaaacatgcagacagcctctcagtcttactatttaatgttgtagctgggaaaaaacccagagaggttaactgatatactgggttgggactaggatgtgggttttgtgactctgaatcccatgttctcaaactacgctgccttccgaagtctggcatttgttagctcatgcttccttgtagtccagcttcttatgtgcctgttatattctccagtaagattgtaagccccttaagggcagggacgtctttgcatctctagcactgctatagtgttctatccttagttatgaactagataaataaatggtggtggca

SEQ ID NO: 425536 - DNA, 5075 bp, Homo sapiens
aaacggggtttcactatgttagccagactagtatcaaactcctgaccttgtgatctgcctgcgtcagcatcccaaagtgctgggattacagacgtgagccactgaccccggccgaaaatactgaagtttttatgaaaaaaaaaatatatatatacacatttcatatataggagatatgtgtgtgtgtgtctgtgtgtgtgtgtgtgtgtgtatatgtatgtatgtaatgtagaagtttaaaaattaagattattttaaatctcattttttcaggaagatctcagtgagcacgtagttcagggtgatgcccttcctggacatgtgggtacagcttgtctcttatcatccaccattgctgagagtggaaagagtgctggaattcttactcttcccatcatgagcagaaattcccggaaaacaataggcaaagtgagaggtaaggttgaagacactgccaaataacccaaggttaagttagaattttaattagtttcaaattaagtatttgataatgataaagatgaaattaataatttgctttagtatcaatttaaggagcatgtctgttacattttgaatcttgtttttttttccgtttgacagaaactgataaagctgacttgagtggtatttaaatataatgtagctcataatggcccttttaatcatttttatttttgttcctccctcttttttcctatgaaagttgactatataattattaagccattaccaggatacagttgtgacatgaaatcttcattttccaagtattggaagccaagaataccattggatgttggccatcgaggtgcaggaaactctacaacaactgcccagctggctaaagttcaagaaaatactattgcttctttaagaaatgctgctagtcatggtgcagcctttgtagaatttgacgtacacctttcaaaggactttgtgcccgtggtatatcatgatcttacctgttgtttgactatgaaaaagaaatttgatgctgatccagttgaattatttgaaattccagtaaaagaattaacatttgaccaactccagttgttaaagctcactcatgtgactgcactgaaatctaaggatcggaaagaatctgtggttcaggaggaaaattccttttcagaaaatcagccatttccttctcttaagatggttttagagtctttgccagaagatgtagggtttaacattgaaataaaatggatctgccagcaaagggatggaatgtgggatggtaacttatcaacatattttgacatgaatctgtttttggatataattttaaaaactgttttagaaaattctgggaagaggagaatagtgttttcttcatttgatgcagatatttgcacaatggttcggcaaaagcagaacaaatatccgatactatttttaactcaaggaaaatctgagatttatcctgaactcatggacctcagatctcggacaacccccattgcaatgagctttgcacagtttgaaaatctactggggataaatgtacatactgaagacttgctcagaaacccatcctatattcaagaggcaaaagctaagggactagtcatattctgctggggtgatgataccaatgatcctgaaaacagaaggaaattgaaggaacttggagttaatggtctaatttatgataggatatatgattggatgcctgaacaaccaaatatattccaagtggagcaattggaacgcctgaagcaggaattgccagagcttaagagctgtttgtgtcccactgttagccgctttgttccctcatctttgtgtggggagtctgatatccatgtggatgccaacggcattgataacgtggagaatgcttagtttttattgcacagaggtcattttgggggcgtgcaccgctgttctgggtattcatttttcatcactgagcattgttgatctatgccttttgggcttctcagttcaatgaagcaataatgaagtatttaactctttcactacagttcttgcaagtatgctatttaaattacttggccaggtataattgccagtcagtctctttatagtgagaaaatttattggttagtaatataaatattttaaactaaatatataaatctataatgttaaacatatgttcattaaaagcatagcactttgaaattaactatataaatagctcatatttacacttacagcttttcatttgatcaggtctgaaatctttagcacttaaggaaaatgactatgcataattatacctgaccatgaaaaaaataagtacctcaaatgcatgcatttgcactggtgattccaactgcacaaatctttgtgccatcttgtatataggtattttttacatgggttgacatgcacacaacaccattttcattcagtatgaaccttgaggctgctgccatttttccacttaaccaaaccagcctgaaggtgaacctcgaaacttgtttcataaatctttcaaaagttgttttacatcaatgttaaaatttcaaaatgctgcagggtaatttaatgtataaaatattagtaagaaaaagtatgtattgcatacttagtagaatagatcacaacatacaaattcaattcagtgcatgctttaggtgttaagcatgagattgtacatgtttactgttaggtccttgcatctgtggtgctaggtgagtatgagaagatgtcaaggactggacgtattttgttgcctaaaaaaaaaaggctgtttgtaggcgttttaaatatgcttattttgtgtgtctctcactacctattacacactgttgctttgtgggtttgttttgtatgtgcgtgtgttatacagtagttaaatttccatgcagaaaaataaatgtcctgaattttcatattagtattctttattgtatatcatgcatgtaatttatttagaaatgtaggtcttactaaatgtatatgcatgtatttcagattatactaggatttcttggattagaagcagattgtgttaactgtaacttaaagaatgaatgttaaataaaatgatacagatttattttcttcattacaaaatgaaatttcaagaaggtgttacttttgtagaatggttttataatatgacaagaaattttaatatagtgtctaccctaaagggatggcttatttgcatctaccttttactgcatgtttttcacaaggcagtttattcatatattgacatattttggtagtagctgagaacctaagacttgaaattatacattgtgtagtattttttaagctaagcaatgcaattttggtcagatcttatttgtgtgaagataggctctgaaatcctatggtattgcgtttgtaacgttgatattaatgcaaaatagtttaggaaatggagtcttctgcaagggttctgtatacttttcccacattgtatgagattttccaaaattttggtgtgaattgggcacttttggaaaactcctgaaaaagaattagtttccttcatctgcagacctttgtccaatacggttaccatttctttatagtaactcgattagccatatatgtttgtttctagtcctgctcctttgctcctctcctatgccttcccagtgctggctccattttgaagactcaaggacagaggggaagcagatcataaagagaaaaaggagacagaagaaaggatgaaggaaggaggtcatggggagtgtggcttctgagcagtttagttgctggggagagcagacagtcactgcctacaatacagacagaaccttcctgctcactttctgtcctatctcttcctgaccttatgaaccagtgttagtagatgattaaaacatgacaagcaatggctccttattttcacaggactaagtccgggccttcgtatcactagctgttgccttttacaccctgcttcagccaccctgtccctgtcattggccctggacttcctctctgtgcccgtgtgtcctctgcctgggagccctctcctcccatagtcactttctctctgccaaactcatttcttcttgtgcccaagacctctctcctgagcccctgtggaaacttcaggaaggatgaatccgtctttgtgctccacggctcgtaccttgatcaggctgtgcatcacagtaattccgttctaggtaggcagagttgatctttgtctcatctgccaggctgcgggctcttcaagggcagggaccttgtcatagtcatttttattttcacagtgcttggaacatggtggaaaatgaatgttggaattattggagtaatataatttgtatcaaatgtccttttgaattaagagatttagttatgtttactaagaatgtaaactttgaattggtttgcattttaacaattaggatggtttattgatgtgaattttgaaatgtagaggtataatgttaaattattttatactttatggaaatcaagtgaaatgtttgaaaaaatgccgccattatcctctggtattttctactctctggaattatgtgctgtaaatgatcggctgtaaatgtgaggcacaccacccacccctgtgtggaaagtgttgtggcgcttcctgccacccacccacctctctgccgttgctccttgtgacacttgtctgtcgtctcccatccaaactccaagcttacagctacctcagtactgctttgcttgtctgaaacacctcctttgccttccttcagtgtcccgctcaggtgcagcctcctccctaaagctcatctcagcttttgatctgaatgatgatggaaacatgcagacagcctctcagtcttactatttaatgttgtagctgggaaaaaacccagagaggttaactgatatactgggttgggactaggatgtgggttttgtgactctgaatcccatgttctcaaactacgctgccttccgaagtctggcatttgttagctcatgcttccttgtagtccagcttcttatgtgcctgttatattctccagtaagattgtaagccccttaagggcagggacgtctttgcatctctagcactgctatagtgttctatccttagttatgaactagataaataaatggtggtggca

SEQ ID NO: 425537 - DNA, 4810 bp, Homo sapiens
tatatgtgatggattttagtatatatatatactaagtatatatatatatatactaagtatatttgttggacagatgatttattggtgataccttaattcatttcctgtagaagtgccttcaacagagtgacattgatcatttgatagacattaaaacctaatacaacagatttgcttgtgggggaaacatggtagctcagagtgcttaagtattatggtttatagctaatcagacaattttttcatgacatttggtgtgtctgctgtttttaatcagatgtttaaaagtcttcgaaaagattagaaacttacagaaataaattttatatagtactttcatattgatttctagtcacgtagtatggataagtatcaaagaaaatgtatagacagcataacaggaagtaggggagatgactgacttctggttctatcctcagctgtcttcagcgctacagctttctgccagctgcattttccttccaggtattctacactgcaataaaaatgaaagccagaatataagggctgggaggtggtgttaggttagaagggctgtcctgcatgggctcagtatggctactaacagttattctcattgttgagtaaatagagttgctaggcctgtctagtgtaagcattcagtaataatttagggcttacttttctcttaattttctttattctttctttttctttctttcttttttttttttttttagaaatttgatgctgatccagttgaattatttgaaattccagtaaaagaattaacatttgaccaactccagttgttaaagctcactcatgtgactgcactgaaatctaaggatcggaaagaatctgtggttcaggaggaaaattccttttcagaaaatcagccatttccttctcttaagatggttttagagtctttgccagaagatgtagggtttaacattgaaataaaatggatctgccagcaaagggatggaatgtgggatggtaacttatcaacatattttgacatgaatctgtttttggatataattttaaaaactgttttagaaaattctgggaagaggagaatagtgttttcttcatttgatgcagatatttgcacaatggttcggcaaaagcagaacaaatatccgatactatttttaactcaaggaaaatctgagatttatcctgaactcatggacctcagatctcggacaacccccattgcaatgagctttgcacagtttgaaaatctactggggataaatgtacatactgaagacttgctcagaaacccatcctatattcaagaggcaaaagctaagggactagtcatattctgctggggtgatgataccaatgatcctgaaaacagaaggaaattgaaggaacttggagttaatggtctaatttatgataggatatatgattggatgcctgaacaaccaaatatattccaagtggagcaattggaacgcctgaagcaggaattgccagagcttaagagctgtttgtgtcccactgttagccgctttgttccctcatctttgtgtggggagtctgatatccatgtggatgccaacggcattgataacgtggagaatgcttagtttttattgcacagaggtcattttgggggcgtgcaccgctgttctgggtattcatttttcatcactgagcattgttgatctatgccttttgggcttctcagttcaatgaagcaataatgaagtatttaactctttcactacagttcttgcaagtatgctatttaaattacttggccaggtataattgccagtcagtctctttatagtgagaaaatttattggttagtaatataaatattttaaactaaatatataaatctataatgttaaacatatgttcattaaaagcatagcactttgaaattaactatataaatagctcatatttacacttacagcttttcatttgatcaggtctgaaatctttagcacttaaggaaaatgactatgcataattatacctgaccatgaaaaaaataagtacctcaaatgcatgcatttgcactggtgattccaactgcacaaatctttgtgccatcttgtatataggtattttttacatgggttgacatgcacacaacaccattttcattcagtatgaaccttgaggctgctgccatttttccacttaaccaaaccagcctgaaggtgaacctcgaaacttgtttcataaatctttcaaaagttgttttacatcaatgttaaaatttcaaaatgctgcagggtaatttaatgtataaaatattagtaagaaaaagtatgtattgcatacttagtagaatagatcacaacatacaaattcaattcagtgcatgctttaggtgttaagcatgagattgtacatgtttactgttaggtccttgcatctgtggtgctaggtgagtatgagaagatgtcaaggactggacgtattttgttgcctaaaaaaaaaaggctgtttgtaggcgttttaaatatgcttattttgtgtgtctctcactacctattacacactgttgctttgtgggtttgttttgtatgtgcgtgtgttatacagtagttaaatttccatgcagaaaaataaatgtcctgaattttcatattagtattctttattgtatatcatgcatgtaatttatttagaaatgtaggtcttactaaatgtatatgcatgtatttcagattatactaggatttcttggattagaagcagattgtgttaactgtaacttaaagaatgaatgttaaataaaatgatacagatttattttcttcattacaaaatgaaatttcaagaaggtgttacttttgtagaatggttttataatatgacaagaaattttaatatagtgtctaccctaaagggatggcttatttgcatctaccttttactgcatgtttttcacaaggcagtttattcatatattgacatattttggtagtagctgagaacctaagacttgaaattatacattgtgtagtattttttaagctaagcaatgcaattttggtcagatcttatttgtgtgaagataggctctgaaatcctatggtattgcgtttgtaacgttgatattaatgcaaaatagtttaggaaatggagtcttctgcaagggttctgtatacttttcccacattgtatgagattttccaaaattttggtgtgaattgggcacttttggaaaactcctgaaaaagaattagtttccttcatctgcagacctttgtccaatacggttaccatttctttatagtaactcgattagccatatatgtttgtttctagtcctgctcctttgctcctctcctatgccttcccagtgctggctccattttgaagactcaaggacagaggggaagcagatcataaagagaaaaaggagacagaagaaaggatgaaggaaggaggtcatggggagtgtggcttctgagcagtttagttgctggggagagcagacagtcactgcctacaatacagacagaaccttcctgctcactttctgtcctatctcttcctgaccttatgaaccagtgttagtagatgattaaaacatgacaagcaatggctccttattttcacaggactaagtccgggccttcgtatcactagctgttgccttttacaccctgcttcagccaccctgtccctgtcattggccctggacttcctctctgtgcccgtgtgtcctctgcctgggagccctctcctcccatagtcactttctctctgccaaactcatttcttcttgtgcccaagacctctctcctgagcccctgtggaaacttcaggaaggatgaatccgtctttgtgctccacggctcgtaccttgatcaggctgtgcatcacagtaattccgttctaggtaggcagagttgatctttgtctcatctgccaggctgcgggctcttcaagggcagggaccttgtcatagtcatttttattttcacagtgcttggaacatggtggaaaatgaatgttggaattattggagtaatataatttgtatcaaatgtccttttgaattaagagatttagttatgtttactaagaatgtaaactttgaattggtttgcattttaacaattaggatggtttattgatgtgaattttgaaatgtagaggtataatgttaaattattttatactttatggaaatcaagtgaaatgtttgaaaaaatgccgccattatcctctggtattttctactctctggaattatgtgctgtaaatgatcggctgtaaatgtgaggcacaccacccacccctgtgtggaaagtgttgtggcgcttcctgccacccacccacctctctgccgttgctccttgtgacacttgtctgtcgtctcccatccaaactccaagcttacagctacctcagtactgctttgcttgtctgaaacacctcctttgccttccttcagtgtcccgctcaggtgcagcctcctccctaaagctcatctcagcttttgatctgaatgatgatggaaacatgcagacagcctctcagtcttactatttaatgttgtagctgggaaaaaacccagagaggttaactgatatactgggttgggactaggatgtgggttttgtgactctgaatcccatgttctcaaactacgctgccttccgaagtctggcatttgttagctcatgcttccttgtagtccagcttcttatgtgcctgttatattctccagtaagattgtaagccccttaagggcagggacgtctttgcatctctagcactgctatagtgttctatccttagttatgaactagataaataaatggtggtggca

SEQ ID NO: 425538 - DNA, 6881 bp, Homo sapiens
agtttgatatataaaaaacacatttaaaaaatatttcaggaaaaatgttatagtaaacatcatctagaattaatttgattttctttttagtataatggatacgaaagtcaccatatttttaaaagagcaatttcacattacatttttaaaaaatctacccagtctaccaattaaggtgaactattatagcagggaagtgtttagctagagaaaaagagaattttatttagtatcccaggagtaatgatttgaagaaatatatcgtgctattttagtttttaaacttcagaagtttgaggatttcagaaaagaatttagcctggttattttaagtgacaggattatttattgcatttaataattaataatgtgcctaatttgttacatatttgttattgtttggcttatcgtcaaatttaatcaatattaaaatcctatagaaagtgtaggagaatattttaatccattattaatgccttctaaagataatagagaagcttttatgcctaggctttttaagagtatgtataggctgggcacagtggctcacacctgtaatcccagcacattgggaggctgaggtgggtggatcacgaggttaggagttcgagactagcctggccaacatggtgaagccccatctctactaaaaatacaaaaattacctgggtgtggtggcacgtgcctttaattccagctactcaggaggccgaggcaggggaatcacttgaacccaggaggcaagggtgcagtgagccgagattgtgccattgcactctagcctgggtgacagagtgagactctgtctaaaaaaaaaaaagagtatgtgtaatataatgcctagaaaagggctcaaagattatatgtgaaaatcttgatggtgattatccctaaatggtatgatatgggtgagttttgtattttctttttgcttctctgtatttaattacatttatgtaacaaataaaataccttgtaagattatagtttgaaaatgtgcttccaaaatgtgtatttaagggttttatttcagcataataactagtgagtttctttttaaaaattaaaggaaaattagaacacttaaattttagtcttttaggtatactcagggaatctttcatggttactcactaccgcatatgttatcaacacatagctttatgttcttttttagtaggggagcttgataatggaaaacagtatgaggaattgtcacactgtatgagattttaaactaaggcataagaatgaaaccggatgttagttcctcttttatcacacttgctcttcaagtttacctggccacatgtcccttctagaatttcccgtgttctttagaaacactggttcctatgatatgagaaatcttcctgtttttcacttagtattcttaaatatatgtaataaataactttattatggttctttagttccttgagtagcttgcgataattgttcttgagtacttgttcctactatttttactattgtaggcttgtttaggctttttctaaatgcatagagcaggaggtacatactttatctagcaatacctcattgatggctgacataccaaagaaagtatatatgatatttatcttaagaattaatatcagttaaaaatgaaaatttctttgaaacaattgagtattgtaggcagatttaggaatgggtttgagacagttctgtgtgccagttcatctcatttttctttgtttactgcctcactctaattttcttccagcatttcatcttgttttgtgatctggtacattccaggcttttggcatataatattgataataagatgaatcttttggtctcatatttagtataagatttaggccacaaacatctaatggagtcatgggtagaaaataagatataagaaattattgcagacgtttaacttttaaattgcagactatcggtggtccatgtcaagtgatagttcacaagtgggagactcatctacaaccacgatcaataacccctttagaaagcgaaattattattgacgatggacaatttggaatccacaatggtgttgaaactctggattctggatggctgacatgtcagactgaaataagattacgtttgcattattctgaaaaacctcctgtgtcaataaccaagaaaaaattaaaaaaatctagatttagggtgaagctgacactagaaggcctggaggaagatgacgatgatagggtatctcccactgtactccacaaaatgtccaatagcttggagatatccttaataagcgacaatgagttcaagtgcaggcattcacagccggagtgtggttatggcttgcagcctgatcgttggacagagtacagcatacagacgatggaaccagataacctggaactaatctttgattttttcgaagaagatctcagtgagcacgtagttcagggtgatgcccttcctggacatgtgggtacagcttgtctcttatcatccaccattgctgagagtggaaagagtgctggaattcttactcttcccatcatgagcagaaattcccggaaaacaataggcaaagtgagaggtaaggttgaagacactgccaaataacccaaggttaagttagaattttaattagtttcaaattaagtatttgataatgataaagatgaaattaataatttgctttagtatcaatttaaggagcatgtctgttacattttgaatcttgtttttttttccgtttgacagaaactgataaagctgacttgagtggtatttaaatataatgtagctcataatggcccttttaatcatttttatttttgttcctccctcttttttcctatgaaagttgactatataattattaagccattaccaggatacagttgtgacatgaaatcttcattttccaagtattggaagccaagaataccattggatgttggccatcgaggtgcaggaaactctacaacaactgcccagctggctaaagttcaagaaaatactattgcttctttaagaaatgctgctagtcatggtgcagcctttgtagaatttgacgtacacctttcaaaggactttgtgcccgtggtatatcatgatcttacctgttgtttgactatgaaaaagaatctgtggttcaggaggaaaattccttttcagaaaatcagccatttccttctcttaagatgggttcggcaaaagcagaacaaatatccgatactatttttaactcaaggaaaatctgagatttatcctgaactcatggacctcagatctcggacaacccccattgcaatgagctttgcacagtttgaaaatctactggggataaatgtacatactgaagacttgctcagaaacccatcctatattcaagaggcaaaagctaagggactagtcatattctgctggggtgatgataccaatgatcctgaaaacagaaggaaattgaaggaacttggagttaatggtctaatttatgataggatatatgattggatgcctgaacaaccaaatatattccaagtggagcaattggaacgcctgaagcaggaattgccagagcttaagagctgtttgtgtcccactgttagccgctttgttccctcatctttgtgtggggagtctgatatccatgtggatgccaacggcattgataacgtggagaatgcttagtttttattgcacagaggtcattttgggggcgtgcaccgctgttctgggtattcatttttcatcactgagcattgttgatctatgccttttgggcttctcagttcaatgaagcaataatgaagtatttaactctttcactacagttcttgcaagtatgctatttaaattacttggccaggtataattgccagtcagtctctttatagtgagaaaatttattggttagtaatataaatattttaaactaaatatataaatctataatgttaaacatatgttcattaaaagcatagcactttgaaattaactatataaatagctcatatttacacttacagcttttcatttgatcaggtctgaaatctttagcacttaaggaaaatgactatgcataattatacctgaccatgaaaaaaataagtacctcaaatgcatgcatttgcactggtgattccaactgcacaaatctttgtgccatcttgtatataggtattttttacatgggttgacatgcacacaacaccattttcattcagtatgaaccttgaggctgctgccatttttccacttaaccaaaccagcctgaaggtgaacctcgaaacttgtttcataaatctttcaaaagttgttttacatcaatgttaaaatttcaaaatgctgcagggtaatttaatgtataaaatattagtaagaaaaagtatgtattgcatacttagtagaatagatcacaacatacaaattcaattcagtgcatgctttaggtgttaagcatgagattgtacatgtttactgttaggtccttgcatctgtggtgctaggtgagtatgagaagatgtcaaggactggacgtattttgttgcctaaaaaaaaaaggctgtttgtaggcgttttaaatatgcttattttgtgtgtctctcactacctattacacactgttgctttgtgggtttgttttgtatgtgcgtgtgttatacagtagttaaatttccatgcagaaaaataaatgtcctgaattttcatattagtattctttattgtatatcatgcatgtaatttatttagaaatgtaggtcttactaaatgtatatgcatgtatttcagattatactaggatttcttggattagaagcagattgtgttaactgtaacttaaagaatgaatgttaaataaaatgatacagatttattttcttcattacaaaatgaaatttcaagaaggtgttacttttgtagaatggttttataatatgacaagaaattttaatatagtgtctaccctaaagggatggcttatttgcatctaccttttactgcatgtttttcacaaggcagtttattcatatattgacatattttggtagtagctgagaacctaagacttgaaattatacattgtgtagtattttttaagctaagcaatgcaattttggtcagatcttatttgtgtgaagataggctctgaaatcctatggtattgcgtttgtaacgttgatattaatgcaaaatagtttaggaaatggagtcttctgcaagggttctgtatacttttcccacattgtatgagattttccaaaattttggtgtgaattgggcacttttggaaaactcctgaaaaagaattagtttccttcatctgcagacctttgtccaatacggttaccatttctttatagtaactcgattagccatatatgtttgtttctagtcctgctcctttgctcctctcctatgccttcccagtgctggctccattttgaagactcaaggacagaggggaagcagatcataaagagaaaaaggagacagaagaaaggatgaaggaaggaggtcatggggagtgtggcttctgagcagtttagttgctggggagagcagacagtcactgcctacaatacagacagaaccttcctgctcactttctgtcctatctcttcctgaccttatgaaccagtgttagtagatgattaaaacatgacaagcaatggctccttattttcacaggactaagtccgggccttcgtatcactagctgttgccttttacaccctgcttcagccaccctgtccctgtcattggccctggacttcctctctgtgcccgtgtgtcctctgcctgggagccctctcctcccatagtcactttctctctgccaaactcatttcttcttgtgcccaagacctctctcctgagcccctgtggaaacttcaggaaggatgaatccgtctttgtgctccacggctcgtaccttgatcaggctgtgcatcacagtaattccgttctaggtaggcagagttgatctttgtctcatctgccaggctgcgggctcttcaagggcagggaccttgtcatagtcatttttattttcacagtgcttggaacatggtggaaaatgaatgttggaattattggagtaatataatttgtatcaaatgtccttttgaattaagagatttagttatgtttactaagaatgtaaactttgaattggtttgcattttaacaattaggatggtttattgatgtgaattttgaaatgtagaggtataatgttaaattattttatactttatggaaatcaagtgaaatgtttgaaaaaatgccgccattatcctctggtattttctactctctggaattatgtgctgtaaatgatcggctgtaaatgtgaggcacaccacccacccctgtgtggaaagtgttgtggcgcttcctgccacccacccacctctctgccgttgctccttgtgacacttgtctgtcgtctcccatccaaactccaagcttacagctacctcagtactgctttgcttgtctgaaacacctcctttgccttccttcagtgtcccgctcaggtgcagcctcctccctaaagctcatctcagcttttgatctgaatgatgatggaaacatgcagacagcctctcagtcttactatttaatgttgtagctgggaaaaaacccagagaggttaactgatatactgggttgggactaggatgtgggttttgtgactctgaatcccatgttctcaaactacgctgccttccgaagtctggcatttgttagctcatgcttccttgtagtccagcttcttatgtgcctgttatattctccagtaagattgtaagccccttaagggcagggacgtctttgcatctctagcactgctatagtgttctatccttagttatgaactagataaataaatggtggtggca

SEQ ID NO: 425539 - DNA, 4151 bp, Homo sapiens
gcaaaattctagagttttagcttttattttaactttattaatgcaaaagtgtattgatgatatagttaatagttacttgctttttgtatgagagtctctatgtctgaattatgacctgtgtcatcactaaatagctttgtgatcttgggcagatcacttaatcttttcaggtttcatcatctataaaatagtagttggactagatactgtcaggggttttttcatcatagcttgccagaataaaaacagagttgctagcactgattttaggatgtgcagtgacttttattttgctttctctttcactaggatggaatgtgggatggtaacttatcaacatattttgacatgaatctgtttttggatataattttaaaaactgttttagaaaattctgggaagaggagaatagtgttttcttcatttgatgcagatatttgcacaatggttcggcaaaagcagaacaaatatccgatactatttttaactcaaggaaaatctgagatttatcctgaactcatggacctcagatctcggacaacccccattgcaatgagctttgcacagtttgaaaatctactggggataaatgtacatactgaagacttgctcagaaacccatcctatattcaagaggcaaaagctaagggactagtcatattctgctggggtgatgataccaatgatcctgaaaacagaaggaaattgaaggaacttggagttaatggtctaatttatgataggatatatgattggatgcctgaacaaccaaatatattccaagtggagcaattggaacgcctgaagcaggaattgccagagcttaagagctgtttgtgtcccactgttagccgctttgttccctcatctttgtgtggggagtctgatatccatgtggatgccaacggcattgataacgtggagaatgcttagtttttattgcacagaggtcattttgggggcgtgcaccgctgttctgggtattcatttttcatcactgagcattgttgatctatgccttttgggcttctcagttcaatgaagcaataatgaagtatttaactctttcactacagttcttgcaagtatgctatttaaattacttggccaggtataattgccagtcagtctctttatagtgagaaaatttattggttagtaatataaatattttaaactaaatatataaatctataatgttaaacatatgttcattaaaagcatagcactttgaaattaactatataaatagctcatatttacacttacagcttttcatttgatcaggtctgaaatctttagcacttaaggaaaatgactatgcataattatacctgaccatgaaaaaaataagtacctcaaatgcatgcatttgcactggtgattccaactgcacaaatctttgtgccatcttgtatataggtattttttacatgggttgacatgcacacaacaccattttcattcagtatgaaccttgaggctgctgccatttttccacttaaccaaaccagcctgaaggtgaacctcgaaacttgtttcataaatctttcaaaagttgttttacatcaatgttaaaatttcaaaatgctgcagggtaatttaatgtataaaatattagtaagaaaaagtatgtattgcatacttagtagaatagatcacaacatacaaattcaattcagtgcatgctttaggtgttaagcatgagattgtacatgtttactgttaggtccttgcatctgtggtgctaggtgagtatgagaagatgtcaaggactggacgtattttgttgcctaaaaaaaaaaggctgtttgtaggcgttttaaatatgcttattttgtgtgtctctcactacctattacacactgttgctttgtgggtttgttttgtatgtgcgtgtgttatacagtagttaaatttccatgcagaaaaataaatgtcctgaattttcatattagtattctttattgtatatcatgcatgtaatttatttagaaatgtaggtcttactaaatgtatatgcatgtatttcagattatactaggatttcttggattagaagcagattgtgttaactgtaacttaaagaatgaatgttaaataaaatgatacagatttattttcttcattacaaaatgaaatttcaagaaggtgttacttttgtagaatggttttataatatgacaagaaattttaatatagtgtctaccctaaagggatggcttatttgcatctaccttttactgcatgtttttcacaaggcagtttattcatatattgacatattttggtagtagctgagaacctaagacttgaaattatacattgtgtagtattttttaagctaagcaatgcaattttggtcagatcttatttgtgtgaagataggctctgaaatcctatggtattgcgtttgtaacgttgatattaatgcaaaatagtttaggaaatggagtcttctgcaagggttctgtatacttttcccacattgtatgagattttccaaaattttggtgtgaattgggcacttttggaaaactcctgaaaaagaattagtttccttcatctgcagacctttgtccaatacggttaccatttctttatagtaactcgattagccatatatgtttgtttctagtcctgctcctttgctcctctcctatgccttcccagtgctggctccattttgaagactcaaggacagaggggaagcagatcataaagagaaaaaggagacagaagaaaggatgaaggaaggaggtcatggggagtgtggcttctgagcagtttagttgctggggagagcagacagtcactgcctacaatacagacagaaccttcctgctcactttctgtcctatctcttcctgaccttatgaaccagtgttagtagatgattaaaacatgacaagcaatggctccttattttcacaggactaagtccgggccttcgtatcactagctgttgccttttacaccctgcttcagccaccctgtccctgtcattggccctggacttcctctctgtgcccgtgtgtcctctgcctgggagccctctcctcccatagtcactttctctctgccaaactcatttcttcttgtgcccaagacctctctcctgagcccctgtggaaacttcaggaaggatgaatccgtctttgtgctccacggctcgtaccttgatcaggctgtgcatcacagtaattccgttctaggtaggcagagttgatctttgtctcatctgccaggctgcgggctcttcaagggcagggaccttgtcatagtcatttttattttcacagtgcttggaacatggtggaaaatgaatgttggaattattggagtaatataatttgtatcaaatgtccttttgaattaagagatttagttatgtttactaagaatgtaaactttgaattggtttgcattttaacaattaggatggtttattgatgtgaattttgaaatgtagaggtataatgttaaattattttatactttatggaaatcaagtgaaatgtttgaaaaaatgccgccattatcctctggtattttctactctctggaattatgtgctgtaaatgatcggctgtaaatgtgaggcacaccacccacccctgtgtggaaagtgttgtggcgcttcctgccacccacccacctctctgccgttgctccttgtgacacttgtctgtcgtctcccatccaaactccaagcttacagctacctcagtactgctttgcttgtctgaaacacctcctttgccttccttcagtgtcccgctcaggtgcagcctcctccctaaagctcatctcagcttttgatctgaatgatgatggaaacatgcagacagcctctcagtcttactatttaatgttgtagctgggaaaaaacccagagaggttaactgatatactgggttgggactaggatgtgggttttgtgactctgaatcccatgttctcaaactacgctgccttccgaagtctggcatttgttagctcatgcttccttgtagtccagcttcttatgtgcctgttatattctccagtaagattgtaagccccttaagggcagggacgtctttgcatctctagcactgctatagtgttctatccttagttatgaactagataaataaatggtggtggca

SEQ ID NO: 425540 - DNA, 3699 bp, Homo sapiens
ttagatatgtctttaataattaatagaaactctttgttttaatacagtcagatatttattagagtcaccatattttttatcgtgttgaaaaaattctttcctactgtgatgtcataaagattctctgatactgccttacatagttgcctggctgtcacattcaggcacaggaggccatcttttctctgctgatgggtagtgccagtgtcaggtcaccagaggctctttcagagttctccactctggacgtgtctgacgttattgagcagctttagagtagttcccacgctggatatatgattggatgcctgaacaaccaaatatattccaagtggagcaattggaacgcctgaagcaggaattgccagagcttaagagctgtttgtgtcccactgttagccgctttgttccctcatctttgtgtggggagtctgatatccatgtggatgccaacggcattgataacgtggagaatgcttagtttttattgcacagaggtcattttgggggcgtgcaccgctgttctgggtattcatttttcatcactgagcattgttgatctatgccttttgggcttctcagttcaatgaagcaataatgaagtatttaactctttcactacagttcttgcaagtatgctatttaaattacttggccaggtataattgccagtcagtctctttatagtgagaaaatttattggttagtaatataaatattttaaactaaatatataaatctataatgttaaacatatgttcattaaaagcatagcactttgaaattaactatataaatagctcatatttacacttacagcttttcatttgatcaggtctgaaatctttagcacttaaggaaaatgactatgcataattatacctgaccatgaaaaaaataagtacctcaaatgcatgcatttgcactggtgattccaactgcacaaatctttgtgccatcttgtatataggtattttttacatgggttgacatgcacacaacaccattttcattcagtatgaaccttgaggctgctgccatttttccacttaaccaaaccagcctgaaggtgaacctcgaaacttgtttcataaatctttcaaaagttgttttacatcaatgttaaaatttcaaaatgctgcagggtaatttaatgtataaaatattagtaagaaaaagtatgtattgcatacttagtagaatagatcacaacatacaaattcaattcagtgcatgctttaggtgttaagcatgagattgtacatgtttactgttaggtccttgcatctgtggtgctaggtgagtatgagaagatgtcaaggactggacgtattttgttgcctaaaaaaaaaaggctgtttgtaggcgttttaaatatgcttattttgtgtgtctctcactacctattacacactgttgctttgtgggtttgttttgtatgtgcgtgtgttatacagtagttaaatttccatgcagaaaaataaatgtcctgaattttcatattagtattctttattgtatatcatgcatgtaatttatttagaaatgtaggtcttactaaatgtatatgcatgtatttcagattatactaggatttcttggattagaagcagattgtgttaactgtaacttaaagaatgaatgttaaataaaatgatacagatttattttcttcattacaaaatgaaatttcaagaaggtgttacttttgtagaatggttttataatatgacaagaaattttaatatagtgtctaccctaaagggatggcttatttgcatctaccttttactgcatgtttttcacaaggcagtttattcatatattgacatattttggtagtagctgagaacctaagacttgaaattatacattgtgtagtattttttaagctaagcaatgcaattttggtcagatcttatttgtgtgaagataggctctgaaatcctatggtattgcgtttgtaacgttgatattaatgcaaaatagtttaggaaatggagtcttctgcaagggttctgtatacttttcccacattgtatgagattttccaaaattttggtgtgaattgggcacttttggaaaactcctgaaaaagaattagtttccttcatctgcagacctttgtccaatacggttaccatttctttatagtaactcgattagccatatatgtttgtttctagtcctgctcctttgctcctctcctatgccttcccagtgctggctccattttgaagactcaaggacagaggggaagcagatcataaagagaaaaaggagacagaagaaaggatgaaggaaggaggtcatggggagtgtggcttctgagcagtttagttgctggggagagcagacagtcactgcctacaatacagacagaaccttcctgctcactttctgtcctatctcttcctgaccttatgaaccagtgttagtagatgattaaaacatgacaagcaatggctccttattttcacaggactaagtccgggccttcgtatcactagctgttgccttttacaccctgcttcagccaccctgtccctgtcattggccctggacttcctctctgtgcccgtgtgtcctctgcctgggagccctctcctcccatagtcactttctctctgccaaactcatttcttcttgtgcccaagacctctctcctgagcccctgtggaaacttcaggaaggatgaatccgtctttgtgctccacggctcgtaccttgatcaggctgtgcatcacagtaattccgttctaggtaggcagagttgatctttgtctcatctgccaggctgcgggctcttcaagggcagggaccttgtcatagtcatttttattttcacagtgcttggaacatggtggaaaatgaatgttggaattattggagtaatataatttgtatcaaatgtccttttgaattaagagatttagttatgtttactaagaatgtaaactttgaattggtttgcattttaacaattaggatggtttattgatgtgaattttgaaatgtagaggtataatgttaaattattttatactttatggaaatcaagtgaaatgtttgaaaaaatgccgccattatcctctggtattttctactctctggaattatgtgctgtaaatgatcggctgtaaatgtgaggcacaccacccacccctgtgtggaaagtgttgtggcgcttcctgccacccacccacctctctgccgttgctccttgtgacacttgtctgtcgtctcccatccaaactccaagcttacagctacctcagtactgctttgcttgtctgaaacacctcctttgccttccttcagtgtcccgctcaggtgcagcctcctccctaaagctcatctcagcttttgatctgaatgatgatggaaacatgcagacagcctctcagtcttactatttaatgttgtagctgggaaaaaacccagagaggttaactgatatactgggttgggactaggatgtgggttttgtgactctgaatcccatgttctcaaactacgctgccttccgaagtctggcatttgttagctcatgcttccttgtagtccagcttcttatgtgcctgttatattctccagtaagattgtaagccccttaagggcagggacgtctttgcatctctagcactgctatagtgttctatccttagttatgaactagataaataaatggtggtggca

SEQ ID NO: 425541 - DNA, 7308 bp, Homo sapiens
agtttgatatataaaaaacacatttaaaaaatatttcaggaaaaatgttatagtaaacatcatctagaattaatttgattttctttttagtataatggatacgaaagtcaccatatttttaaaagagcaatttcacattacatttttaaaaaatctacccagtctaccaattaaggtgaactattatagcagggaagtgtttagctagagaaaaagagaattttatttagtatcccaggagtaatgatttgaagaaatatatcgtgctattttagtttttaaacttcagaagtttgaggatttcagaaaagaatttagcctggttattttaagtgacaggattatttattgcatttaataattaataatgtgcctaatttgttacatatttgttattgtttggcttatcgtcaaatttaatcaatattaaaatcctatagaaagtgtaggagaatattttaatccattattaatgccttctaaagataatagagaagcttttatgcctaggctttttaagagtatgtataggctgggcacagtggctcacacctgtaatcccagcacattgggaggctgaggtgggtggatcacgaggttaggagttcgagactagcctggccaacatggtgaagccccatctctactaaaaatacaaaaattacctgggtgtggtggcacgtgcctttaattccagctactcaggaggccgaggcaggggaatcacttgaacccaggaggcaagggtgcagtgagccgagattgtgccattgcactctagcctgggtgacagagtgagactctgtctaaaaaaaaaaaagagtatgtgtaatataatgcctagaaaagggctcaaagattatatgtgaaaatcttgatggtgattatccctaaatggtatgatatgggtgagttttgtattttctttttgcttctctgtatttaattacatttatgtaacaaataaaataccttgtaagattatagtttgaaaatgtgcttccaaaatgtgtatttaagggttttatttcagcataataactagtgagtttctttttaaaaattaaaggaaaattagaacacttaaattttagtcttttaggtatactcagggaatctttcatggttactcactaccgcatatgttatcaacacatagctttatgttcttttttagtaggggagcttgataatggaaaacagtatgaggaattgtcacactgtatgagattttaaactaaggcataagaatgaaaccggatgttagttcctcttttatcacacttgctcttcaagtttacctggccacatgtcccttctagaatttcccgtgttctttagaaacactggttcctatgatatgagaaatcttcctgtttttcacttagtattcttaaatatatgtaataaataactttattatggttctttagttccttgagtagcttgcgataattgttcttgagtacttgttcctactatttttactattgtaggcttgtttaggctttttctaaatgcatagagcaggaggtacatactttatctagcaatacctcattgatggctgacataccaaagaaagtatatatgatatttatcttaagaattaatatcagttaaaaatgaaaatttctttgaaacaattgagtattgtaggcagatttaggaatgggtttgagacagttctgtgtgccagttcatctcatttttctttgtttactgcctcactctaattttcttccagcatttcatcttgttttgtgatctggtacattccaggcttttggcatataatattgataataagatgaatcttttggtctcatatttagtataagatttaggccacaaacatctaatggagtcatgggtagaaaataagatataagaaattattgcagacgtttaacttttaaattgcagactatcggtggtccatgtcaagtgatagttcacaagtgggagactcatctacaaccacgatcaataacccctttagaaagcgaaattattattgacgatggacaatttggaatccacaatggtgttgaaactctggattctggatggctgacatgtcagactgaaataagattacgtttgcattattctgaaaaacctcctgtgtcaataaccaagaaaaaattaaaaaaatctagatttagggtgaagctgacactagaaggcctggaggaagatgacgatgatagggtatctcccactgtactccacaaaatgtccaatagcttggagatatccttaataagcgacaatgagttcaagtgcaggcattcacagccggagtgtggttatggcttgcagcctgatcgttggacagagtacagcatacagacgatggaaccagataacctggaactaatctttgattttttcgaagaagatctcagtgagcacgtagttcagggtgatgcccttcctggacatgtgggtacagcttgtctcttatcatccaccattgctgagagtggaaagagtgctggaattcttactcttcccatcatgagcagaaattcccggaaaacaataggcaaagtgagaggtaaggttgaagacactgccaaataacccaaggttaagttagaattttaattagtttcaaattaagtatttgataatgataaagatgaaattaataatttgctttagtatcaatttaaggagcatgtctgttacattttgaatcttgtttttttttccgtttgacagaaactgataaagctgacttgagtggtatttaaatataatgtagctcataatggcccttttaatcatttttatttttgttcctccctcttttttcctatgaaagttgactatataattattaagccattaccaggatacagttgtgacatgaaatcttcattttccaagtattggaagccaagaataccattggatgttggccatcgaggtgcaggaaactctacaacaactgcccagctggctaaagttcaagaaaatactattgcttctttaagaaatgctgctagtcatggtgcagcctttgtagaatttgacgtacacctttcaaaggactttgtgcccgtggtatatcatgatcttacctgttgtttgactatgaaaaagaaatttgatgctgatccagttgaattatttgaaattccagtaaaagaattaacatttgaccaactccagttgttaaagctcactcatgtgactgcactgaaatctaaggatcggaaagaatctgtggttcaggaggaaaattccttttcagaaaatcagccatttccttctcttaagatggttttagagtctttgccagaagatgtagggtttaacattgaaataaaatggatctgccagcaaagggatggaatgtgggatggtaacttatcaacatattttgacatgaatctgtttttggatataattttaaaaactgttttagaaaattctgggaagaggagaatagtgttttcttcatttgatgcagatatttgcacaatggttcggcaaaagcagaacaaatatccgatactatttttaactcaaggaaaatctgagatttatcctgaactcatggacctcagatctcggacaacccccattgcaatgagctttgcacagtttgaaaatctactggggataaatgtacatactgaagacttgctcagaaacccatcctatattcaagaggcaaaagctaagggactagtcatattctgctggggtgatgataccaatgatcctgaaaacagaaggaaattgaaggaacttggagttaatggtctaatttatgataggatatatgattggatgcctgaacaaccaaatatattccaagtggagcaattggaacgcctgaagcaggaattgccagagcttaagagctgtttgtgtcccactgttagccgctttgttccctcatctttgtgtggggagtctgatatccatgtggatgccaacggcattgataacgtggagaatgcttagtttttattgcacagaggtcattttgggggcgtgcaccgctgttctgggtattcatttttcatcactgagcattgttgatctatgccttttgggcttctcagttcaatgaagcaataatgaagtatttaactctttcactacagttcttgcaagtatgctatttaaattacttggccaggtataattgccagtcagtctctttatagtgagaaaatttattggttagtaatataaatattttaaactaaatatataaatctataatgttaaacatatgttcattaaaagcatagcactttgaaattaactatataaatagctcatatttacacttacagcttttcatttgatcaggtctgaaatctttagcacttaaggaaaatgactatgcataattatacctgaccatgaaaaaaataagtacctcaaatgcatgcatttgcactggtgattccaactgcacaaatctttgtgccatcttgtatataggtattttttacatgggttgacatgcacacaacaccattttcattcagtatgaaccttgaggctgctgccatttttccacttaaccaaaccagcctgaaggtgaacctcgaaacttgtttcataaatctttcaaaagttgttttacatcaatgttaaaatttcaaaatgctgcagggtaatttaatgtataaaatattagtaagaaaaagtatgtattgcatacttagtagaatagatcacaacatacaaattcaattcagtgcatgctttaggtgttaagcatgagattgtacatgtttactgttaggtccttgcatctgtggtgctaggtgagtatgagaagatgtcaaggactggacgtattttgttgcctaaaaaaaaaaggctgtttgtaggcgttttaaatatgcttattttgtgtgtctctcactacctattacacactgttgctttgtgggtttgttttgtatgtgcgtgtgttatacagtagttaaatttccatgcagaaaaataaatgtcctgaattttcatattagtattctttattgtatatcatgcatgtaatttatttagaaatgtaggtcttactaaatgtatatgcatgtatttcagattatactaggatttcttggattagaagcagattgtgttaactgtaacttaaagaatgaatgttaaataaaatgatacagatttattttcttcattacaaaatgaaatttcaagaaggtgttacttttgtagaatggttttataatatgacaagaaattttaatatagtgtctaccctaaagggatggcttatttgcatctaccttttactgcatgtttttcacaaggcagtttattcatatattgacatattttggtagtagctgagaacctaagacttgaaattatacattgtgtagtattttttaagctaagcaatgcaattttggtcagatcttatttgtgtgaagataggctctgaaatcctatggtattgcgtttgtaacgttgatattaatgcaaaatagtttaggaaatggagtcttctgcaagggttctgtatacttttcccacattgtatgagattttccaaaattttggtgtgaattgggcacttttggaaaactcctgaaaaagaattagtttccttcatctgcagacctttgtccaatacggttaccatttctttatagtaactcgattagccatatatgtttgtttctagtcctgctcctttgctcctctcctatgccttcccagtgctggctccattttgaagactcaaggacagaggggaagcagatcataaagagaaaaaggagacagaagaaaggatgaaggaaggaggtcatggggagtgtggcttctgagcagtttagttgctggggagagcagacagtcactgcctacaatacagacagaaccttcctgctcactttctgtcctatctcttcctgaccttatgaaccagtgttagtagatgattaaaacatgacaagcaatggctccttattttcacaggactaagtccgggccttcgtatcactagctgttgccttttacaccctgcttcagccaccctgtccctgtcattggccctggacttcctctctgtgcccgtgtgtcctctgcctgggagccctctcctcccatagtcactttctctctgccaaactcatttcttcttgtgcccaagacctctctcctgagcccctgtggaaacttcaggaaggatgaatccgtctttgtgctccacggctcgtaccttgatcaggctgtgcatcacagtaattccgttctaggtaggcagagttgatctttgtctcatctgccaggctgcgggctcttcaagggcagggaccttgtcatagtcatttttattttcacagtgcttggaacatggtggaaaatgaatgttggaattattggagtaatataatttgtatcaaatgtccttttgaattaagagatttagttatgtttactaagaatgtaaactttgaattggtttgcattttaacaattaggatggtttattgatgtgaattttgaaatgtagaggtataatgttaaattattttatactttatggaaatcaagtgaaatgtttgaaaaaatgccgccattatcctctggtattttctactctctggaattatgtgctgtaaatgatcggctgtaaatgtgaggcacaccacccacccctgtgtggaaagtgttgtggcgcttcctgccacccacccacctctctgccgttgctccttgtgacacttgtctgtcgtctcccatccaaactccaagcttacagctacctcagtactgctttgcttgtctgaaacacctcctttgccttccttcagtgtcccgctcaggtgcagcctcctccctaaagctcatctcagcttttgatctgaatgatgatggaaacatgcagacagcctctcagtcttactatttaatgttgtagctgggaaaaaacccagagaggttaactgatatactgggttgggactaggatgtgggttttgtgactctgaatcccatgttctcaaactacgctgccttccgaagtctggcatttgttagctcatgcttccttgtagtccagcttcttatgtgcctgttatattctccagtaagattgtaagccccttaagggcagggacgtctttgcatctctagcactgctatagtgttctatccttagttatgaactagataaataaatggtggtggcacagaaaggaagggaggaagattgagtggccgcggtttacaacgtcgggactggggccctggcgtgccgcgtagatcgctttgaggacggccgcgtgtggcgggtgg

SEQ ID NO: 425542 - DNA, 3804 bp, Homo sapiens
cttatctcgatctttagtgactttgaagtcagagcagtcagttttttatagatttccatttgttaaaaaaaggcaagttggagggcaaatactttaagctagatcacaagtaaactagacatttcattttctgattcagctgctttatgttgagctccattgcatcgggggtacaaaagggcaatgctgctattctggattattggaaagactgggaagaagagaaattttaaaaaagagaatggatactttcatctttaaaacaaaacaaaaactctgatgtggatgttccaggcattctgtaaatgaattcttatgaaaaggttgagtcaggcaggtcttaggtaaaccataaaattacagtattttatgtgttttgtatttgtttcatcataggatatatgattggatgcctgaacaaccaaatatattccaagtggagcaattggaacgcctgaagcaggaattgccagagcttaagagctgtttgtgtcccactgttagccgctttgttccctcatctttgtgtggggagtctgatatccatgtggatgccaacggcattgataacgtggagaatgcttagtttttattgcacagaggtcattttgggggcgtgcaccgctgttctgggtattcatttttcatcactgagcattgttgatctatgccttttgggcttctcagttcaatgaagcaataatgaagtatttaactctttcactacagttcttgcaagtatgctatttaaattacttggccaggtataattgccagtcagtctctttatagtgagaaaatttattggttagtaatataaatattttaaactaaatatataaatctataatgttaaacatatgttcattaaaagcatagcactttgaaattaactatataaatagctcatatttacacttacagcttttcatttgatcaggtctgaaatctttagcacttaaggaaaatgactatgcataattatacctgaccatgaaaaaaataagtacctcaaatgcatgcatttgcactggtgattccaactgcacaaatctttgtgccatcttgtatataggtattttttacatgggttgacatgcacacaacaccattttcattcagtatgaaccttgaggctgctgccatttttccacttaaccaaaccagcctgaaggtgaacctcgaaacttgtttcataaatctttcaaaagttgttttacatcaatgttaaaatttcaaaatgctgcagggtaatttaatgtataaaatattagtaagaaaaagtatgtattgcatacttagtagaatagatcacaacatacaaattcaattcagtgcatgctttaggtgttaagcatgagattgtacatgtttactgttaggtccttgcatctgtggtgctaggtgagtatgagaagatgtcaaggactggacgtattttgttgcctaaaaaaaaaaggctgtttgtaggcgttttaaatatgcttattttgtgtgtctctcactacctattacacactgttgctttgtgggtttgttttgtatgtgcgtgtgttatacagtagttaaatttccatgcagaaaaataaatgtcctgaattttcatattagtattctttattgtatatcatgcatgtaatttatttagaaatgtaggtcttactaaatgtatatgcatgtatttcagattatactaggatttcttggattagaagcagattgtgttaactgtaacttaaagaatgaatgttaaataaaatgatacagatttattttcttcattacaaaatgaaatttcaagaaggtgttacttttgtagaatggttttataatatgacaagaaattttaatatagtgtctaccctaaagggatggcttatttgcatctaccttttactgcatgtttttcacaaggcagtttattcatatattgacatattttggtagtagctgagaacctaagacttgaaattatacattgtgtagtattttttaagctaagcaatgcaattttggtcagatcttatttgtgtgaagataggctctgaaatcctatggtattgcgtttgtaacgttgatattaatgcaaaatagtttaggaaatggagtcttctgcaagggttctgtatacttttcccacattgtatgagattttccaaaattttggtgtgaattgggcacttttggaaaactcctgaaaaagaattagtttccttcatctgcagacctttgtccaatacggttaccatttctttatagtaactcgattagccatatatgtttgtttctagtcctgctcctttgctcctctcctatgccttcccagtgctggctccattttgaagactcaaggacagaggggaagcagatcataaagagaaaaaggagacagaagaaaggatgaaggaaggaggtcatggggagtgtggcttctgagcagtttagttgctggggagagcagacagtcactgcctacaatacagacagaaccttcctgctcactttctgtcctatctcttcctgaccttatgaaccagtgttagtagatgattaaaacatgacaagcaatggctccttattttcacaggactaagtccgggccttcgtatcactagctgttgccttttacaccctgcttcagccaccctgtccctgtcattggccctggacttcctctctgtgcccgtgtgtcctctgcctgggagccctctcctcccatagtcactttctctctgccaaactcatttcttcttgtgcccaagacctctctcctgagcccctgtggaaacttcaggaaggatgaatccgtctttgtgctccacggctcgtaccttgatcaggctgtgcatcacagtaattccgttctaggtaggcagagttgatctttgtctcatctgccaggctgcgggctcttcaagggcagggaccttgtcatagtcatttttattttcacagtgcttggaacatggtggaaaatgaatgttggaattattggagtaatataatttgtatcaaatgtccttttgaattaagagatttagttatgtttactaagaatgtaaactttgaattggtttgcattttaacaattaggatggtttattgatgtgaattttgaaatgtagaggtataatgttaaattattttatactttatggaaatcaagtgaaatgtttgaaaaaatgccgccattatcctctggtattttctactctctggaattatgtgctgtaaatgatcggctgtaaatgtgaggcacaccacccacccctgtgtggaaagtgttgtggcgcttcctgccacccacccacctctctgccgttgctccttgtgacacttgtctgtcgtctcccatccaaactccaagcttacagctacctcagtactgctttgcttgtctgaaacacctcctttgccttccttcagtgtcccgctcaggtgcagcctcctccctaaagctcatctcagcttttgatctgaatgatgatggaaacatgcagacagcctctcagtcttactatttaatgttgtagctgggaaaaaacccagagaggttaactgatatactgggttgggactaggatgtgggttttgtgactctgaatcccatgttctcaaactacgctgccttccgaagtctggcatttgttagctcatgcttccttgtagtccagcttcttatgtgcctgttatattctccagtaagattgtaagccccttaagggcagggacgtctttgcatctctagcactgctatagtgttctatccttagttatgaactagataaataaatggtggtggca

SEQ ID NO: 425543 - DNA, 3556 bp, Homo sapiens
aagattctccaataagacacagtagagtctctagccaaaagtgattgaggtcccttcatctctgctgtttgttcaatgtaaattagccatcatcctccctgtttgtttttctcatcttcccacatgggctcaacaccatccttaaaaagatatatgattggatgcctgaacaaccaaatatattccaagtggagcaattggaacgcctgaagcaggaattgccagagcttaagagctgtttgtgtcccactgttagccgctttgttccctcatctttgtgtggggagtctgatatccatgtggatgccaacggcattgataacgtggagaatgcttagtttttattgcacagaggtcattttgggggcgtgcaccgctgttctgggtattcatttttcatcactgagcattgttgatctatgccttttgggcttctcagttcaatgaagcaataatgaagtatttaactctttcactacagttcttgcaagtatgctatttaaattacttggccaggtataattgccagtcagtctctttatagtgagaaaatttattggttagtaatataaatattttaaactaaatatataaatctataatgttaaacatatgttcattaaaagcatagcactttgaaattaactatataaatagctcatatttacacttacagcttttcatttgatcaggtctgaaatctttagcacttaaggaaaatgactatgcataattatacctgaccatgaaaaaaataagtacctcaaatgcatgcatttgcactggtgattccaactgcacaaatctttgtgccatcttgtatataggtattttttacatgggttgacatgcacacaacaccattttcattcagtatgaaccttgaggctgctgccatttttccacttaaccaaaccagcctgaaggtgaacctcgaaacttgtttcataaatctttcaaaagttgttttacatcaatgttaaaatttcaaaatgctgcagggtaatttaatgtataaaatattagtaagaaaaagtatgtattgcatacttagtagaatagatcacaacatacaaattcaattcagtgcatgctttaggtgttaagcatgagattgtacatgtttactgttaggtccttgcatctgtggtgctaggtgagtatgagaagatgtcaaggactggacgtattttgttgcctaaaaaaaaaaggctgtttgtaggcgttttaaatatgcttattttgtgtgtctctcactacctattacacactgttgctttgtgggtttgttttgtatgtgcgtgtgttatacagtagttaaatttccatgcagaaaaataaatgtcctgaattttcatattagtattctttattgtatatcatgcatgtaatttatttagaaatgtaggtcttactaaatgtatatgcatgtatttcagattatactaggatttcttggattagaagcagattgtgttaactgtaacttaaagaatgaatgttaaataaaatgatacagatttattttcttcattacaaaatgaaatttcaagaaggtgttacttttgtagaatggttttataatatgacaagaaattttaatatagtgtctaccctaaagggatggcttatttgcatctaccttttactgcatgtttttcacaaggcagtttattcatatattgacatattttggtagtagctgagaacctaagacttgaaattatacattgtgtagtattttttaagctaagcaatgcaattttggtcagatcttatttgtgtgaagataggctctgaaatcctatggtattgcgtttgtaacgttgatattaatgcaaaatagtttaggaaatggagtcttctgcaagggttctgtatacttttcccacattgtatgagattttccaaaattttggtgtgaattgggcacttttggaaaactcctgaaaaagaattagtttccttcatctgcagacctttgtccaatacggttaccatttctttatagtaactcgattagccatatatgtttgtttctagtcctgctcctttgctcctctcctatgccttcccagtgctggctccattttgaagactcaaggacagaggggaagcagatcataaagagaaaaaggagacagaagaaaggatgaaggaaggaggtcatggggagtgtggcttctgagcagtttagttgctggggagagcagacagtcactgcctacaatacagacagaaccttcctgctcactttctgtcctatctcttcctgaccttatgaaccagtgttagtagatgattaaaacatgacaagcaatggctccttattttcacaggactaagtccgggccttcgtatcactagctgttgccttttacaccctgcttcagccaccctgtccctgtcattggccctggacttcctctctgtgcccgtgtgtcctctgcctgggagccctctcctcccatagtcactttctctctgccaaactcatttcttcttgtgcccaagacctctctcctgagcccctgtggaaacttcaggaaggatgaatccgtctttgtgctccacggctcgtaccttgatcaggctgtgcatcacagtaattccgttctaggtaggcagagttgatctttgtctcatctgccaggctgcgggctcttcaagggcagggaccttgtcatagtcatttttattttcacagtgcttggaacatggtggaaaatgaatgttggaattattggagtaatataatttgtatcaaatgtccttttgaattaagagatttagttatgtttactaagaatgtaaactttgaattggtttgcattttaacaattaggatggtttattgatgtgaattttgaaatgtagaggtataatgttaaattattttatactttatggaaatcaagtgaaatgtttgaaaaaatgccgccattatcctctggtattttctactctctggaattatgtgctgtaaatgatcggctgtaaatgtgaggcacaccacccacccctgtgtggaaagtgttgtggcgcttcctgccacccacccacctctctgccgttgctccttgtgacacttgtctgtcgtctcccatccaaactccaagcttacagctacctcagtactgctttgcttgtctgaaacacctcctttgccttccttcagtgtcccgctcaggtgcagcctcctccctaaagctcatctcagcttttgatctgaatgatgatggaaacatgcagacagcctctcagtcttactatttaatgttgtagctgggaaaaaacccagagaggttaactgatatactgggttgggactaggatgtgggttttgtgactctgaatcccatgttctcaaactacgctgccttccgaagtctggcatttgttagctcatgcttccttgtagtccagcttcttatgtgcctgttatattctccagtaagattgtaagccccttaagggcagggacgtctttgcatctctagcactgctatagtgttctatccttagttatgaactagataaataaatggtggtggca

SEQ ID NO: 425544 - DNA, 7224 bp, Homo sapiens
agtttgatatataaaaaacacatttaaaaaatatttcaggaaaaatgttatagtaaacatcatctagaattaatttgattttctttttagtataatggatacgaaagtcaccatatttttaaaagagcaatttcacattacatttttaaaaaatctacccagtctaccaattaaggtgaactattatagcagggaagtgtttagctagagaaaaagagaattttatttagtatcccaggagtaatgatttgaagaaatatatcgtgctattttagtttttaaacttcagaagtttgaggatttcagaaaagaatttagcctggttattttaagtgacaggattatttattgcatttaataattaataatgtgcctaatttgttacatatttgttattgtttggcttatcgtcaaatttaatcaatattaaaatcctatagaaagtgtaggagaatattttaatccattattaatgccttctaaagataatagagaagcttttatgcctaggctttttaagagtatgtataggctgggcacagtggctcacacctgtaatcccagcacattgggaggctgaggtgggtggatcacgaggttaggagttcgagactagcctggccaacatggtgaagccccatctctactaaaaatacaaaaattacctgggtgtggtggcacgtgcctttaattccagctactcaggaggccgaggcaggggaatcacttgaacccaggaggcaagggtgcagtgagccgagattgtgccattgcactctagcctgggtgacagagtgagactctgtctaaaaaaaaaaaagagtatgtgtaatataatgcctagaaaagggctcaaagattatatgtgaaaatcttgatggtgattatccctaaatggtatgatatgggtgagttttgtattttctttttgcttctctgtatttaattacatttatgtaacaaataaaataccttgtaagattatagtttgaaaatgtgcttccaaaatgtgtatttaagggttttatttcagcataataactagtgagtttctttttaaaaattaaaggaaaattagaacacttaaattttagtcttttaggtatactcagggaatctttcatggttactcactaccgcatatgttatcaacacatagctttatgttcttttttagtaggggagcttgataatggaaaacagtatgaggaattgtcacactgtatgagattttaaactaaggcataagaatgaaaccggatgttagttcctcttttatcacacttgctcttcaagtttacctggccacatgtcccttctagaatttcccgtgttctttagaaacactggttcctatgatatgagaaatcttcctgtttttcacttagtattcttaaatatatgtaataaataactttattatggttctttagttccttgagtagcttgcgataattgttcttgagtacttgttcctactatttttactattgtaggcttgtttaggctttttctaaatgcatagagcaggaggtacatactttatctagcaatacctcattgatggctgacataccaaagaaagtatatatgatatttatcttaagaattaatatcagttaaaaatgaaaatttctttgaaacaattgagtattgtaggcagatttaggaatgggtttgagacagttctgtgtgccagttcatctcatttttctttgtttactgcctcactctaattttcttccagcatttcatcttgttttgtgatctggtacattccaggcttttggcatataatattgataataagatgaatcttttggtctcatatttagtataagatttaggccacaaacatctaatggagtcatgggtagaaaataagatataagaaattattgcagacgtttaacttttaaattgcagactatcggtggtccatgtcaagtgatagttcacaagtgggagactcatctacaaccacgatcaataacccctttagaaagcgaaattattattgacgatggacaatttggaatccacaatggtgttgaaactctggattctggatggctgacatgtcagactgaaataagattacgtttgcattattctgaaaaacctcctgtgtcaataaccaagaaaaaattaaaaaaatctagatttagggtgaagctgacactagaaggcctggaggaagatgacgatgatagggtatctcccactgtactccacaaaatgtccaatagcttggagatatccttaataagcgacaatgagttcaagtgcaggcattcacagccggagtgtggttatggcttgcagcctgatcgttggacagagtacagcatacagacgatggaaccagataacctggaactaatctttgattttttcgaagaagatctcagtgagcacgtagttcagggtgatgcccttcctggacatgtgggtacagcttgtctcttatcatccaccattgctgagagtggaaagagtgctggaattcttactcttcccatcatgagcagaaattcccggaaaacaataggcaaagtgagaggtaaggttgaagacactgccaaataacccaaggttaagttagaattttaattagtttcaaattaagtatttgataatgataaagatgaaattaataatttgctttagtatcaatttaaggagcatgtctgttacattttgaatcttgtttttttttccgtttgacagaaactgataaagctgacttgagtggtatttaaatataatgtagctcataatggcccttttaatcatttttatttttgttcctccctcttttttcctatgaaagttgactatataattattaagccattaccaggatacagttgtgacatgaaatcttcattttccaagtattggaagccaagaataccattggatgttggccatcgaggtgcaggaaactctacaacaactgcccagctggctaaagttcaagaaaatactattgcttctttaagaaatgctgctagtcatggtgcagcctttgtagaatttgacgtacacctttcaaaggactttgtgcccgtggtatatcatgatcttacctgttgtttgactatgaaaaagaaatttgatgctgatccagttgaattatttgaaattccagtaaaagaattaacatttgaccaactccagttgttaaagctcactcatgtgactgcactgaaatctaaggatcggaaagaatctgtggttcaggaggaaaattccttttcagaaaatcagccatttccttctcttaagatggttttagagtctttgccagaagatgtagggtttaacattgaaataaaatggatctgccagcaaagggatggaatgtgggatggtaacttatcaacatattttgacatgaatctgtttttggatataattttaaaaactgttttagaaaattctgggaagaggagaatagtgttttcttcatttgatgcagatatttgcacaatggttcggcaaaagcagaacaaatatccgatactatttttaactcaaggaaaatctgagatttatcctgaactcatggacctcagatctcggacaacccccattgcaatgagctttgcacagtttgaaaatctactggggataaatgtacatactgaagacttgctcagaaacccatcctatattcaagaggcaaaagctaagggactagtcatattctgctggggtgatgataccaatgatcctgaaaacagaaggaaattgaaggaacttggagttaatggtctaatttatgataggatatatgattggatgcctgaacaaccaaatatattccaagtggagcaattggaacgcctgaagcaggaattgccagagcttaagagctgtttgtgtcccactgttagccgctttgttccctcatctttgtgtggggagtctgatatccatgtggatgccaacggcattgataacgtggagaatgcttagtttttattgcacagaggtcattttgggggcgtgcaccgctgttctgggtattcatttttcatcactgagcattgttgatctatgccttttgggcttctcagttcaatgaagcaataatgaagtatttaactctttcactacagttcttgcaagtatgctatttaaattacttggccaggtataattgccagtcagtctctttatagtgagaaaatttattggttagtaatataaatattttaaactaaatatataaatctataatgttaaacatatgttcattaaaagcatagcactttgaaattaactatataaatagctcatatttacacttacagcttttcatttgatcaggtctgaaatctttagcacttaaggaaaatgactatgcataattatacctgaccatgaaaaaaataagtacctcaaatgcatgcatttgcactggtgattccaactgcacaaatctttgtgccatcttgtatataggtattttttacatgggttgacatgcacacaacaccattttcattcagtatgaaccttgaggctgctgccatttttccacttaaccaaaccagcctgaaggtgaacctcgaaacttgtttcataaatctttcaaaagttgttttacatcaatgttaaaatttcaaaatgctgcagggtaatttaatgtataaaatattagtaagaaaaagtatgtattgcatacttagtagaatagatcacaacatacaaattcaattcagtgcatgctttaggtgttaagcatgagattgtacatgtttactgttaggtccttgcatctgtggtgctaggtgagtatgagaagatgtcaaggactggacgtattttgttgcctaaaaaaaaaaggctgtttgtaggcgttttaaatatgcttattttgtgtgtctctcactacctattacacactgttgctttgtgggtttgttttgtatgtgcgtgtgttatacagtagttaaatttccatgcagaaaaataaatgtcctgaattttcatattagtattctttattgtatatcatgcatgtaatttatttagaaatgtaggtcttactaaatgtatatgcatgtatttcagattatactaggatttcttggattagaagcagattgtgttaactgtaacttaaagaatgaatgttaaataaaatgatacagatttattttcttcattacaaaatgaaatttcaagaaggtgttacttttgtagaatggttttataatatgacaagaaattttaatatagtgtctaccctaaagggatggcttatttgcatctaccttttactgcatgtttttcacaaggcagtttattcatatattgacatattttggtagtagctgagaacctaagacttgaaattatacattgtgtagtattttttaagctaagcaatgcaattttggtcagatcttatttgtgtgaagataggctctgaaatcctatggtattgcgtttgtaacgttgatattaatgcaaaatagtttaggaaatggagtcttctgcaagggttctgtatacttttcccacattgtatgagattttccaaaattttggtgtgaattgggcacttttggaaaactcctgaaaaagaattagtttccttcatctgcagacctttgtccaatacggttaccatttctttatagtaactcgattagccatatatgtttgtttctagtcctgctcctttgctcctctcctatgccttcccagtgctggctccattttgaagactcaaggacagaggggaagcagatcataaagagaaaaaggagacagaagaaaggatgaaggaaggaggtcatggggagtgtggcttctgagcagtttagttgctggggagagcagacagtcactgcctacaatacagacagaaccttcctgctcactttctgtcctatctcttcctgaccttatgaaccagtgttagtagatgattaaaacatgacaagcaatggctccttattttcacaggactaagtccgggccttcgtatcactagctgttgccttttacaccctgcttcagccaccctgtccctgtcattggccctggacttcctctctgtgcccgtgtgtcctctgcctgggagccctctcctcccatagtcactttctctctgccaaactcatttcttcttgtgcccaagacctctctcctgagcccctgtggaaacttcaggaaggatgaatccgtctttgtgctccacggctcgtaccttgatcaggctgtgcatcacagtaattccgttctaggtaggcagagttgatctttgtctcatctgccaggctgcgggctcttcaagggcagggaccttgtcatagtcatttttattttcacagtgcttggaacatggtggaaaatgaatgttggaattattggagtaatataatttgtatcaaatgtccttttgaattaagagatttagttatgtttactaagaatgtaaactttgaattggtttgcattttaacaattaggatggtttattgatgtgaattttgaaatgtagaggtataatgttaaattattttatactttatggaaatcaagtgaaatgtttgaaaaaatgccgccattatcctctggtattttctactctctggaattatgtgctgtaaatgatcggctgtaaatgtgaggcacaccacccacccctgtgtggaaagtgttgtggcgcttcctgccacccacccacctctctgccgttgctccttgtgacacttgtctgtcgtctcccatccaaactccaagcttacagctacctcagtactgctttgcttgtctgaaacacctcctttgccttccttcagtgtcccgctcaggtgcagcctcctccctaaagctcatctcagcttttgatctgaatgatgatggaaacatgcagacagcctctcagtcttactatttaatgttgtagctgggaatgactctgaatcccatgttctcaaactacgctgccttccgaagtctggcatttgttagctcatgcttccttgtagtccagcttcttatgtgcctgttatattctccagtaagattgtaagccccttaagggcagggacgtctttgcatctctagcactgctatagtgttctatccttagttatgaactagataaataaatggtggtggcaacaatcctagtttcctaactcagattgtttcacgataaacacagttttgtatggcatgcttggccataatgtctgg

SEQ ID NO: 425545 - DNA, 2510 bp, Homo sapiens
cgaattcgtgctcgatacccaatcagtttacacaaattcagtgcatgctttaggtgttaagcatgagattgtacatgtttactgttaggtccttgcatctgtggtgctaggtgagtatgagaagatgtcaaggactggacgtattttgttgcctaaaaaaaaaaggctgtttgtaggcgttttaaatatgcttattttgtgtgtctctcactacctattacacactgttgctttgtgggtttgttttgtatgtgcgtgtgttatacagtagttaaatttccatgcagaaaaataaatgtcctgaattttcatattagtattctttattgtatatcatgcatgtaatttatttagaaatgtaggtcttactaaatgtatatgcatgtatttcagattatactaggatttcttggattagaagcagattgtgttaactgtaacttaaagaatgaatgttaaataaaatgatacagatttattttcttcattacaaaatgaaatttcaagaaggtgttacttttgtagaatggttttataatatgacaagaaattttaatatagtgtctaccctaaagggatggcttatttgcatctaccttttactgcatgtttttcacaaggcagtttattcatatattgacatattttggtagtagctgagaacctaagacttgaaattatacattgtgtagtattttttaagctaagcaatgcaattttggtcagatcttatttgtgtgaagataggctctgaaatcctatggtattgcgtttgtaacgttgatattaatgcaaaatagtttaggaaatggagtcttctgcaagggttctgtatacttttcccacattgtatgagattttccaaaattttggtgtgaattgggcacttttggaaaactcctgaaaaagaattagtttccttcatctgcagacctttgtccaatacggttaccatttctttatagtaactcgattagccatatatgtttgtttctagtcctgctcctttgctcctctcctatgccttcccagtgctggctccattttgaagactcaaggacagaggggaagcagatcataaagagaaaaaggagacagaagaaaggatgaaggaaggaggtcatggggagtgtggcttctgagcagtttagttgctggggagagcagacagtcactgcctacaatacagacagaaccttcctgctcactttctgtcctatctcttcctgaccttatgaaccagtgttagtagatgattaaaacatgacaagcaatggctccttattttcacaggactaagtccgggccttcgtatcactagctgttgccttttacaccctgcttcagccaccctgtccctgtcattggccctggacttcctctctgtgcccgtgtgtcctctgcctgggagccctctcctcccatagtcactttctctctgccaaactcatttcttcttgtgcccaagacctctctcctgagcccctgtggaaacttcaggaaggatgaatccgtctttgtgctccacggctcgtaccttgatcaggctgtgcatcacagtaattccgttctaggtaggcagagttgatctttgtctcatctgccaggctgcgggctcttcaagggcagggaccttgtcatagtcatttttattttcacagtgcttggaacatggtggaaaatgaatgttggaattattggagtaatataatttgtatcaaatgtccttttgaattaagagatttagttatgtttactaagaatgtaaactttgaattggtttgcattttaacaattaggatggtttattgatgtgaattttgaaatgtagaggtataatgttaaattattttatactttatggaaatcaagtgaaatgtttgaaaaaatgccgccattatcctctggtattttctactctctggaattatgtgctgtaaatgatcggctgtaaatgtgaggcacaccacccacccctgtgtggaaagtgttgtggcgcttcctgccacccacccacctctctgccgttgctccttgtgacacttgtctgtcgtctcccatccaaactccaagcttacagctacctcagtactgctttgcttgtctgaaacacctcctttgccttccttcagtgtcccgctcaggtgcagcctcctccctaaagctcatctcagcttttgatctgaatgatgatggaaacatgcagacagcctctcagtcttactatttaatgttgtagctgggaaaaaacccagagaggttaactgatatactgggttgggactaggatgtgggttttgtgactctgaatcccatgttctcaaactacgctgccttccgaagtctggcatttgttagctcatgcttccttgtagtccagcttcttatgtgcctgttatattctccagtaagattgtaagccccttaagggcagggacgtctttgcatctctagcactgctatagtgttctatccttagttatgaactagataaataaatggtggtggca

SEQ ID NO: 425546 - DNA, 5181 bp, Homo sapiens
agtttgatatataaaaaacacatttaaaaaatatttcaggaaaaatgttatagtaaacatcatctagaattaatttgattttctttttagtataatggatacgaaagtcaccatatttttaaaagagcaatttcacattacatttttaaaaaatctacccagtctaccaattaaggtgaactattatagcagggaagtgtttagctagagaaaaagagaattttatttagtatcccaggagtaatgatttgaagaaatatatcgtgctattttagtttttaaacttcagaagtttgaggatttcagaaaagaatttagcctggttattttaagtgacaggattatttattgcatttaataattaataatgtgcctaatttgttacatatttgttattgtttggcttatcgtcaaatttaatcaatattaaaatcctatagaaagtgtaggagaatattttaatccattattaatgccttctaaagataatagagaagcttttatgcctaggctttttaagagtatgtataggctgggcacagtggctcacacctgtaatcccagcacattgggaggctgaggtgggtggatcacgaggttaggagttcgagactagcctggccaacatggtgaagccccatctctactaaaaatacaaaaattacctgggtgtggtggcacgtgcctttaattccagctactcaggaggccgaggcaggggaatcacttgaacccaggaggcaagggtgcagtgagccgagattgtgccattgcactctagcctgggtgacagagtgagactctgtctaaaaaaaaaaaagagtatgtgtaatataatgcctagaaaagggctcaaagattatatgtgaaaatcttgatggtgattatccctaaatggtatgatatgggtgagttttgtattttctttttgcttctctgtatttaattacatttatgtaacaaataaaataccttgtaagattatagtttgaaaatgtgcttccaaaatgtgtatttaagggttttatttcagcataataactagtgagtttctttttaaaaattaaaggaaaattagaacacttaaattttagtcttttaggtatactcagggaatctttcatggttactcactaccgcatatgttatcaacacatagctttatgttcttttttagtaggggagcttgataatggaaaacagtatgaggaattgtcacactgtatgagattttaaactaaggcataagaatgaaaccggatgttagttcctcttttatcacacttgctcttcaagtttacctggccacatgtcccttctagaatttcccgtgttctttagaaacactggttcctatgatatgagaaatcttcctgtttttcacttagtattcttaaatatatgtaataaataactttattatggttctttagttccttgagtagcttgcgataattgttcttgagtacttgttcctactatttttactattgtaggcttgtttaggctttttctaaatgcatagagcaggaggtacatactttatctagcaatacctcattgatggctgacataccaaagaaagtatatatgatatttatcttaagaattaatatcagttaaaaatgaaaatttctttgaaacaattgagtattgtaggcagatttaggaatgggtttgagacagttctgtgtgccagttcatctcatttttctttgtttactgcctcactctaattttcttccagcatttcatcttgttttgtgatctggtacattccaggcttttggcatataatattgataataagatgaatcttttggtctcatatttagtataagatttaggccacaaacatctaatggagtcatgggtagaaaataagatataagaaattattgcagacgtttaacttttaaattgcagactatcggtggtccatgtcaagtgatagttcacaagtgggagactcatctacaaccacgatcaataacccctttagaaagcgaaattattattgacgatggacaatttggaatccacaatggtgttgaaactctggattctggatggctgacatgtcagactgaaataagattacgtttgcattattctgaaaaacctcctgtgtcaataaccaagaaaaaattaaaaaaatctagatttagggtgaagctgacactagaaggcctggaggaagatgacgatgatagggtatctcccactgtactccacaaaatgtccaatagcttggagatatccttaataagcgacaatgagttcaagtgcaggcattcacagccggagtgtggttatggcttgcagcctgatcgttggacagagtacagcatacagacgatggaaccagataacctggaactaatctttgattttttcgaagaagatctcagtgagcacgtagttcagggtgatgcccttcctggacatgtgggtacagcttgtctcttatcatccaccattgctgagagtggaaagagtgctggaattcttactcttcccatcatgagcagaaattcccggaaaacaataggcaaagtgagaggtaaggttgaagacactgccaaataacccaaggttaagttagaattttaattagtttcaaattaagtatttgataatgataaagatgaaattaataatttgctttagtatcaatttaaggagcatgtctgttacattttgaatcttgtttttttttccgtttgacagaaactgataaagctgacttgagtggtatttaaatataatgtagctcataatggcccttttaatcatttttatttttgttcctccctcttttttcctatgaaagttgactatataattattaagccattaccaggatacagttgtgacatgaaatcttcattttccaagtattggaagccaagaataccattggatgttggccatcgaggtgcaggaaactctacaacaactgcccagctggctaaagttcaagaaaatactattgcttctttaagaaatgctgctagtcatggtgcagcctttgtagaatttgacgtacacctttcaaaggactttgtgcccgtggtatatcatgatcttacctgttgtttgactatgaaaaagaaatttgatgctgatccagttgaattatttgaaattccagtaaaagaattaacatttgaccaactccagttgttaaagctcactcatgtgactgcactgaaatctaaggatcggaaagaatctgtggttcaggaggaaaattccttttcagaaaatcagccatttccttctcttaagatggttttagagtctttgccagaagatgtagggtttaacattgaaataaaatggatctgccagcaaagggatggaatgtgggatggtaacttatcaacatattttgacatgaatctgtttttggatataattttaaaaactgttttagaaaattctgggaagaggagaatagtgttttcttcatttgatgcagatatttgcacaatggttcggcaaaagcagaacaaatatccgatactatttttaactcaaggaaaatctgagatttatcctgaactcatggacctcagatctcggacaacccccattgcaatgagctttgcacagtttgaaaatctactggggataaatgtacatactgaagacttgctcagaaacccatcctatattcaagaggcaaaagctaagggactagtcatattctgctggggtgatgataccaatgatcctgaaaacagaaggaaattgaaggaacttggagttaatggtctaatttatgataggatatatgattggatgcctgaacaaccaaatatattccaagtggagcaattggaacgcctgaagcaggaattgccagagcttaagagctgtttgtgtcccactgttagccgctttgttccctcatctttgtgtggggagtctgatatccatgtggatgccaacggcattgataacgtggagaatgcttagtttttattgcacagaggtcattttgggggcgtgcaccgctgttctgggtattcatttttcatcactgagcattgttgatctatgccttttgggcttctcagttcaatgaagcaataatgaagtatttaactctttcactacagttcttgcaagtatgctatttaaattacttggccaggtataattgccagtcagtctctttatagtgagaaaatttattggttagtaatataaatattttaaactaaatatataaatctataatgttaaacatatgttcattaaaagcatagcactttgaaattaactatataaatagctcatatttacacttacagcttttcatttgatcaggtctgaaatctttagcacttaaggaaaatgactatgcataattatacctgaccatgaaaaaaataagtacctcaaatgcatgcatttgcactggtgattccaactgcacaaatctttgtgccatcttgtatataggtattttttacatgggttgacatgcacacaacaccattttcattcagtatgaaccttgaggctgctgccatttttccacttaaccaaaccagcctgaaggtgaacctcgaaacttgtttcataaatctttcaaaagttgttttacatcaatgttaaaatttcaaaatgctgcagggtaatttaatgtataaaatattagtaagaaaaagtatgtattgcatacttagtagaatagatcacaacatacaaattcaattcagtgcatgctttaggtgttaagcatgagattgtacatgtttactgttaggtccttgcatctgtggtgctaggtgagtatgagaagatgtcaaggactggacgtattttgttgcctaaaaaaaaaaggctgtttgtaggcgttttaaatatgcttattttgtgtgtctctcactacctattacacactgttgctttgtgggtttgttttgtatgtgcgtgtgttatacagtagttaaatttccatgcagaaaaataaatgtcctgaattttcatattagtattctttattgtatatcatgcatgtaatttatttagaaatgtaggtcttactaaatgtatatgcatgtatttcagattatactaggatttcttggattagaagcagattgtgttaactgtaacttaaagaatgaatgttaaataaaatgatacagatttattttcttcatt

SEQ ID NO: 425547 - DNA, 1948 bp, Homo sapiens
agctgcctctagaggatccaccaaggtaagtcgagaccgactgcatgtttttcacaaggcagtttattcatatattgacatattttggtagtagctgagaacctaagacttgaaattatacattgtgtagtattttttaagctaagcaatgcaattttggtcagatcttatttgtgtgaagataggctctgaaatcctatggtattgcgtttgtaacgttgatattaatgcaaaatagtttaggaaatggagtcttctgcaagggttctgtatacttttcccacattgtatgagattttccaaaattttggtgtgaattgggcacttttggaaaactcctgaaaaagaattagtttccttcatctgcagacctttgtccaatacggttaccatttctttatagtaactcgattagccatatatgtttgtttctagtcctgctcctttgctcctctcctatgccttcccagtgctggctccattttgaagactcaaggacagaggggaagcagatcataaagagaaaaaggagacagaagaaaggatgaaggaaggaggtcatggggagtgtggcttctgagcagtttagttgctggggagagcagacagtcactgcctacaatacagacagaaccttcctgctcactttctgtcctatctcttcctgaccttatgaaccagtgttagtagatgattaaaacatgacaagcaatggctccttattttcacaggactaagtccgggccttcgtatcactagctgttgccttttacaccctgcttcagccaccctgtccctgtcattggccctggacttcctctctgtgcccgtgtgtcctctgcctgggagccctctcctcccatagtcactttctctctgccaaactcatttcttcttgtgcccaagacctctctcctgagcccctgtggaaacttcaggaaggatgaatccgtctttgtgctccacggctcgtaccttgatcaggctgtgcatcacagtaattccgttctaggtaggcagagttgatctttgtctcatctgccaggctgcgggctcttcaagggcagggaccttgtcatagtcatttttattttcacagtgcttggaacatggtggaaaatgaatgttggaattattggagtaatataatttgtatcaaatgtccttttgaattaagagatttagttatgtttactaagaatgtaaactttgaattggtttgcattttaacaattaggatggtttattgatgtgaattttgaaatgtagaggtataatgttaaattattttatactttatggaaatcaagtgaaatgtttgaaaaaatgccgccattatcctctggtattttctactctctggaattatgtgctgtaaatgatcggctgtaaatgtgaggcacaccacccacccctgtgtggaaagtgttgtggcgcttcctgccacccacccacctctctgccgttgctccttgtgacacttgtctgtcgtctcccatccaaactccaagcttacagctacctcagtactgctttgcttgtctgaaacacctcctttgccttccttcagtgtcccgctcaggtgcagcctcctccctaaagctcatctcagcttttgatctgaatgatgatggaaacatgcagacagcctctcagtcttactatttaatgttgtagctgggaaaaaacccagagaggttaactgatatactgggttgggactaggatgtgggttttgtgactctgaatcccatgttctcaaactacgctgccttccgaagtctggcatttgttagctcatgcttccttgtagtccagcttcttatgtgcctgttatattctccagtaagattgtaagccccttaagggcagggacgtctttgcatctctagcactgctatagtgttctatccttagttatgaactagataaataaatggtggtggca

SEQ ID NO: 425548 - DNA, 4297 bp, Homo sapiens
agtttgatatataaaaaacacatttaaaaaatatttcaggaaaaatgttatagtaaacatcatctagaattaatttgattttctttttagtataatggatacgaaagtcaccatatttttaaaagagcaatttcacattacatttttaaaaaatctacccagtctaccaattaaggtgaactattatagcagggaagtgtttagctagagaaaaagagaattttatttagtatcccaggagtaatgatttgaagaaatatatcgtgctattttagtttttaaacttcagaagtttgaggatttcagaaaagaatttagcctggttattttaagtgacaggattatttattgcatttaataattaataatgtgcctaatttgttacatatttgttattgtttggcttatcgtcaaatttaatcaatattaaaatcctatagaaagtgtaggagaatattttaatccattattaatgccttctaaagataatagagaagcttttatgcctaggctttttaagagtatgtataggctgggcacagtggctcacacctgtaatcccagcacattgggaggctgaggtgggtggatcacgaggttaggagttcgagactagcctggccaacatggtgaagccccatctctactaaaaatacaaaaattacctgggtgtggtggcacgtgcctttaattccagctactcaggaggccgaggcaggggaatcacttgaacccaggaggcaagggtgcagtgagccgagattgtgccattgcactctagcctgggtgacagagtgagactctgtctaaaaaaaaaaaagagtatgtgtaatataatgcctagaaaagggctcaaagattatatgtgaaaatcttgatggtgattatccctaaatggtatgatatgggtgagttttgtattttctttttgcttctctgtatttaattacatttatgtaacaaataaaataccttgtaagattatagtttgaaaatgtgcttccaaaatgtgtatttaagggttttatttcagcataataactagtgagtttctttttaaaaattaaaggaaaattagaacacttaaattttagtcttttaggtatactcagggaatctttcatggttactcactaccgcatatgttatcaacacatagctttatgttcttttttagtaggggagcttgataatggaaaacagtatgaggaattgtcacactgtatgagattttaaactaaggcataagaatgaaaccggatgttagttcctcttttatcacacttgctcttcaagtttacctggccacatgtcccttctagaatttcccgtgttctttagaaacactggttcctatgatatgagaaatcttcctgtttttcacttagtattcttaaatatatgtaataaataactttattatggttctttagttccttgagtagcttgcgataattgttcttgagtacttgttcctactatttttactattgtaggcttgtttaggctttttctaaatgcatagagcaggaggtacatactttatctagcaatacctcattgatggctgacataccaaagaaagtatatatgatatttatcttaagaattaatatcagttaaaaatgaaaatttctttgaaacaattgagtattgtaggcagatttaggaatgggtttgagacagttctgtgtgccagttcatctcatttttctttgtttactgcctcactctaattttcttccagcatttcatcttgttttgtgatctggtacattccaggcttttggcatataatattgataataagatgaatcttttggtctcatatttagtataagatttaggccacaaacatctaatggagtcatgggtagaaaataagatataagaaattattgcagacgtttaacttttaaattgcagactatcggtggtccatgtcaagtgatagttcacaagtgggagactcatctacaaccacgatcaataacccctttagaaagcgaaattattattgacgatggacaatttggaatccacaatggtgttgaaactctggattctggatggctgacatgtcagactgaaataagattacgtttgcattattctgaaaaacctcctgtgtcaataaccaagaaaaaattaaaaaaatctagatttagggtgaagctgacactagaaggcctggaggaagatgacgatgatagggtatctcccactgtactccacaaaatgtccaatagcttggagatatccttaataagcgacaatgagttcaagtgcaggcattcacagccggagtgtggttatggcttgcagcctgatcgttggacagagtacagcatacagacgatggaaccagataacctggaactaatctttgattttttcgaagaagatctcagtgagcacgtagttcagggtgatgcccttcctggacatgtgggtacagcttgtctcttatcatccaccattgctgagagtggaaagagtgctggaattcttactcttcccatcatgagcagaaattcccggaaaacaataggcaaagtgagaggtaaggttgaagacactgccaaataacccaaggttaagttagaattttaattagtttcaaattaagtatttgataatgataaagatgaaattaataatttgctttagtatcaatttaaggagcatgtctgttacattttgaatcttgtttttttttccgtttgacagaaactgataaagctgacttgagtggtatttaaatataatgtagctcataatggcccttttaatcatttttatttttgttcctccctcttttttcctatgaaagttgactatataattattaagccattaccaggatacagttgtgacatgaaatcttcattttccaagtattggaagccaagaataccattggatgttggccatcgaggtgcaggaaactctacaacaactgcccagctggctaaagttcaagaaaatactattgcttctttaagaaatgctgctagtcatggtgcagcctttgtagaatttgacgtacacctttcaaaggactttgtgcccgtggtatatcatgatcttacctgttgtttgactatgaaaaagaaatttgatgctgatccagttgaattatttgaaattccagtaaaagaattaacatttgaccaactccagttgttaaagctcactcatgtgactgcactgaaatctaaggatcggaaagaatctgtggttcaggaggaaaattccttttcagaaaatcagccatttccttctcttaagatggttttagagtctttgccagaagatgtagggtttaacattgaaataaaatggatctgccagcaaagggatggaatgtgggatggtaacttatcaacatattttgacatgaatctgtttttggatataattttaaaaactgttttagaaaattctgggaagaggagaatagtgttttcttcatttgatgcagatatttgcacaatggttcggcaaaagcagaacaaatatccgatactatttttaactcaaggaaaatctgagatttatcctgaactcatggacctcagatctcggacaacccccattgcaatgagctttgcacagtttgaaaatctactggggataaatgtacatactgaagacttgctcagaaacccatcctatattcaagaggcaaaagctaagggactagtcatattctgctggggtgatgataccaatgatcctgaaaacagaaggaaattgaaggaacttggagttaatggtctaatttatgataggatatatgattggatgcctgaacaaccaaatatattccaagtggagcaattggaacgcctgaagcaggaattgccagagcttaagagctgtttgtgtcccactgttagccgctttgttccctcatctttgtgtggggagtctgatatccatgtggatgccaacggcattgataacgtggagaatgcttagtttttattgcacagaggtcattttgggggcgtgcaccgctgttctgggtattcatttttcatcactgagcattgttgatctatgccttttgggcttctcagttcaatgaagcaataatgaagtatttaactctttcactacagttctttattgtatatcatgcatgtaatttatttagaaatgtaggtcttactaaatgtatatgcatgtatttcagattatactaggatttcttggattagaagcagattgtgttaactgtaacttaaagaatgaatgttaaataaaatgatacagatttattttcttcatt

SEQ ID NO: 425549 - DNA, 3894 bp, Homo sapiens
agtttgatatataaaaaacacatttaaaaaatatttcaggaaaaatgttatagtaaacatcatctagaattaatttgattttctttttagtataatggatacgaaagtcaccatatttttaaaagagcaatttcacattacatttttaaaaaatctacccagtctaccaattaaggtgaactattatagcagggaagtgtttagctagagaaaaagagaattttatttagtatcccaggagtaatgatttgaagaaatatatcgtgctattttagtttttaaacttcagaagtttgaggatttcagaaaagaatttagcctggttattttaagtgacaggattatttattgcatttaataattaataatgtgcctaatttgttacatatttgttattgtttggcttatcgtcaaatttaatcaatattaaaatcctatagaaagtgtaggagaatattttaatccattattaatgccttctaaagataatagagaagcttttatgcctaggctttttaagagtatgtataggctgggcacagtggctcacacctgtaatcccagcacattgggaggctgaggtgggtggatcacgaggttaggagttcgagactagcctggccaacatggtgaagccccatctctactaaaaatacaaaaattacctgggtgtggtggcacgtgcctttaattccagctactcaggaggccgaggcaggggaatcacttgaacccaggaggcaagggtgcagtgagccgagattgtgccattgcactctagcctgggtgacagagtgagactctgtctaaaaaaaaaaaagagtatgtgtaatataatgcctagaaaagggctcaaagattatatgtgaaaatcttgatggtgattatccctaaatggtatgatatgggtgagttttgtattttctttttgcttctctgtatttaattacatttatgtaacaaataaaataccttgtaagattatagtttgaaaatgtgcttccaaaatgtgtatttaagggttttatttcagcataataactagtgagtttctttttaaaaattaaaggaaaattagaacacttaaattttagtcttttaggtatactcagggaatctttcatggttactcactaccgcatatgttatcaacacatagctttatgttcttttttagtaggggagcttgataatggaaaacagtatgaggaattgtcacactgtatgagattttaaactaaggcataagaatgaaaccggatgttagttcctcttttatcacacttgctcttcaagtttacctggccacatgtcccttctagaatttcccgtgttctttagaaacactggttcctatgatatgagaaatcttcctgtttttcacttagtattcttaaatatatgtaataaataactttattatggttctttagttccttgagtagcttgcgataattgttcttgagtacttgttcctactatttttactattgtaggcttgtttaggctttttctaaatgcatagagcaggaggtacatactttatctagcaatacctcattgatggctgacataccaaagaaagtatatatgatatttatcttaagaattaatatcagttaaaaatgaaaatttctttgaaacaattgagtattgtaggcagatttaggaatgggtttgagacagttctgtgtgccagttcatctcatttttctttgtttactgcctcactctaattttcttccagcatttcatcttgttttgtgatctggtacattccaggcttttggcatataatattgataataagatgaatcttttggtctcatatttagtataagatttaggccacaaacatctaatggagtcatgggtagaaaataagatataagaaattattgcagacgtttaacttttaaattgcagactatcggtggtccatgtcaagtgatagttcacaagtgggagactcatctacaaccacgatcaataacccctttagaaagcgaaattattattgacgatggacaatttggaatccacaatggtgttgaaactctggattctggatggctgacatgtcagactgaaataagattacgtttgcattattctgaaaaacctcctgtgtcaataaccaagaaaaaattaaaaaaatctagatttagggtgaagctgacactagaaggcctggaggaagatgacgatgatagggtatctcccactgtactccacaaaatgtccaatagcttggagatatccttaataagcgacaatgagttcaagtgcaggcattcacagccggagtgtggttatggcttgcagcctgatcgttggacagagtacagcatacagacgatggaaccagataacctggaactaatctttgattttttcgaagaagatctcagtgagcacgtagttcagggtgatgcccttcctggacatgtgggtacagcttgtctcttatcatccaccattgctgagagtggaaagagtgctggaattcttactcttcccatcatgagcagaaattcccggaaaacaataggcaaagtgagaggtaaggttgaagacactgccaaataacccaaggttaagttagaattttaattagtttcaaattaagtatttgataatgataaagatgaaattaataatttgctttagtatcaatttaaggagcatgtctgttacattttgaatcttgtttttttttccgtttgacagaaactgataaagctgacttgagtggtatttaaatataatgtagctcataatggcccttttaatcatttttatttttgttcctccctcttttttcctatgaaagttgactatataattattaagccattaccaggatacagttgtgacatgaaatcttcattttccaagtattggaagccaagaataccattggatgttggccatcgaggtgcaggaaactctacaacaactgcccagctggctaaagttcaagaaaatactattgcttctttaagaaatgctgctagtcatggtgcagcctttgtagaatttgacgtacacctttcaaaggactttgtgcccgtggtatatcatgatcttacctgttgtttgactatgaaaaagaaatttgatgctgatccagttgaattatttgaaattccagtaaaagaattaacatttgaccaactccagttgttaaagctcactcatgtgactgcactgaaatctaaggatcggaaagaatctgtggttcaggaggaaaattccttttcagaaaatcagccatttccttctcttaagatggttttagagtctttgccagaagatgtagggtttaacattgaaataaaatggatctgccagcaaagggatggaatgtgggatggtaacttatcaacatattttgacatgaatctgtttttggatataattttaaaaactgttttagaaaattctgggaagaggagaatagtgttttcttcatttgatgcagatatttgcacaatggttcggcaaaagcagaacaaatatccgatactatttttaactcaaggaaaatctgagatttatcctgaactcatggacctcagatctcggacaacccccattgcaatgagctttgcacagtttgaaaatctactggggataaatgtacatactgaagacttgctcagaaacccatcctatattcaagaggcaaaagctaagggactagtcatattctgctggggtgatgataccaatgatcctgaaaacagaaggaaattgaaggaacttggagttaatggtctaatttatgataggtatttgtttttcatgaaaaattttcatggaatttagaagtatagatttcatcttacgaaattataaataaaattaaacttagttaagttaaaaaaaaaa

SEQ ID NO: 425550 - DNA, 3550 bp, Homo sapiens
agtttgatatataaaaaacacatttaaaaaatatttcaggaaaaatgttatagtaaacatcatctagaattaatttgattttctttttagtataatggatacgaaagtcaccatatttttaaaagagcaatttcacattacatttttaaaaaatctacccagtctaccaattaaggtgaactattatagcagggaagtgtttagctagagaaaaagagaattttatttagtatcccaggagtaatgatttgaagaaatatatcgtgctattttagtttttaaacttcagaagtttgaggatttcagaaaagaatttagcctggttattttaagtgacaggattatttattgcatttaataattaataatgtgcctaatttgttacatatttgttattgtttggcttatcgtcaaatttaatcaatattaaaatcctatagaaagtgtaggagaatattttaatccattattaatgccttctaaagataatagagaagcttttatgcctaggctttttaagagtatgtataggctgggcacagtggctcacacctgtaatcccagcacattgggaggctgaggtgggtggatcacgaggttaggagttcgagactagcctggccaacatggtgaagccccatctctactaaaaatacaaaaattacctgggtgtggtggcacgtgcctttaattccagctactcaggaggccgaggcaggggaatcacttgaacccaggaggcaagggtgcagtgagccgagattgtgccattgcactctagcctgggtgacagagtgagactctgtctaaaaaaaaaaaagagtatgtgtaatataatgcctagaaaagggctcaaagattatatgtgaaaatcttgatggtgattatccctaaatggtatgatatgggtgagttttgtattttctttttgcttctctgtatttaattacatttatgtaacaaataaaataccttgtaagattatagtttgaaaatgtgcttccaaaatgtgtatttaagggttttatttcagcataataactagtgagtttctttttaaaaattaaaggaaaattagaacacttaaattttagtcttttaggtatactcagggaatctttcatggttactcactaccgcatatgttatcaacacatagctttatgttcttttttagtaggggagcttgataatggaaaacagtatgaggaattgtcacactgtatgagattttaaactaaggcataagaatgaaaccggatgttagttcctcttttatcacacttgctcttcaagtttacctggccacatgtcccttctagaatttcccgtgttctttagaaacactggttcctatgatatgagaaatcttcctgtttttcacttagtattcttaaatatatgtaataaataactttattatggttctttagttccttgagtagcttgcgataattgttcttgagtacttgttcctactatttttactattgtaggcttgtttaggctttttctaaatgcatagagcaggaggtacatactttatctagcaatacctcattgatggctgacataccaaagaaagtatatatgatatttatcttaagaattaatatcagttaaaaatgaaaatttctttgaaacaattgagtattgtaggcagatttaggaatgggtttgagacagttctgtgtgccagttcatctcatttttctttgtttactgcctcactctaattttcttccagcatttcatcttgttttgtgatctggtacattccaggcttttggcatataatattgataataagatgaatcttttggtctcatatttagtataagatttaggccacaaacatctaatggagtcatgggtagaaaataagatataagaaattattgcagacgtttaacttttaaattgcagactatcggtggtccatgtcaagtgatagttcacaagtgggagactcatctacaaccacgatcaataacccctttagaaagcgaaattattattgacgatggacaatttggaatccacaatggtgttgaaactctggattctggatggctgacatgtcagactgaaataagattacgtttgcattattctgaaaaacctcctgtgtcaataaccaagaaaaaattaaaaaaatctagatttagggtgaagctgacactagaaggcctggaggaagatgacgatgatagggtatctcccactgtactccacaaaatgtccaatagcttggagatatccttaataagcgacaatgagttcaagtgcaggcattcacagccggagtgtggttatggcttgcagcctgatcgttggacagagtacagcatacagacgatggaaccagataacctggaactaatctttgattttttcgaagaagatctcagtgagcacgtagttcagggtgatgcccttcctggacatgtgggtacagcttgtctcttatcatccaccattgctgagagtggaaagagtgctggaattcttactcttcccatcatgagcagaaattcccggaaaacaataggcaaagtgagaggtaaggttgaagacactgccaaataacccaaggttaagttagaattttaattagtttcaaattaagtatttgataatgataaagatgaaattaataatttgctttagtatcaatttaaggagcatgtctgttacattttgaatcttgtttttttttccgtttgacagaaactgataaagctgacttgagtggtatttaaatataatgtagctcataatggcccttttaatcatttttatttttgttcctccctcttttttcctatgaaagttgactatataattattaagccattaccaggatacagttgtgacatgaaatcttcattttccaagtattggaagccaagaataccattggatgttggccatcgaggtgcaggaaactctacaacaactgcccagtaagttgaatatttgagtaggattagcatttggtgtagcttatgttcggtagagttacactggttttctcagcaaaggtcaaatgatgtttttattatttaccaagggaatttagtgtaatttggtaattggggttagagaccaaccttaagattctggtcagttttttaatatatctactgaattgataaggaggaagacattaaaagtagaaaggcaggaaggaaagcttggtgcagaaagctttgggagcatcagtgtgtgtgtctgtgtcatggtccttacttttgacgtgttgccctctctgagtctgagtttccgcatctataaaatgcaaagatttggacaacattatcccaagtctagaaaagtgtgactaaactcaaggaatattagttaacttggacctcaacgaaagatgctctatcttctcaacagacattagattgtagcctggaatagttgtcttccccttctacttttgtaagtttatttaattaccagtgcgatagctcatgccacagattttctactgtaaattttaatccctccccattttattttaaagtgatgctgtggagat

SEQ ID NO: 425551 - DNA, 2643 bp, Homo sapiens
agtttgatatataaaaaacacatttaaaaaatatttcaggaaaaatgttatagtaaacatcatctagaattaatttgattttctttttagtataatggatacgaaagtcaccatatttttaaaagagcaatttcacattacatttttaaaaaatctacccagtctaccaattaaggtgaactattatagcagggaagtgtttagctagagaaaaagagaattttatttagtatcccaggagtaatgatttgaagaaatatatcgtgctattttagtttttaaacttcagaagtttgaggatttcagaaaagaatttagcctggttattttaagtgacaggattatttattgcatttaataattaataatgtgcctaatttgttacatatttgttattgtttggcttatcgtcaaatttaatcaatattaaaatcctatagaaagtgtaggagaatattttaatccattattaatgccttctaaagataatagagaagcttttatgcctaggctttttaagagtatgtataggctgggcacagtggctcacacctgtaatcccagcacattgggaggctgaggtgggtggatcacgaggttaggagttcgagactagcctggccaacatggtgaagccccatctctactaaaaatacaaaaattacctgggtgtggtggcacgtgcctttaattccagctactcaggaggccgaggcaggggaatcacttgaacccaggaggcaagggtgcagtgagccgagattgtgccattgcactctagcctgggtgacagagtgagactctgtctaaaaaaaaaaaagagtatgtgtaatataatgcctagaaaagggctcaaagattatatgtgaaaatcttgatggtgattatccctaaatggtatgatatgggtgagttttgtattttctttttgcttctctgtatttaattacatttatgtaacaaataaaataccttgtaagattatagtttgaaaatgtgcttccaaaatgtgtatttaagggttttatttcagcataataactagtgagtttctttttaaaaattaaaggaaaattagaacacttaaattttagtcttttaggtatactcagggaatctttcatggttactcactaccgcatatgttatcaacacatagctttatgttcttttttagtaggggagcttgataatggaaaacagtatgaggaattgtcacactgtatgagattttaaactaaggcataagaatgaaaccggatgttagttcctcttttatcacacttgctcttcaagtttacctggccacatgtcccttctagaatttcccgtgttctttagaaacactggttcctatgatatgagaaatcttcctgtttttcacttagtattcttaaatatatgtaataaataactttattatggttctttagttccttgagtagcttgcgataattgttcttgagtacttgttcctactatttttactattgtaggcttgtttaggctttttctaaatgcatagagcaggaggtacatactttatctagcaatacctcattgatggctgacataccaaagaaagtatatatgatatttatcttaagaattaatatcagttaaaaatgaaaatttctttgaaacaattgagtattgtaggcagatttaggaatgggtttgagacagttctgtgtgccagttcatctcatttttctttgtttactgcctcactctaattttcttccagcatttcatcttgttttgtgatctggtacattccaggcttttggcatataatattgataataagatgaatcttttggtctcatatttagtataagatttaggccacaaacatctaatggagtcatgggtagaaaataagatataagaaattattgcagacgtttaacttttaaattgcagactatcggtggtccatgtcaagtgatagttcacaagtgggagactcatctacaaccacgatcaataacccctttagaaagcgaaattattattgacgatggacaatttggaatccacaatggtgttgaaactctggattctggatggctgacatgtcagactgaaataagattacgtttgcattattctgaaaaacctcctgtgtcaataaccaagaaaaaattaaaaaaatctagatttagggtgaagctgacactagaaggcctggaggaagatgacgatgatagggtatctcccactgtactccacaaaatgtccaatagcttggagatatccttaataagcgacaatgagttcaagtgcaggcattcacagccggagtgtggttatggcttgcagcctgatcgttggacagagtacagcatacagacgatggaaccagataacctggaactaatctttgattttttcgaagtgagtagttactgcagtgaggggattgagaaagagtgcagggacaagcttattttaacgttggttttgattttcattttaatctaatttgtgtaaggctaactttttagaggtatgctcttctgtacagttaagcttaaaaaacttagagttgtcatcttcaagtactattaagaatataattaagagatacagcagtattgatgttccaatcaagaccagatgtctttgatgcctgtatgc

SEQ ID NO: 425552 - DNA, 505 bp, Homo sapiens
caggtgtgagccaccacgcctggccttaataatgttcttgatgtgaaacttattagtagctactgtttgactttctagaaaatattgattaataaccctttagagtactgataggcatttagtgtttgtctgttaaaattggaagctgtcttgaaagcagagactgtggttttatcccttttgtactcttgggttcttgttactggctcaatgagtagttgaacagatgaagaaaacttcatccgtatgccttcccccttttctctggctttggttctagaaaggtgagtcgagttaattggcaggtgttagtgagtggtaggtacctgggcccaaacctatatctagtgaggctctttcatctctgctaaagggggcagcatatctggttgaactaatgcaaacttccctgcttatcccactgtgactgattgttctgtttctctgtgactgattgttctgtttctttaggagaagtttttgcgatatgtggaagctgtgatgc

SEQ ID NO: 425553 - DNA, 540 bp, Homo sapiens
atcccagtgcctctagagcacctttctgaagagttttctttttcttctttttaacataatggacaatcaacgaagtatgtaagaaccattactgtttgctagcctcctttaaagggaattctttattgagggctacaataaatatgcttattcaccttgggctgcttttaagctgtagatttaatattataaacgatctttaaggtgggtaatttctcagttgttcactgggtatgcatcaagagttttaactaaattttctattttccttaaattctagaaagcgaaattattattgacgatggacaatttggaatccacagtaagtgagactgacttacttaaatgtttactgaaatgattgagattgttactttacatttcactggagttatatagcacaggaaaatagaacatacagtcatgtgctgcataacgatattttggtcaaagacaggccacacgtgcagcagcagtctcatatgattataatgaagctgaaaaattccctgtacttacacaaacaacaatgaaatcgtc

SEQ ID NO: 425554 - DNA, 7202 bp, Homo sapiens
agtttgatatataaaaaacacatttaaaaaatatttcaggaaaaatgttatagtaaacatcatctagaattaatttgattttctttttagtataatggatacgaaagtcaccatatttttaaaagagcaatttcacattacatttttaaaaaatctacccagtctaccaattaaggtgaactattatagcagggaagtgtttagctagagaaaaagagaattttatttagtatcccaggagtaatgatttgaagaaatatatcgtgctattttagtttttaaacttcagaagtttgaggatttcagaaaagaatttagcctggttattttaagtgacaggattatttattgcatttaataattaataatgtgcctaatttgttacatatttgttattgtttggcttatcgtcaaatttaatcaatattaaaatcctatagaaagtgtaggagaatattttaatccattattaatgccttctaaagataatagagaagcttttatgcctaggctttttaagagtatgtataggctgggcacagtggctcacacctgtaatcccagcacattgggaggctgaggtgggtggatcacgaggttaggagttcgagactagcctggccaacatggtgaagccccatctctactaaaaatacaaaaattacctgggtgtggtggcacgtgcctttaattccagctactcaggaggccgaggcaggggaatcacttgaacccaggaggcaagggtgcagtgagccgagattgtgccattgcactctagcctgggtgacagagtgagactctgtctaaaaaaaaaaaagagtatgtgtaatataatgcctagaaaagggctcaaagattatatgtgaaaatcttgatggtgattatccctaaatggtatgatatgggtgagttttgtattttctttttgcttctctgtatttaattacatttatgtaacaaataaaataccttgtaagattatagtttgaaaatgtgcttccaaaatgtgtatttaagggttttatttcagcataataactagtgagtttctttttaaaaattaaaggaaaattagaacacttaaattttagtcttttaggtatactcagggaatctttcatggttactcactaccgcatatgttatcaacacatagctttatgttcttttttagtaggggagcttgataatggaaaacagtatgaggaattgtcacactgtatgagattttaaactaaggcataagaatgaaaccggatgttagttcctcttttatcacacttgctcttcaagtttacctggccacatgtcccttctagaatttcccgtgttctttagaaacactggttcctatgatatgagaaatcttcctgtttttcacttagtattcttaaatatatgtaataaataactttattatggttctttagttccttgagtagcttgcgataattgttcttgagtacttgttcctactatttttactattgtaggcttgtttaggctttttctaaatgcatagagcaggaggtacatactttatctagcaatacctcattgatggctgacataccaaagaaagtatatatgatatttatcttaagaattaatatcagttaaaaatgaaaatttctttgaaacaattgagtattgtaggcagatttaggaatgggtttgagacagttctgtgtgccagttcatctcatttttctttgtttactgcctcactctaattttcttccagcatttcatcttgttttgtgatctggtacattccaggcttttggcatataatattgataataagatgaatcttttggtctcatatttagtataagatttaggccacaaacatctaatggagtcatgggtagaaaataagatataagaaattattgcagacgtttaacttttaaattgcagactatcggtggtccatgtcaagtgatagttcacaagtgggagactcatctacaaccacgatcaataacccctttagaaagcgaaattattattgacgatggacaatttggaatccacaatggtgttgaaactctggattctggatggctgacatgtcagactgaaataagattacgtttgcattattctgaaaaacctcctgtgtcaataaccaagaaaaaattaaaaaaatctagatttagggtgaagctgacactagaaggcctggaggaagatgacgatgatagggtatctcccactgtactccacaaaatgtccaatagcttggagatatccttaataagcgacaatgagttcaagtgcaggcattcacagccggagtgtggttatggcttgcagcctgatcgttggacagagtacagcatacagacgatggaaccagataacctggaactaatctttgattttttcgaagaagatctcagtgagcacgtagttcagggtgatgcccttcctggacatgtgggtacagcttgtctcttatcatccaccattgctgagagtggaaagagtgctggaattcttactcttcccatcatgagcagaaattcccggaaaacaataggcaaagtgagaggtaaggttgaagacactgccaaataacccaaggttaagttagaattttaattagtttcaaattaagtatttgataatgataaagatgaaattaataatttgctttagtatcaatttaaggagcatgtctgttacattttgaatcttgtttttttttccgtttgacagaaactgataaagctgacttgagtggtatttaaatataatgtagctcataatggcccttttaatcatttttatttttgttcctccctcttttttcctatgaaagttgactatataattattaagccattaccaggatacagttgtgacatgaaatcttcattttccaagtattggaagccaagaataccattggatgttggccatcgaggtgcaggaaactctacaacaactgcccagctggctaaagttcaagaaaatactattgcttctttaagaaatgctgctagtcatggtgcagcctttgtagaatttgacgtacacctttcaaaggactttgtgcccgtggtatatcatgatcttacctgttgtttgactatgaaaaagaaatttgatgctgatccagttgaattatttgaaattccagtaaaagaattaacatttgaccaactccagttgttaaagctcactcatgtgactgcactgaaatctaaggatcggaaagaatctgtggttcaggaggaaaattccttttcagaaaatcagccatttccttctcttaagatggttttagagtctttgccagaagatgtagggtttaacattgaaataaaatggatctgccagcaaagggatggaatgtgggatggtaacttatcaacatattttgacatgaatctgtttttggatataattttaaaaactgttttagaaaattctgggaagaggagaatagtgttttcttcatttgatgcagatatttgcacaatggttcggcaaaagcagaacaaatatccgatactatttttaactcaaggaaaatctgagatttatcctgaactcatggacctcagatctcggacaacccccattgcaatgagctttgcacagtttgaaaatctactggggataaatgtacatactgaagacttgctcagaaacccatcctatattcaagaggcaaaagctaagggactagtcatattctgctggggtgatgataccaatgatcctgaaaacagaaggaaattgaaggaacttggagttaatggtctaatttatgataggatatatgattggatgcctgaacaaccaaatatattccaagtggagcaattggaacgcctgaagcaggaattgccagagcttaagagctgtttgtgtcccactgttagccgctttgttccctcatctttgtgtggggagtctgatatccatgtggatgccaacggcattgataacgtggagaatgcttagtttttattgcacagaggtcattttgggggcgtgcaccgctgttctgggtattcatttttcatcactgagcattgttgatctatgccttttgggcttctcagttcaatgaagcaataatgaagtatttaactctttcactacagttcttgcaagtatgctatttaaattacttggccaggtataattgccagtcagtctctttatagtgagaaaatttattggttagtaatataaatattttaaactaaatatataaatctataatgttaaacatatgttcattaaaagcatagcactttgaaattaactatataaatagctcatatttacacttacagcttttcatttgatcaggtctgaaatctttagcacttaaggaaaatgactatgcataattatacctgaccatgaaaaaaataagtacctcaaatgcatgcatttgcactggtgattccaactgcacaaatctttgtgccatcttgtatataggtattttttacatgggttgacatgcacacaacaccattttcattcagtatgaaccttgaggctgctgccatttttccacttaaccaaaccagcctgaaggtgaacctcgaaacttgtttcataaatctttcaaaagttgttttacatcaatgttaaaatttcaaaatgctgcagggtaatttaatgtataaaatattagtaagaaaaagtatgtattgcatacttagtagaatagatcacaacatacaaattcaattcagtgcatgctttaggtgttaagcatgagattgtacatgtttactgttaggtccttgcatctgtggtgctaggtgagtatgagaagatgtcaaggactggacgtattttgttgcctaaaaaaaaaaggctgtttgtaggcgttttaaatatgcttattttgtgtgtctctcactacctattacacactgttgctttgtgggtttgttttgtatgtgcgtgtgttatacagtagttaaatttccatgcagaaaaataaatgtcctgaattttcatattagtattctttattgtatatcatgcatgtaatttatttagaaatgtaggtcttactaaatgtatatgcatgtatttcagattatactaggatttcttggattagaagcagattgtgttaactgtaacttaaagaatgaatgttaaataaaatgatacagatttattttcttcattacaaaatgaaatttcaagaaggtgttacttttgtagaatggttttataatatgacaagaaattttaatatagtgtctaccctaaagggatggcttatttgcatctaccttttactgcatgtttttcacaaggcagtttattcatatattgacatattttggtagtagctgagaacctaagacttgaaattatacattgtgtagtattttttaagctaagcaatgcaattttggtcagatcttatttgtgtgaagataggctctgaaatcctatggtattgcgtttgtaacgttgatattaatgcaaaatagtttaggaaatggagtcttctgcaagggttctgtatacttttcccacattgtatgagattttccaaaattttggtgtgaattgggcacttttggaaaactcctgaaaaagaattagtttccttcatctgcagacctttgtccaatacggttaccatttctttatagtaactcgattagccatatatgtttgtttctagtcctgctcctttgctcctctcctatgccttcccagtgctggctccattttgaagactcaaggacagaggggaagcagatcataaagagaaaaaggagacagaagaaaggatgaaggaaggaggtcatggggagtgtggcttctgagcagtttagttgctggggagagcagacagtcactgcctacaatacagacagaaccttcctgctcactttctgtcctatctcttcctgaccttatgaaccagtgttagtagatgattaaaacatgacaagcaatggctccttattttcacaggactaagtccgggccttcgtatcactagctgttgccttttacaccctgcttcagccaccctgtccctgtcattggccctggacttcctctctgtgcccgtgtgtcctctgcctgggagccctctcctcccatagtcactttctctctgccaaactcatttcttcttgtgcccaagacctctctcctgagcccctgtggaaacttcaggaaggatgaatccgtctttgtgctccacggctcgtaccttgatcaggctgtgcatcacagtaattccgttctaggtaggcagagttgatctttgtctcatctgccaggctgcgggctcttcaagggcagggaccttgtcatagtcatttttattttcacagtgcttggaacatggtggaaaatgaatgttggaattattggagtaatataatttgtatcaaatgtccttttgaattaagagatttagttatgtttactaagaatgtaaactttgaattggtttgcattttaacaattaggatggtttattgatgtgaattttgaaatgtagaggtataatgttaaattattttatactttatggaaatcaagtgaaatgtttgaaaaaatgccgccattatcctctggtattttctactctctggaattatgtgctgtaaatgatcggctgtaaatgtgaggcacaccacccacccctgtgtggaaagtgttgtggcgcttcctgccacccacccacctctctgccgttgctccttgtgacacttgtctgtcgtctcccatccaaactccaagcttacagctacctcagtactgctttgcttgtctgaaacacctcctttgccttccttcagtgtcccgctcaggtgcagcctcctccctaaagctcatctcagcttttgatctgaatgatgatggaaacatgcagacagcctctcagtcttactatttaatgttgtagctgggaaaaaacccagagaggttaactgatatactgggttgggactaggatgtgggttttgtgactctgaatcccatgttctcaaactacgctgccttccgaagtctggcatttgttagctcatgcttccttgtagtccagcttcttatgtgcctgttatattctccagtaagattgtaagccccttaagggcagggacgtctttgcatctctagcactgctatagtgttctatccttagttatgaactagataaataaatggtggtggca

SEQ ID NO: 425555 - DNA, 5647 bp, Homo sapiens
tggcagtttggtctggagcagctgaaaccggtttgagcgtggctgcttcctgccgctcgacgccgcggcaggccgcctgggggagcgctggcgaggcacggacggcgggcgcccggtacctctgcccgcggtcctcgctctcgggcggggcggcggcgacgcggacctgcggactagcgaacccggagcacgacatcataaaataaatccatcagaatgacaccttctcaggttgcctttgaaataagaggaactcttttaccaggagaagtttttgcgatatgtggaagctgtgatgctttgggaaactggaatcctcaaaatgctgtggctcttcttccagagaatgacacaggtgaaagcatgctatggaaagcaaccattgtactcagtagaggagtatcagttcagtatcgctacttcaaagggtactttttagaaccaaagaaagcgaaattattattgacgatggacaatttggaatccacaatggtgttgaaactctggattctggatggctgacatgtcagactgaaataagattacgtttgcattattctgaaaaacctcctgtgtcaataaccaagaaaaaattaaaaaaatctagatttagggtgaagctgacactagaaggcctggaggaagatgacgatgatagggtatctcccactgtactccacaaaatgtccaatagcttggagatatccttaataagcgacaatgagttcaagtgcaggcattcacagccggagtgtggttatggcttgcagcctgatcgttggacagagtacagcatacagacgatggaaccagataacctggaactaatctttgattttttcgaagaagatctcagtgagcacgtagttcagggtgatgcccttcctggacatgtgggtacagcttgtctcttatcatccaccattgctgagagtggaaagagtgctggaattcttactcttcccatcatgagcagaaattcccggaaaacaataggcaaagtgagaggtaaggttgaagacactgccaaataacccaaggttaagttagaattttaattagtttcaaattaagtatttgataatgataaagatgaaattaataatttgctttagtatcaatttaaggagcatgtctgttacattttgaatcttgtttttttttccgtttgacagaaactgataaagctgacttgagtggtatttaaatataatgtagctcataatggcccttttaatcatttttatttttgttcctccctcttttttcctatgaaagttgactatataattattaagccattaccaggatacagttgtgacatgaaatcttcattttccaagtattggaagccaagaataccattggatgttggccatcgaggtgcaggaaactctacaacaactgcccagctggctaaagttcaagaaaatactattgcttctttaagaaatgctgctagtcatggtgcagcctttgtagaatttgacgtacacctttcaaaggactttgtgcccgtggtatatcatgatcttacctgttgtttgactatgaaaaagaaatttgatgctgatccagttgaattatttgaaattccagtaaaagaattaacatttgaccaactccagttgttaaagctcactcatgtgactgcactgaaatctaaggatcggaaagaatctgtggttcaggaggaaaattccttttcagaaaatcagccatttccttctcttaagatggttttagagtctttgccagaagatgtagggtttaacattgaaataaaatggatctgccagcaaagggatggaatgtgggatggtaacttatcaacatattttgacatgaatctgtttttggatataattttaaaaactgttttagaaaattctgggaagaggagaatagtgttttcttcatttgatgcagatatttgcacaatggttcggcaaaagcagaacaaatatccgatactatttttaactcaaggaaaatctgagatttatcctgaactcatggacctcagatctcggacaacccccattgcaatgagctttgcacagtttgaaaatctactggggataaatgtacatactgaagacttgctcagaaacccatcctatattcaagaggcaaaagctaagggactagtcatattctgctggggtgatgataccaatgatcctgaaaacagaaggaaattgaaggaacttggagttaatggtctaatttatgataggatatatgattggatgcctgaacaaccaaatatattccaagtggagcaattggaacgcctgaagcaggaattgccagagcttaagagctgtttgtgtcccactgttagccgctttgttccctcatctttgtgtggggagtctgatatccatgtggatgccaacggcattgataacgtggagaatgcttagtttttattgcacagaggtcattttgggggcgtgcaccgctgttctgggtattcatttttcatcactgagcattgttgatctatgccttttgggcttctcagttcaatgaagcaataatgaagtatttaactctttcactacagttcttgcaagtatgctatttaaattacttggccaggtataattgccagtcagtctctttatagtgagaaaatttattggttagtaatataaatattttaaactaaatatataaatctataatgttaaacatatgttcattaaaagcatagcactttgaaattaactatataaatagctcatatttacacttacagcttttcatttgatcaggtctgaaatctttagcacttaaggaaaatgactatgcataattatacctgaccatgaaaaaaataagtacctcaaatgcatgcatttgcactggtgattccaactgcacaaatctttgtgccatcttgtatataggtattttttacatgggttgacatgcacacaacaccattttcattcagtatgaaccttgaggctgctgccatttttccacttaaccaaaccagcctgaaggtgaacctcgaaacttgtttcataaatctttcaaaagttgttttacatcaatgttaaaatttcaaaatgctgcagggtaatttaatgtataaaatattagtaagaaaaagtatgtattgcatacttagtagaatagatcacaacatacaaattcaattcagtgcatgctttaggtgttaagcatgagattgtacatgtttactgttaggtccttgcatctgtggtgctaggtgagtatgagaagatgtcaaggactggacgtattttgttgcctaaaaaaaaaaggctgtttgtaggcgttttaaatatgcttattttgtgtgtctctcactacctattacacactgttgctttgtgggtttgttttgtatgtgcgtgtgttatacagtagttaaatttccatgcagaaaaataaatgtcctgaattttcatattagtattctttattgtatatcatgcatgtaatttatttagaaatgtaggtcttactaaatgtatatgcatgtatttcagattatactaggatttcttggattagaagcagattgtgttaactgtaacttaaagaatgaatgttaaataaaatgatacagatttattttcttcattacaaaatgaaatttcaagaaggtgttacttttgtagaatggttttataatatgacaagaaattttaatatagtgtctaccctaaagggatggcttatttgcatctaccttttactgcatgtttttcacaaggcagtttattcatatattgacatattttggtagtagctgagaacctaagacttgaaattatacattgtgtagtattttttaagctaagcaatgcaattttggtcagatcttatttgtgtgaagataggctctgaaatcctatggtattgcgtttgtaacgttgatattaatgcaaaatagtttaggaaatggagtcttctgcaagggttctgtatacttttcccacattgtatgagattttccaaaattttggtgtgaattgggcacttttggaaaactcctgaaaaagaattagtttccttcatctgcagacctttgtccaatacggttaccatttctttatagtaactcgattagccatatatgtttgtttctagtcctgctcctttgctcctctcctatgccttcccagtgctggctccattttgaagactcaaggacagaggggaagcagatcataaagagaaaaaggagacagaagaaaggatgaaggaaggaggtcatggggagtgtggcttctgagcagtttagttgctggggagagcagacagtcactgcctacaatacagacagaaccttcctgctcactttctgtcctatctcttcctgaccttatgaaccagtgttagtagatgattaaaacatgacaagcaatggctccttattttcacaggactaagtccgggccttcgtatcactagctgttgccttttacaccctgcttcagccaccctgtccctgtcattggccctggacttcctctctgtgcccgtgtgtcctctgcctgggagccctctcctcccatagtcactttctctctgccaaactcatttcttcttgtgcccaagacctctctcctgagcccctgtggaaacttcaggaaggatgaatccgtctttgtgctccacggctcgtaccttgatcaggctgtgcatcacagtaattccgttctaggtaggcagagttgatctttgtctcatctgccaggctgcgggctcttcaagggcagggaccttgtcatagtcatttttattttcacagtgcttggaacatggtggaaaatgaatgttggaattattggagtaatataatttgtatcaaatgtccttttgaattaagagatttagttatgtttactaagaatgtaaactttgaattggtttgcattttaacaattaggatggtttattgatgtgaattttgaaatgtagaggtataatgttaaattattttatactttatggaaatcaagtgaaatgtttgaaaaaatgccgccattatcctctggtattttctactctctggaattatgtgctgtaaatgatcggctgtaaatgtgaggcacaccacccacccctgtgtggaaagtgttgtggcgcttcctgccacccacccacctctctgccgttgctccttgtgacacttgtctgtcgtctcccatccaaactccaagcttacagctacctcagtactgctttgcttgtctgaaacacctcctttgccttccttcagtgtcccgctcaggtgcagcctcctccctaaagctcatctcagcttttgatctgaatgatgatggaaacatgcagacagcctctcagtcttactatttaatgttgtagctgggaaaaaacccagagaggttaactgatatactgggttgggactaggatgtgggttttgtgactctgaatcccatgttctcaaactacgctgccttccgaagtctggcatttgttagctcatgcttccttgtagtccagcttcttatgtgcctgttatattctccagtaagattgtaagccccttaagggcagggacgtctttgcatctctagcactgctatagtgttctatccttagttatgaactagataaataaatggtggtggca

SEQ ID NO: 425556 - DNA, 7148 bp, Homo sapiens
agtttgatatataaaaaacacatttaaaaaatatttcaggaaaaatgttatagtaaacatcatctagaattaatttgattttctttttagtataatggatacgaaagtcaccatatttttaaaagagcaatttcacattacatttttaaaaaatctacccagtctaccaattaaggtgaactattatagcagggaagtgtttagctagagaaaaagagaattttatttagtatcccaggagtaatgatttgaagaaatatatcgtgctattttagtttttaaacttcagaagtttgaggatttcagaaaagaatttagcctggttattttaagtgacaggattatttattgcatttaataattaataatgtgcctaatttgttacatatttgttattgtttggcttatcgtcaaatttaatcaatattaaaatcctatagaaagtgtaggagaatattttaatccattattaatgccttctaaagataatagagaagcttttatgcctaggctttttaagagtatgtataggctgggcacagtggctcacacctgtaatcccagcacattgggaggctgaggtgggtggatcacgaggttaggagttcgagactagcctggccaacatggtgaagccccatctctactaaaaatacaaaaattacctgggtgtggtggcacgtgcctttaattccagctactcaggaggccgaggcaggggaatcacttgaacccaggaggcaagggtgcagtgagccgagattgtgccattgcactctagcctgggtgacagagtgagactctgtctaaaaaaaaaaaagagtatgtgtaatataatgcctagaaaagggctcaaagattatatgtgaaaatcttgatggtgattatccctaaatggtatgatatgggtgagttttgtattttctttttgcttctctgtatttaattacatttatgtaacaaataaaataccttgtaagattatagtttgaaaatgtgcttccaaaatgtgtatttaagggttttatttcagcataataactagtgagtttctttttaaaaattaaaggaaaattagaacacttaaattttagtcttttaggtatactcagggaatctttcatggttactcactaccgcatatgttatcaacacatagctttatgttcttttttagtaggggagcttgataatggaaaacagtatgaggaattgtcacactgtatgagattttaaactaaggcataagaatgaaaccggatgttagttcctcttttatcacacttgctcttcaagtttacctggccacatgtcccttctagaatttcccgtgttctttagaaacactggttcctatgatatgagaaatcttcctgtttttcacttagtattcttaaatatatgtaataaataactttattatggttctttagttccttgagtagcttgcgataattgttcttgagtacttgttcctactatttttactattgtaggcttgtttaggctttttctaaatgcatagagcaggaggtacatactttatctagcaatacctcattgatggctgacataccaaagaaagtatatatgatatttatcttaagaattaatatcagttaaaaatgaaaatttctttgaaacaattgagtattgtaggcagatttaggaatgggtttgagacagttctgtgtgccagttcatctcatttttctttgtttactgcctcactctaattttcttccagcatttcatcttgttttgtgatctggtacattccaggcttttggcatataatattgataataagatgaatcttttggtctcatatttagtataagatttaggccacaaacatctaatggagtcatgggtagaaaataagatataagaaattattgcagacgtttaacttttaaattgcagactatcggtggtccatgtcaagtgatagttcacaagtgggagactcatctacaaccacgatcaataacccctttagaaagcgaaattattattgacgatggacaatttggaatccacaatggtgttgaaactctggattctggatggctgacatgtcagactgaaataagattacgtttgcattattctgaaaaacctcctgtgtcaataaccaagaaaaaattaaaaaaatctagatttagggtgaagctgacactagaaggcctggaggaagatgacgatgatagggtatctcccactgtactccacaaaatgtccaatagcttggagatatccttaataagcgacaatgagttcaagtgcaggcattcacagccggagtgtggttatggcttgcagcctgatcgttggacagagtacagcatacagacgatggaaccagataacctggaactaatctttgattttttcgaagaagatctcagtgagcacgtagttcagggtgatgcccttcctggacatgtgggtacagcttgtctcttatcatccaccattgctgagagtggaaagagtgctggaattcttactcttcccatcatgagcagaaattcccggaaaacaataggcaaagtgagaggtaaggttgaagacactgccaaataacccaaggttaagttagaattttaattagtttcaaattaagtatttgataatgataaagatgaaattaataatttgctttagtatcaatttaaggagcatgtctgttacattttgaatcttgtttttttttccgtttgacagaaactgataaagctgacttgagtggtatttaaatataatgtagctcataatggcccttttaatcatttttatttttgttcctccctcttttttcctatgaaagttgactatataattattaagccattaccaggatacagttgtgacatgaaatcttcattttccaagtattggaagccaagaataccattggatgttggccatcgaggtgcaggaaactctacaacaactgcccagctggctaaagttcaagaaaatactattgcttctttaagaaatgctgctagtcatggtgcagcctttgtagaatttgacgtacacctttcaaaggactttgtgcccgtggtatatcatgatcttacctgttgtttgactatgaaaaagaaatttgatgctgatccagttgaattatttgaaattccagtaaaagaattaacatttgaccaactccagttgttaaagctcactcatgtgactgcactgaaatctaaggatcggaaagaatctgtggttcaggaggaaaattccttttcagaaaatcagccatttccttctcttaagatggttttagagtctttgccagaagatgtagggtttaacattgaaataaaatggatctgccagcaaagggatggaatgtgggatggtaacttatcaacatattttgacatgaatctgtttttggatataattttaaaaactgttttagaaaattctgggaagaggagaatagtgttttcttcatttgatgcagatatttgcacaatggttcggcaaaagcagaacaaatatccgatactatttttaactcaaggaaaatctgagatttatcctgaactcatggacctcagatctcggacaacccccattgcaatgagctttgcacagtttgaaaatctactggggataaatgtacatactgaagacttgctcagaaacccatcctatattcaagaggcaaaagctaagggactagtcatattctgctggggtgatgataccaatgatcctgaaaacagaaggaaattgaaggaacttggagttaatggtctaatttatgataggatatatgattggatgcctgaacaaccaaatatattccaagtggagcaattggaacgcctgaagcaggaattgccagagcttaagagctgtttgtgtcccactgttagccgctttgttccctcatctttgtgtggggagtctgatatccatgtggatgccaacggcattgataacgtggagaatgcttagtttttattgcacagaggtcattttgggggcgtgcaccgctgttctgggtattcatttttcatcactgagcattgttgatctatgccttttgggcttctcagttcaatgaagcaataatgaagtatttaactctttcactacagttcttgcaagtatgctatttaaattacttggccaggtataattgccagtcagtctctttatagtgagaaaatttattggttagtaatataaatattttaaactaaatatataaatctataatgttaaacatatgttcattaaaagcatagcactttgaaattaactatataaatagctcatatttacacttacagcttttcatttgatcaggtctgaaatctttagcacttaaggaaaatgactatgcataattatacctgaccatgaaaaaaataagtacctcaaatgcatgcatttgcactggtgattccaactgcacaaatctttgtgccatcttgtatataggtattttttacatgggttgacatgcacacaacaccattttcattcagtatgaaccttgaggctgctgccatttttccacttaaccaaaccagcctgaaggtgaacctcgaaacttgtttcataaatctttcaaaagttgttttacatcaatgttaaaatttcaaaatgctgcagggtaatttaatgtataaaatattagtaagaaaaagtatgtattgcatacttagtagaatagatcacaacatacaaattcaattcagtgcatgctttaggtgttaagcatgagattgtacatgtttactgttaggtccttgcatctgtggtgctaggtgagtatgagaagatgtcaaggactggacgtattttgttgcctaaaaaaaaaaggctgtttgtaggcgttttaaatatgcttattttgtgtgtctctcactacctattacacactgttgctttgtgggtttgttttgtatgtgcgtgtgttatacagtagttaaatttccatgcagaaaaataaatgtcctgaattttcatattagtattctttattgtatatcatgcatgtaatttatttagaaatgtaggtcttactaaatgtatatgcatgtatttcagattatactaggatttcttggattagaagcagattgtgttaactgtaacttaaagaatgaatgttaaataaaatgatacagatttattttcttcattacaaaatgaaatttcaagaaggtgttacttttgtagaatggttttataatatgacaagaaattttaatatagtgtctaccctaaagggatggcttatttgcatctaccttttactgcatgtttttcacaaggcagtttattcatatattgacatattttggtagtagctgagaacctaagacttgaaattatacattgtgtagtattttttaagctaagcaatgcaattttggtcagatcttatttgtgtgaagataggctctgaaatcctatggtattgcgtttgtaacgttgatattaatgcaaaatagtttaggaaatggagtcttctgcaagggttctgtatacttttcccacattgtatgagattttccaaaattttggtgtgaattgggcacttttggaaaactcctgaaaaagaattagtttccttcatctgcagacctttgtccaatacggttaccatttctttatagtaactcgattagccatatatgtttgtttctagtcctgctcctttgctcctctcctatgccttcccagtgctggctccattttgaagactcaaggacagaggggaagcagatcataaagagaaaaaggagacagaagaaaggatgaaggaaggaggtcatggggagtgtggcttctgagcagtttagttgctggggagagcagacagtcactgcctacaatacagacagaaccttcctgctcactttctgtcctatctcttcctgaccttatgaaccagtgttagtagatgattaaaacatgacaagcaatggctccttattttcacaggactaagtccgggccttcgtatcactagctgttgccttttacaccctgcttcagccaccctgtccctgtcattggccctggacttcctctctgtgcccgtgtgtcctctgcctgggagccctctcctcccatagtcactttctctctgccaaactcatttcttcttgtgcccaagacctctctcctgagcccctgtggaaacttcaggaaggatgaatccgtctttgtgctccacggctcgtaccttgatcaggctgtgcatcacagtaattccgttctaggtaggcagagttgatctttgtctcatctgccaggctgcgggctcttcaagggcagggaccttgtcatagtcatttttattttcacagtgcttggaacatggtggaaaatgaatgttggaattattggagtaatataatttgtatcaaatgtccttttgaattaagagatttagttatgtttactaagaatgtaaactttgaattggtttgcattttaacaattaggatggtttattgatgtgaattttgaaatgtagaggtataatgttaaattattttatactttatggaaatcaagtgaaatgtttgaaaatgatcggctgtaaatgtgaggcacaccacccacccctgtgtggaaagtgttgtggcgcttcctgccacccacccacctctctgccgttgctccttgtgacacttgtctgtcgtctcccatccaaactccaagcttacagctacctcagtactgctttgcttgtctgaaacacctcctttgccttccttcagtgtcccgctcaggtgcagcctcctccctaaagctcatctcagcttttgatctgaatgatgatggaaacatgcagacagcctctcagtcttactatttaatgttgtagctgggaaaaaacccagagaggttaactgatatactgggttgggactaggatgtgggttttgtgactctgaatcccatgttctcaaactacgctgccttccgaagtctggcatttgttagctcatgcttccttgtagtccagcttcttatgtgcctgttatattctccagtaagattgtaagccccttaagggcagggacgtctttgcatctctagcactgctatagtgttctatccttagttatgaactagataaataaatggtggtggca

SEQ ID NO: 425557 - DNA, 4392 bp, Homo sapiens
agtcacagccatagtcatattttggggatgtcaaaactggcctcagaatacagaataagtaccatttcccattgttgaaagtacactttgcttctttattacatttgtttctttatcttctctatagtctatgttaactgtatttcttcttttcaggctggctaaagttcaagaaaatactattgcttctttaagaaatgctgctagtcatggtgcagcctttgtagaatttgacgtacacctttcaaaggactttgtgcccgtggtatatcatgatcttacctgttgtttgactatgaaaaagaaatttgatgctgatccagttgaattatttgaaattccagtaaaagaattaacatttgaccaactccagttgttaaagctcactcatgtgactgcactgaaatctaaggatcggaaagaatctgtggttcaggaggaaaattccttttcagaaaatcagccatttccttctcttaagatggttttagagtctttgccagaagatgtagggtttaacattgaaataaaatggatctgccagcaaagggatggaatgtgggatggtaacttatcaacatattttgacatgaatctgtttttggatataattttaaaaactgttttagaaaattctgggaagaggagaatagtgttttcttcatttgatgcagatatttgcacaatggttcggcaaaagcagaacaaatatccgatactatttttaactcaaggaaaatctgagatttatcctgaactcatggacctcagatctcggacaacccccattgcaatgagctttgcacagtttgaaaatctactggggataaatgtacatactgaagacttgctcagaaacccatcctatattcaagaggcaaaagctaagggactagtcatattctgctggggtgatgataccaatgatcctgaaaacagaaggaaattgaaggaacttggagttaatggtctaatttatgataggatatatgattggatgcctgaacaaccaaatatattccaagtggagcaattggaacgcctgaagcaggaattgccagagcttaagagctgtttgtgtcccactgttagccgctttgttccctcatctttgtgtggggagtctgatatccatgtggatgccaacggcattgataacgtggagaatgcttagtttttattgcacagaggtcattttgggggcgtgcaccgctgttctgggtattcatttttcatcactgagcattgttgatctatgccttttgggcttctcagttcaatgaagcaataatgaagtatttaactctttcactacagttcttgcaagtatgctatttaaattacttggccaggtataattgccagtcagtctctttatagtgagaaaatttattggttagtaatataaatattttaaactaaatatataaatctataatgttaaacatatgttcattaaaagcatagcactttgaaattaactatataaatagctcatatttacacttacagcttttcatttgatcaggtctgaaatctttagcacttaaggaaaatgactatgcataattatacctgaccatgaaaaaaataagtacctcaaatgcatgcatttgcactggtgattccaactgcacaaatctttgtgccatcttgtatataggtattttttacatgggttgacatgcacacaacaccattttcattcagtatgaaccttgaggctgctgccatttttccacttaaccaaaccagcctgaaggtgaacctcgaaacttgtttcataaatctttcaaaagttgttttacatcaatgttaaaatttcaaaatgctgcagggtaatttaatgtataaaatattagtaagaaaaagtatgtattgcatacttagtagaatagatcacaacatacaaattcaattcagtgcatgctttaggtgttaagcatgagattgtacatgtttactgttaggtccttgcatctgtggtgctaggtgagtatgagaagatgtcaaggactggacgtattttgttgcctaaaaaaaaaaggctgtttgtaggcgttttaaatatgcttattttgtgtgtctctcactacctattacacactgttgctttgtgggtttgttttgtatgtgcgtgtgttatacagtagttaaatttccatgcagaaaaataaatgtcctgaattttcatattagtattctttattgtatatcatgcatgtaatttatttagaaatgtaggtcttactaaatgtatatgcatgtatttcagattatactaggatttcttggattagaagcagattgtgttaactgtaacttaaagaatgaatgttaaataaaatgatacagatttattttcttcattacaaaatgaaatttcaagaaggtgttacttttgtagaatggttttataatatgacaagaaattttaatatagtgtctaccctaaagggatggcttatttgcatctaccttttactgcatgtttttcacaaggcagtttattcatatattgacatattttggtagtagctgagaacctaagacttgaaattatacattgtgtagtattttttaagctaagcaatgcaattttggtcagatcttatttgtgtgaagataggctctgaaatcctatggtattgcgtttgtaacgttgatattaatgcaaaatagtttaggaaatggagtcttctgcaagggttctgtatacttttcccacattgtatgagattttccaaaattttggtgtgaattgggcacttttggaaaactcctgaaaaagaattagtttccttcatctgcagacctttgtccaatacggttaccatttctttatagtaactcgattagccatatatgtttgtttctagtcctgctcctttgctcctctcctatgccttcccagtgctggctccattttgaagactcaaggacagaggggaagcagatcataaagagaaaaaggagacagaagaaaggatgaaggaaggaggtcatggggagtgtggcttctgagcagtttagttgctggggagagcagacagtcactgcctacaatacagacagaaccttcctgctcactttctgtcctatctcttcctgaccttatgaaccagtgttagtagatgattaaaacatgacaagcaatggctccttattttcacaggactaagtccgggccttcgtatcactagctgttgccttttacaccctgcttcagccaccctgtccctgtcattggccctggacttcctctctgtgcccgtgtgtcctctgcctgggagccctctcctcccatagtcactttctctctgccaaactcatttcttcttgtgcccaagacctctctcctgagcccctgtggaaacttcaggaaggatgaatccgtctttgtgctccacggctcgtaccttgatcaggctgtgcatcacagtaattccgttctaggtaggcagagttgatctttgtctcatctgccaggctgcgggctcttcaagggcagggaccttgtcatagtcatttttattttcacagtgcttggaacatggtggaaaatgaatgttggaattattggagtaatataatttgtatcaaatgtccttttgaattaagagatttagttatgtttactaagaatgtaaactttgaattggtttgcattttaacaattaggatggtttattgatgtgaattttgaaatgtagaggtataatgttaaattattttatactttatggaaatcaagtgaaatgtttgaaaaaatgccgccattatcctctggtattttctactctctggaattatgtgctgtaaatgatcggctgtaaatgtgaggcacaccacccacccctgtgtggaaagtgttgtggcgcttcctgccacccacccacctctctgccgttgctccttgtgacacttgtctgtcgtctcccatccaaactccaagcttacagctacctcagtactgctttgcttgtctgaaacacctcctttgccttccttcagtgtcccgctcaggtgcagcctcctccctaaagctcatctcagcttttgatctgaatgatgatggaaacatgcagacagcctctcagtcttactatttaatgttgtagctgggaaaaaacccagagaggttaactgatatactgggttgggactaggatgtgggttttgtgactctgaatcccatgttctcaaactacgctgccttccgaagtctggcatttgttagctcatgcttccttgtagtccagcttcttatgtgcctgttatattctccagtaagattgtaagccccttaagggcagggacgtctttgcatctctagcactgctatagtgttctatccttagttatgaactagataaataaatggtggtggca

SEQ ID NO: 425558 - DNA, 3903 bp, Homo sapiens
ccctcgaaacccagtccctcgaacccagtattgaaataaaatggagtactgccagcaaagggatggaatgtgggatggtaacttatcaacatattttgacatgaatctgtttttggatataattttaaaaactgttttagaaaattctgggaagaggagaatagtgttttcttcatttgatgcagatatttgcacaatggttcggcaaaagcagaacaaatatccgatactatttttaactcaaggaaaatctgagatttatcctgaactcatggacctcagatctcggacaacccccattgcaatgagctttgcacagtttgaaaatctactggggataaatgtacatactgaagacttgctcagaaacccatcctatattcaagaggcaaaagctaagggactagtcatattctgctggggtgatgataccaatgatcctgaaaacagaaggaaattgaaggaacttggagttaatggtctaatttatgataggatatatgattggatgcctgaacaaccaaatatattccaagtggagcaattggaacgcctgaagcaggaattgccagagcttaagagctgtttgtgtcccactgttagccgctttgttccctcatctttgtgtggggagtctgatatccatgtggatgccaacggcattgataacgtggagaatgcttagtttttattgcacagaggtcattttgggggcgtgcaccgctgttctgggtattcatttttcatcactgagcattgttgatctatgccttttgggcttctcagttcaatgaagcaataatgaagtatttaactctttcactacagttcttgcaagtatgctatttaaattacttggccaggtataattgccagtcagtctctttatagtgagaaaatttattggttagtaatataaatattttaaactaaatatataaatctataatgttaaacatatgttcattaaaagcatagcactttgaaattaactatataaatagctcatatttacacttacagcttttcatttgatcaggtctgaaatctttagcacttaaggaaaatgactatgcataattatacctgaccatgaaaaaaataagtacctcaaatgcatgcatttgcactggtgattccaactgcacaaatctttgtgccatcttgtatataggtattttttacatgggttgacatgcacacaacaccattttcattcagtatgaaccttgaggctgctgccatttttccacttaaccaaaccagcctgaaggtgaacctcgaaacttgtttcataaatctttcaaaagttgttttacatcaatgttaaaatttcaaaatgctgcagggtaatttaatgtataaaatattagtaagaaaaagtatgtattgcatacttagtagaatagatcacaacatacaaattcaattcagtgcatgctttaggtgttaagcatgagattgtacatgtttactgttaggtccttgcatctgtggtgctaggtgagtatgagaagatgtcaaggactggacgtattttgttgcctaaaaaaaaaaggctgtttgtaggcgttttaaatatgcttattttgtgtgtctctcactacctattacacactgttgctttgtgggtttgttttgtatgtgcgtgtgttatacagtagttaaatttccatgcagaaaaataaatgtcctgaattttcatattagtattctttattgtatatcatgcatgtaatttatttagaaatgtaggtcttactaaatgtatatgcatgtatttcagattatactaggatttcttggattagaagcagattgtgttaactgtaacttaaagaatgaatgttaaataaaatgatacagatttattttcttcattacaaaatgaaatttcaagaaggtgttacttttgtagaatggttttataatatgacaagaaattttaatatagtgtctaccctaaagggatggcttatttgcatctaccttttactgcatgtttttcacaaggcagtttattcatatattgacatattttggtagtagctgagaacctaagacttgaaattatacattgtgtagtattttttaagctaagcaatgcaattttggtcagatcttatttgtgtgaagataggctctgaaatcctatggtattgcgtttgtaacgttgatattaatgcaaaatagtttaggaaatggagtcttctgcaagggttctgtatacttttcccacattgtatgagattttccaaaattttggtgtgaattgggcacttttggaaaactcctgaaaaagaattagtttccttcatctgcagacctttgtccaatacggttaccatttctttatagtaactcgattagccatatatgtttgtttctagtcctgctcctttgctcctctcctatgccttcccagtgctggctccattttgaagactcaaggacagaggggaagcagatcataaagagaaaaaggagacagaagaaaggatgaaggaaggaggtcatggggagtgtggcttctgagcagtttagttgctggggagagcagacagtcactgcctacaatacagacagaaccttcctgctcactttctgtcctatctcttcctgaccttatgaaccagtgttagtagatgattaaaacatgacaagcaatggctccttattttcacaggactaagtccgggccttcgtatcactagctgttgccttttacaccctgcttcagccaccctgtccctgtcattggccctggacttcctctctgtgcccgtgtgtcctctgcctgggagccctctcctcccatagtcactttctctctgccaaactcatttcttcttgtgcccaagacctctctcctgagcccctgtggaaacttcaggaaggatgaatccgtctttgtgctccacggctcgtaccttgatcaggctgtgcatcacagtaattccgttctaggtaggcagagttgatctttgtctcatctgccaggctgcgggctcttcaagggcagggaccttgtcatagtcatttttattttcacagtgcttggaacatggtggaaaatgaatgttggaattattggagtaatataatttgtatcaaatgtccttttgaattaagagatttagttatgtttactaagaatgtaaactttgaattggtttgcattttaacaattaggatggtttattgatgtgaattttgaaatgtagaggtataatgttaaattattttatactttatggaaatcaagtgaaatgtttgaaaaaatgccgccattatcctctggtattttctactctctggaattatgtgctgtaaatgatcggctgtaaatgtgaggcacaccacccacccctgtgtggaaagtgttgtggcgcttcctgccacccacccacctctctgccgttgctccttgtgacacttgtctgtcgtctcccatccaaactccaagcttacagctacctcagtactgctttgcttgtctgaaacacctcctttgccttccttcagtgtcccgctcaggtgcagcctcctccctaaagctcatctcagcttttgatctgaatgatgatggaaacatgcagacagcctctcagtcttactatttaatgttgtagctgggaaaaaacccagagaggttaactgatatactgggttgggactaggatgtgggttttgtgactctgaatcccatgttctcaaactacgctgccttccgaagtctggcatttgttagctcatgcttccttgtagtccagcttcttatgtgcctgttatattctccagtaagattgtaagccccttaagggcagggacgtctttgcatctctagcactgctatagtgttctatccttagttatgaactagataaataaatggtggtggca

SEQ ID NO: 425559 - DNA, 7278 bp, Homo sapiens
agtttgatatataaaaaacacatttaaaaaatatttcaggaaaaatgttatagtaaacatcatctagaattaatttgattttctttttagtataatggatacgaaagtcaccatatttttaaaagagcaatttcacattacatttttaaaaaatctacccagtctaccaattaaggtgaactattatagcagggaagtgtttagctagagaaaaagagaattttatttagtatcccaggagtaatgatttgaagaaatatatcgtgctattttagtttttaaacttcagaagtttgaggatttcagaaaagaatttagcctggttattttaagtgacaggattatttattgcatttaataattaataatgtgcctaatttgttacatatttgttattgtttggcttatcgtcaaatttaatcaatattaaaatcctatagaaagtgtaggagaatattttaatccattattaatgccttctaaagataatagagaagcttttatgcctaggctttttaagagtatgtataggctgggcacagtggctcacacctgtaatcccagcacattgggaggctgaggtgggtggatcacgaggttaggagttcgagactagcctggccaacatggtgaagccccatctctactaaaaatacaaaaattacctgggtgtggtggcacgtgcctttaattccagctactcaggaggccgaggcaggggaatcacttgaacccaggaggcaagggtgcagtgagccgagattgtgccattgcactctagcctgggtgacagagtgagactctgtctaaaaaaaaaaaagagtatgtgtaatataatgcctagaaaagggctcaaagattatatgtgaaaatcttgatggtgattatccctaaatggtatgatatgggtgagttttgtattttctttttgcttctctgtatttaattacatttatgtaacaaataaaataccttgtaagattatagtttgaaaatgtgcttccaaaatgtgtatttaagggttttatttcagcataataactagtgagtttctttttaaaaattaaaggaaaattagaacacttaaattttagtcttttaggtatactcagggaatctttcatggttactcactaccgcatatgttatcaacacatagctttatgttcttttttagtaggggagcttgataatggaaaacagtatgaggaattgtcacactgtatgagattttaaactaaggcataagaatgaaaccggatgttagttcctcttttatcacacttgctcttcaagtttacctggccacatgtcccttctagaatttcccgtgttctttagaaacactggttcctatgatatgagaaatcttcctgtttttcacttagtattcttaaatatatgtaataaataactttattatggttctttagttccttgagtagcttgcgataattgttcttgagtacttgttcctactatttttactattgtaggcttgtttaggctttttctaaatgcatagagcaggaggtacatactttatctagcaatacctcattgatggctgacataccaaagaaagtatatatgatatttatcttaagaattaatatcagttaaaaatgaaaatttctttgaaacaattgagtattgtaggcagatttaggaatgggtttgagacagttctgtgtgccagttcatctcatttttctttgtttactgcctcactctaattttcttccagcatttcatcttgttttgtgatctggtacattccaggcttttggcatataatattgataataagatgaatcttttggtctcatatttagtataagatttaggccacaaacatctaatggagtcatgggtagaaaataagatataagaaattattgcagacgtttaacttttaaattgcagactatcggtggtccatgtcaagtgatagttcacaagtgggagactcatctacaaccacgatcaataacccctttagaaagcgaaattattattgacgatggacaatttggaatccacaatggtgttgaaactctggattctggatggctgacatgtcagactgaaataagattacgtttgcattattctgaaaaacctcctgtgtcaataaccaagaaaaaattaaaaaaatctagatttagggtgaagctgacactagaaggcctggaggaagatgacgatgatagggtatctcccactgtactccacaaaatgtccaatagcttggagatatccttaataagcgacaatgagttcaagtgcaggcattcacagccggagtgtggttatggcttgcagcctgatcgttggacagagtacagcatacagacgatggaaccagataacctggaactaatctttgattttttcgaagaagatctcagtgagcacgtagttcagggtgatgcccttcctggacatgtgggtacagcttgtctcttatcatccaccattgctgagagtggaaagagtgctggaattcttactcttcccatcatgagcagaaattcccggaaaacaataggcaaagtgagaggtaaggttgaagacactgccaaataacccaaggttaagttagaattttaattagtttcaaattaagtatttgataatgataaagatgaaattaataatttgctttagtatcaatttaaggagcatgtctgttacattttgaatcttgtttttttttccgtttgacagaaactgataaagctgacttgagtggtatttaaatataatgtagctcataatggcccttttaatcatttttatttttgttcctccctcttttttcctatgaaagttgactatataattattaagccattaccaggatacagttgtgacatgaaatcttcattttccaagtattggaagccaagaataccattggatgttggccatcgaggtgcaggaaactctacaacaactgcccagctggctaaagttcaagaaaatactattgcttctttaagaaatgctgctagtcatggtgcagcctttgtagaatttgacgtacacctttcaaaggactttgtgcccgtggtatatcatgatcttacctgttgtttgactatgaaaaagaaatttgatgctgatccagttgaattatttgaaattccagtaaaagaattaacatttgaccaactccagttgttaaagctcactcatgtgactgcactgaaatctaaggatcggaaagaatctgtggttcaggaggaaaattccttttcagaaaatcagccatttccttctcttaagatggttttagagtctttgccagaagatgtagggtttaacattgaaataaaatggatctgccagcaaagggatggaatgtgggatggtaacttatcaacatattttgacatgaatctgtttttggatataattttaaaaactgttttagaaaattctgggaagaggagaatagtgttttcttcatttgatgcagatatttgcacaatggttcggcaaaagcagaacaaatatccgatactatttttaactcaaggaaaatctgagatttatcctgaactcatggacctcagatctcggacaacccccattgcaatgagctttgcacagtttgaaaatctactggggataaatgtacatactgaagacttgctcagaaacccatcctatattcaagaggcaaaagctaagggactagtcatattctgctggggtgatgataccaatgatcctgaaaacagaaggaaattgaaggaacttggagttaatggtctaatttatgataggatatatgattggatgcctgaacaaccaaatatattccaagtggagcaattggaacgcctgaagcaggaattgccagagcttaagagctgtttgtgtcccactgttagccgctttgttccctcatctttgtgtggggagtctgatatccatgtggatgccaacggcattgataacgtggagaatgcttagtttttattgcacagaggtcattttgggggcgtgcaccgctgttctgggtattcatttttcatcactgagcattgttgatctatgccttttgggcttctcagttcaatgaagcaataatgaagtatttaactctttcactacagttcttgcaagtatgctatttaaattacttggccaggtataattgccagtcagtctctttatagtgagaaaatttattggttagtaatataaatattttaaactaaatatataaatctataatgttaaacatatgttcattaaaagcatagcactttgaaattaactatataaatagctcatatttacacttacagcttttcatttgatcaggtctgaaatctttagcacttaaggaaaatgactatgcataattatacctgaccatgaaaaaaataagtacctcaaatgcatgcatttgcactggtgattccaactgcacaaatctttgtgccatcttgtatataggtattttttacatgggttgacatgcacacaacaccattttcattcagtatgaaccttgaggctgctgccatttttccacttaaccaaaccagcctgaaggtgaacctcgaaacttgtttcataaatctttcaaaagttgttttacatcaatgttaaaatttcaaaatgctgcagggtaatttaatgtataaaatattagtaagaaaaagtatgtattgcatacttagtagaatagatcacaacatacaaattcaattcagtgcatgctttaggtgttaagcatgagattgtacatgtttactgttaggtccttgcatctgtggtgctaggtgagtatgagaagatgtcaaggactggacgtattttgttgcctaaaaaaaaaaggctgtttgtaggcgttttaaatatgcttattttgtgtgtctctcactacctattacacactgttgctttgtgggtttgttttgtatgtgcgtgtgttatacagtagttaaatttccatgcagaaaaataaatgtcctgaattttcatattagtattctttattgtatatcatgcatgtaatttatttagaaatgtaggtcttactaaatgtatatgcatgtatttcagattatactaggatttcttggattagaagcagattgtgttaactgtaacttaaagaatgaatgttaaataaaatgatacagatttattttcttcattacaaaatgaaatttcaagaaggtgttacttttgtagaatggttttataatatgacaagaaattttaatatagtgtctaccctaaagggatggcttatttgcatctaccttttactgcatgtttttcacaaggcagtttattcatatattgacatattttggtagtagctgagaacctaagacttgaaattatacattgtgtagtattttttaagctaagcaatgcaattttggtcagatcttatttgtgtgaagataggctctgaaatcctatggtattgcgtttgtaacgttgatattaatgcaaaatagtttaggaaatggagtcttctgcaagggttctgtatacttttcccacattgtatgagattttccaaaattttggtgtgaattgggcacttttggaaaactcctgaaaaagaattagtttccttcatctgcagacctttgtccaatacggttaccatttctttatagtaactcgattagccatatatgtttgtttctagtcctgctcctttgctcctctcctatgccttcccagtgctggctccattttgaagactcaaggacagaggggaagcagatcataaagagaaaaaggagacagaagaaaggatgaaggaaggaggtcatggggagtgtggcttctgagcagtttagttgctggggagagcagacagtcactgcctacaatacagacagaaccttcctgctcactttctgtcctatctcttcctgaccttatgaaccagtgttagtagatgattaaaacatgacaagcaatggctccttattttcacaggactaagtccgggccttcgtatcactagctgttgccttttacaccctgcttcagccaccctgtccctgtcattggccctggacttcctctctgtgcccgtgtgtcctctgcctgggagccctctcctcccatagtcactttctctctgccaaactcatttcttcttgtgcccaagacctctctcctgagcccctgtggaaacttcaggaaggatgaatccgtctttgtgctccacggctcgtaccttgatcaggctgtgcatcacagtaattccgttctaggtaggcagagttgatctttgtctcatctgccaggctgcgggctcttcaagggcagggaccttgtcatagtcatttttattttcacagtgcttggaacatggtggaaaatgaatgttggaattattggagtaatataatttgtatcaaatgtccttttgaattaagagatttagttatgtttactaagaatgtaaactttgaattggtttgcattttaacaattaggatggtttattgatgtgaattttgaaatgtagaggtataatgttaaattattttatactttatggaaatcaagtgaaatgtttgaaaaaatgccgccattatcctctggtattttctactctctggaattatgtgctgtaaatgatcggctgtaaatgtgaggcacaccacccacccctgtgtggaaagtgttgtggcgcttcctgccacccacccacctctctgccgttgctccttgtgacacttgtctgtcgtctcccatccaaactccaagcttacagctacctcagtactgctttgcttgtctgaaacacctcctttgccttccttcagtgtcccgctcaggtgcagcctcctccctaaagctcatctcagcttttgatctgaatgatgatggaaacatgcagacagcctctcagtcttactatttaatgttgtagctgggaaaaaacccagagaggttaactgatatactgggttgggactaggatgtgggttttgtgactctgaatcccatgttctcaaactacgctgccttccgaagtctggcatttgttagctcatgcttccttgtagtccagcttcttatgtgcctgttatattctccagtaagattgtaagccccttaagggcagggacgtctttgcatctctagcactgctatagtgttctatccttagttatgaactagataaataaatggtggtggcaacaatcctagtttcctaactcagattgtttcacgataaacacagttttgtatggcatgcttggccataatgtctgg

SEQ ID NO: 425560 - DNA, 2344 bp, Homo sapiens
cacaccaggttcccacgactgtctaccactcagttatttttaacagctgttaaatatctcagactcaccccagcctgaagctaggtttctgacaataacatgcatttaactctaagtttacttctgttctccctacacttccccacgtatattattcgagttaatttttgtcttgtttccaatttatttcaaaggatgcgaagtacaaactgcttcggctcattgacttagatttttcatttactttctctctcttggatctaccaccagtaaatgaatatgacatgtatatcagaaactttgggaaaaaaaataccaagcaggcatatgttcagtgtaacgaagataatgttgaaagagacattcaaacggaggaaatagagaccagggaagtgtggacccagcacccgggagaaagtactgttgtatctggaggcagtgaacaaagagatacctctgatgctgtagttatgccaaagattgatactccaaggttatgtagctttctgcgggctgcttgtcaggtgatggccgttttgctggaagaggatcgcttggcagctgaacccagctggaatcttagggctcaagacagggccctgtattttagtgacagctcatctcagctgaacaccagtctaccattccttcaaaatcgaaaagtatcctccttgcacacctcccgagttcagaggcagatggtggtctccgttcacgacttacccgagaagagctttgtgcccctgctggacagcaaatacgtcctctgtgtgtgggatatttggcagccttcagggccacagaaggttctgatatgtgagtcccaggtcacgtgttgctgcttgagccctttgaaagcatttttactgtttgccggaacagcgcacggctcagttgtcgtctgggatttgagagaagactcaaggctgcattactctgtgacgctgagcgatggcttctggacgttccggaccgccacgttttccaccgatggaatccttacctcagtaaaccaccgaagccctcttcaagcagtagaacctatctcaacgtccgtccacaaaaagcagagctttgtgctttcacccttttctactcaagaagaaatgtcaggtttgtccttccacatcgcttccttggatgagagtggggttctcaatgtatgggtggttgttgaattaccaaaggcagacatcgcaggttcaataagtgatttaggtctgatgcctggagggagggtcaagctggtacatagtgctctgatccagttgggtgacagtctttcccataaaggtaatgaattttggggcactacacaaacactgaatgttaaatttctgccttcagatcctaatcactttattattggcacagacatgggtctcataagccatggcacaagacaagatttgagagtggctcccaaactattcaaacctcagcaacatggtataagaccagtgaaagttaatgtcattgatttttcaccatttggagaaccaatatttttggccggctgttcggacggaagcatcaggctgcaccagctgagctccgcgtttccgctcctgcagtgggacagcagcacggacagccatgcggtcaccggcctgcagtggtccccaaccaggcctgccgtgttcctggtgcaggacgacacatccaacatctacatctgggacctcctccagagcgatctgggtcctgtcgccaaacagcaggtctcccccaacaggctggtggccatggctgcggtgggtgagcctgagaaggctggtggcagcttcctggccctggtgctggccagggcgtctggctccatcgacatccagcacctgaagaggcggtgggcggccccggaggtggacgagtgcaacaggctgcgtctgcttttgcaggaagccctgtggccagagggaaaactgcacaagtagcgggtgtggctgagaggaccgcgtttctgtaatgacccagatttaaaagacataaggtggataattctacatttgtgtgcaagtatatttatgtatatagactatgtatattctgtatataatttattttacatgaatatttctttggtattcccagtaaatacatgactacttttgagtggaaacaaagaacattctagcatttacaaaacttccaggggaatgtagagccacgtccagggtgctcttttctgagagtatttcgagttatttttagaacagtttaaatattgtcacattactgctagattttaaacagcctaccatgaaaatgtatcttaatgaactattttcttatgcataaagtatgtgaacacacgtctaaattaaaaggaattactccaccgaaa

SEQ ID NO: 425561 - DNA, 2317 bp, Homo sapiens
  misc_feature (1213)..(1213): n is a, c, g, or t
  misc_feature (1302)..(1302): n is a, c, g, or t
  misc_feature (2219)..(2219): n is a, c, g, or t
tttaaataaactcccagtagtgaggagctgtggaacttctgattcagaccatgagtcagaggaaccaaattctcacccgggagaccagccctttcctcagtcgagccatcagtgcttcatctgggtcctctcacttagacaccctgtaatttattcttaatttctgagatggttttgtctttttcttcagtttctttcctgagttcaatcccagttctcatttcatttcttgcttttttgggtctaattctgttcttgatttctgattcccggtgttttttcttgcttgttgttttgatatgtttccagatgccctttgaggagatgtgattccatttggaacgttgagttttgtgtcttctgccttttgcttgtttttaggagggataattttcatcagctgaaatgctttcatttacattttttctgttttcttcttatagtagctttctatggagtttggcgtttttctacttgtagacattctgtaggtgtatattttaggtcagtgagctttgctttattgattggcgacaggtatcttttcagtgggcattgtgcctcgaggtggtaggtggggtgggtttgcctttcctttggttttgcaaatgcctggattttgctcttgctggcagttgtgaggtgtgtgcggaggtctcccccatttcctgttcacgtcccccttcccatcggccgtgctgctccgacctcctctgcctcccagctccttcccctcagttgtttgagtggcccccaggatttggcctcgcagagactttctctgtctgagttttctttcgggctgtgtggcatgctctgtttggatggtgggctttagctttcttcctgccttccagactggagagcaggggctggggcccgtgtgtcctaggaatctgaaagtcgtggtcctgtgtcagttgtgtgtgtcagtcgtgtgtggtccatgttggttttggggtgttttgggaagatgtgtggagagagttggatctgtgagacccagaagcacctcgtgtttgtccctgtgtgatgcgaactgcatttcttcaacttactacttacacgtggatgctgtgggcttttgaactccagatggaatccttacctcagtaaaccaccgaagccctcttcaagcagtagaacctatctcaacgtccgtccacaaaaagcagagctttgtgctttcacccttttctactcaagaaggtangtgattcttcactttcttaaaatccttcatcaatggttgtgaaatatggtttccttatttaaagccatttctttctttttgtttctgtnttcatcagaaatgtcaggtttgtccttccacatcgcttccttggatgagagtggggttctcaatgtatgggtgagtagtggcccaggccgggcacatgcggggcctgagtgaggtggtctgggtggaggtggcgcctgaatggcgcagggggcgggacccagttagctgtggtgggaaacggagagcaagactgggcttcttggtcctgagcagaagggatgcagaaggccacacatggcaggtttggggccctttcgtgacagtgaaatagggactctcacacagggctttgggaacgcggaatgaaagtgagaagggaacaaaatgttagggctgaggtgatgctggattggcttgtcctggaggatgcgccaagactgttgattaagtcaccaagtgaagagaacacgaggagatcaaagcaaaggagtcaacttgtagagtgttagttctgaggctaaagatcagtctctttttctggagcagttatgttttagtacctaaatagcactccatcttaattagagctatgctttgcttaggttgtttcataattataaaatgtatcaatattcattttcaatattctgtttttaggtggttgttgaattaccaaaggcagacatcgcaggttcaataagtgatttaggtaactattaagtaaaaaaattaattttagtgttttctaaaatgaatcgagattaaaagtactgataactgcggtcaggtgcagtggctcacacctgctgggagcctcagcacgttgggaggctgaggaaggaggattgcttgagcccaggagttccagaccagcctggacaacatagcaagaccccgtctctacaaaaaaattcaaaaattggctgggcgtggtggcacacacctgtagtcccaactgcttgggaggctaaggtgngaggattgcttgagcctaggagtttgaggctgcagtgagccgtgatcatgccactacactccagcctgggtgatggaatgagaccttgtctctctgtt

SEQ ID NO: 425562 - DNA, 426 bp, Homo sapiens
agggatgctgtgtattgatttgcatttgatgttatttcctaacacagatatttaagcaatgaaaaatgattccaggcaactataactagattttgatttagcttctattgaaaggtgcattgattttggttcatctctttttaggtctgatgcctggagggagggtcaagctggtacatagtgctctgatccagttgggtgacaggtaagatgtgagggaaaatgcttcactatctcacaaagacctagaaggaaaataacattggggaattgcatatacggtaaatggtgagcttttgcgatgaagaagtccattttctcacattgtttttttactgttttgttagtctattatttttatttttttatttttttgagacggagtttcactcttgttgccccggctggagtgcagtggtgcaatct

SEQ ID NO: 425563 - DNA, 2413 bp, Homo sapiens
  misc_feature (2)..(2): n is a, c, g, or t
  misc_feature (5)..(5): n is a, c, g, or t
  misc_feature (1076)..(1076): n is a, c, g, or t
  misc_feature (1165)..(1165): n is a, c, g, or t
gnttnggctgcaagtatctcccggaattcccggggtcgacccacgcggtccggtttctttcctgagttcaatcccagttctcatttcatttcttgcttttttgggtctaattctgttcttgatttctgattcccggtgttttttcttgcttgttgttttgatatgtttccagatgccctttgaggagatgtgattccatttggaacgttgagttttgtgtcttctgccttttgcttgtttttaggagggataattttcatcagctgaaatgctttcatttacattttttctgttttcttcttatagtagctttctatggagtttggcgtttttctacttgtagacattctgtaggtgtatattttaggtcagtgagctttgctttattgattggcgacaggtatcttttcagtgggcattgtgcctcgaggtggtaggtggggtgggtttgcctttcctttggttttgcaaatgcctggattttgctcttgctggcagttgtgaggtgtgtgcggaggtctcccccatttcctgttcacgtcccccttcccatcggccgtgctgctccgacctcctctgcctcccagctccttcccctcagttgtttgagtggcccccaggatttggcctcgcagagactttctctgtctgagttttctttcgggctgtgtggcatgctctgtttggatggtgggctttagctttcttcctgccttccagactggagagcaggggctggggcccgtgtgtcctaggaatctgaaagtcgtggtcctgtgtcagttgtgtgtgtcagtcgtgtgtggtccatgttggttttggggtgttttgggaagatgtgtggagagagttggatctgtgagacccagaagcacctcgtgtttgtccctgtgtgatgcgaactgcatttcttcaacttactacttacacgtggatgctgtgggcttttgaactccagatggaatccttacctcagtaaaccaccgaagccctcttcaagcagtagaacctatctcaacgtccgtccacaaaaagcagagctttgtgctttcacccttttctactcaagaaggtangtgattcttcactttcttaaaatccttcatcaatggttgtgaaatatggtttccttatttaaagccatttctttctttttgtttctgtnttcatcagaaatgtcaggtttgtccttccacatcgcttccttggatgagagtggggttctcaatgtatgggtggttgttgaattaccaaaggcagacatcgcaggttcaataagtgatttaggtctgatgcctggagggagggtcaagctggtacatagtgctctgatccagttgggtgacagtctttcccataaaggtaatgaattttggggcactacacaaacactgaatgttaaatttctgccttcagatcctaatcactttattattggcacagacatgggtctcataagccatggcacaagacaagatttgagagtggctcccaaactattcaaacctcagcaacatggtataagaccagtgaaagttaatgtcattgatttttcaccatttggagaaccaatatttttggccggctgttcggacggaagcatcaggctgcaccagctgagctccgcgtttccgctcctgcagtgggacagcagcacggacagccatgcggtcaccggcctgcagtggtccccaaccaggcctgccgtgttcctggtgcaggacgacacatccaacatctacatctgggacctcctccagagcgatctgggtcctgtcgccaaacagcaggtctcccccaacaggctggtggccatggctgcggtgggtgagcctgagaaggctggtggcagcttcctggccctggtgctggccagggcgtctggctccatcgacatccagcacctgaagaggcggtgggcggccccggaggtggacgagtgcaacaggctgcgtctgcttttgcaggaagccctgtggccagagggaaaactgcacaagtagcgggtgtggctgagaggaccgcgtttctgtaatgacccagatttaaaagacataaggtggataattctacatttgtgtgcaagtatatttatgtatatagactatgtatattctgtatataatttattttacatgaatatttctttggtattcccagtaaatacatgactacttttgagtggaaacaaagaacattctagcatttacaaaacttccaggggaatgtagagccacgtccagggtgctcttttctgagagtatttcgagttatttttagaacagtttaaatattgtcacattactgctagattttaaacagcctaccatgaaaatgtatcttaatgaactattttcttatgcataaagtatgtgaacacacgtctaaattaaaaggaattactccaccgaaa

SEQ ID NO: 425564 - DNA, 772 bp, Homo sapiens
attggccattttggaagagaaagtgtatcagagtcaggtgagtgctcacctttgtaatttgtgaggagagattcaatgttacaattttatgttaggaaaacaacaaattaatgtttttgcagtacaaactaaagcaagctcatcctccaaaaaatttctctggctgctgagatcaagttacgaaaaaaacaaaaaagaggctgggcatgatggctcacacctgtactcccagcactttgggaggccaaggtaggaggatcacttgaggccaggagttcgagaccagcttgggcaacatagtgagacctcatctctacgaacgatataaaaggtgggtgtagtggtgcctgcgtgtagtctcagctactcaggaggccgaggcaggaggattgattgagcccgggaggtcaagctgccatgagctgtgattgcaccactgcactccaggctgggtgacagagtgagaccctgtctcaaaaagaaaaaggccatgctcagcagtgttctttcttcctggtcataggccggctgttcggacggaagcatcaggctgcaccagctgagctccgcgtttccgctcctgcagtgggacagcagcacggacagccatgcggtcaccggcctgcagtggtccccaaccaggcctgccgtgttcctggtgcaggacgacacatccaacatctacatctgggacctcctccagagcgatctgggtcctgtcgccaaacagcaggtctcccccaacaggcaagtggggaagctctggaccagc

SEQ ID NO: 425565 - DNA, 722 bp, Homo sapiens
aagaaatagtctaccttggtgcaaaaagtaggagtcacacactaagaacttgagacagttgtacaatctaaaagaaatttctagaaatgaaactgttatctctgaaatttacaaccaagtgaatggttacatagcagattagatatagctgaagaaagaattagggaacagaaggataactctgaaaaaattatcaagagtgtagtagcagaagaaaatagaaacagagtggctaaacccacagaggaatgtgacatggcctgttatacatcgatgtattgtagtgcaaatcagtgttaataccatcattattcttaaggttggaaacagtccatctgttcattttgttactttattttttcagtctttcccataaaggtaatgaattttggggcactacacaaacactgaatgttaaatttctgccttcagatcctaatcactttattattggcacagacatggtgagtagtattttaaatttaatcctattactcattctccttgttttcctgacttacctgataaatatcttgatttaggattaacttactcttttctttataaagtttaaattgtttgaggaacagtagctgtatccaatctcgtgtgtaatgcactcgttcagtcactcttgggcttcttcttcacagggtctcataagccatggcacaagacaagatttgagagtggctcccaaactattcaaacctcagcaacat

SEQ ID NO: 425566 - DNA, 1985 bp, Homo sapiens
acaaatacataggccatataaaggaaaaaataaaactaagtatagtttttaaaaggaaaggaaaatctctaaatgccataaacaggagagagcttaaagttagtgtcataagcttttgagctgctatgtgatggcttggaggctgggtgtgaagcccaggctgtctcagaccttctgagctgtctctggggcttgagccccatgcagaaccaggcgacgcattgggtttgcctgaggcaaggaggtagaactgagacccctgcacaggactctggaactcactgctcctgcagtgatagggaaattcagaaagccgcaccacagccaagggaagacagaggagcttggaagagcttgaaatcctaagctgagtgggtgtgtgggaacccacaagctgagatgttagcatcacagttctagaccagtggcctcagtgggttcatagttaaagtagacgcaaaaccccctggtgggtaaagatatgtttgcaaattggggctcacaggtttcttatgagaagcagtctgctgcagatgagctcacaactacaagcatgaagaaatagtctaccttggtgcaaaaagtaggagtcacacactaagaacttgagacagttgtacaatctaaaagaaatttctagaaatgaaactgttatctctgaaatttacaaccaagtgaatggttacatagcagattagatatagctgaagaaagaattagggaacagaaggataactctgaaaaaattatcaagagtgtagtagcagaagaaaatagaaacagagtggctaaacccacagaggaatgtgacatggcctgttatacatcgatgtattgtagtgcaaatcagtgttaataccatcattattcttaaggttggaaacagtccatctgttcattttgttactttattttttcagtctttcccataaaggtaatgaattttggggcactacacaaacactgaatgttaaatttctgccttcagatcctaatcactttattattggcacagacatgggtctcataagccatggcacaagacaagatttgagagtggctcccaaactattcaaacctcagcaacatggtataagaccagtgaaagttaatgtcattgatttttcaccatttggagaaccaatatttttggccggctgttcggacggaagcatcaggctgcaccagctgagctccgcgtttccgctcctgcagtgggacagcagcacggacagccatgcggtcaccggcctgcagtggtccccaaccaggcctgccgtgttcctggtgcaggacgacacatccaacatctacatctgggacctcctccagagcgatctgggtcctgtcgccaaacagcaggtctcccccaacaggctggtggccatggctgcggtgggtgagcctgagaaggctggtggcagcttcctggccctggtgctggccagggcgtctggctccatcgacatccagcacctgaagaggcggtgggcggccccggaggtggacgagtgcaacaggctgcgtctgcttttgcaggaagccctgtggccagagggaaaactgcacaagtagcgggtgtggctgagaggaccgcgtttctgtaatgacccagatttaaaagacataaggtggataattctacatttgtgtgcaagtatatttatgtatatagactatgtatattctgtatataatttattttacatgaatatttctttggtattcccagtaaatacatgactacttttgagtggaaacaaagaacattctagcatttacaaaacttccaggggaatgtagagccacgtccagggtgctcttttctgagagtatttcgagttatttttagaacagtttaaatattgtcacattactgctagattttaaacagcctaccatgaaaatgtatcttaatgaactattttcttatgcataaagtatgtgaacacacgtctaaattaaaaggaattactccaccgaaa

SEQ ID NO: 425567 - DNA, 1369 bp, Homo sapiens
gtgttgcccaacagtattctagagcttcacaagtgttatctctgaaatttacaaccaagtgaatggttacatagcagattagatatagctgaagaaagaattagggaacagaaggataactctgaaaaaattatcaagagtgtagtagcagaagaaaatagaaacagagtggctaaacccacagaggaatgtgacatggcctgttatacatcgatgtattgtagtgcaaatcagtgttaataccatcattattcttaaggttggaaacagtccatctgttcattttgttactttattttttcagtctttcccataaaggtaatgaattttggggcactacacaaacactgaatgttaaatttctgccttcagatcctaatcactttattattggcacagacatgggtctcataagccatggcacaagacaagatttgagagtggctcccaaactattcaaacctcagcaacatggtataagaccagtgaaagttaatgtcattgatttttcaccatttggagaaccaatatttttggccggctgttcggacggaagcatcaggctgcaccagctgagctccgcgtttccgctcctgcagtgggacagcagcacggacagccatgcggtcaccggcctgcagtggtccccaaccaggcctgccgtgttcctggtgcaggacgacacatccaacatctacatctgggacctcctccagagcgatctgggtcctgtcgccaaacagcaggtctcccccaacaggctggtggccatggctgcggtgggtgagcctgagaaggctggtggcagcttcctggccctggtgctggccagggcgtctggctccatcgacatccagcacctgaagaggcggtgggcggccccggaggtggacgagtgcaacaggctgcgtctgcttttgcaggaagccctgtggccagagggaaaactgcacaagtagcgggtgtggctgagaggaccgcgtttctgtaatgacccagatttaaaagacataaggtggataattctacatttgtgtgcaagtatatttatgtatatagactatgtatattctgtatataatttattttacatgaatatttctttggtattcccagtaaatacatgactacttttgagtggaaacaaagaacattctagcatttacaaaacttccaggggaatgtagagccacgtccagggtgctcttttctgagagtatttcgagttatttttagaacagtttaaatattgtcacattactgctagattttaaacagcctaccatgaaaatgtatcttaatgaactattttcttatgcataaagtatgtgaacacacgtctaaattaaaaggaattactccaccgaaa

SEQ ID NO: 425568 - DNA, 588 bp, Homo sapiens
ttaatcttctatgaatgcttttcagagattaagcctttgcctgatctcagcagcaaattctaatattttggatgcaagttatttcacagaagggactctgataggaagacagaatgtgaaattaaacatctatgtcttaggtctggcagaaatagatactgttaacatcagtgtgttgggtataaaataatctctcttctggtttcaggaaagcatagagaaaaaaactaagattcttttctaatttttattgacccagctgaaatagtataatggtcttgcctttttaaggcacttaaacatttgtttagttgaattgtttgaaaggacagaggagaataggacattccatatttgaacagtataagtagaagaacatgaattgatggaggtggtagtatccttccacatttttttttctatcaggaattagactcctacagactttgtatcttaagaaagaaatgcagaatgttggtaaaatactaacagttttcaaatgatacctaatctaaatgttaattgaaatagaattcacaacaaatctgctcatgtaatcctgaatctaaaataaaagtttttaaaaaa

SEQ ID NO: 425569 - DNA, 3526 bp, Homo sapiens
  misc_feature (45)..(46): n is a, c, g, or t
aaggctaggtgagaggcctgcggtgaaatcggcgaggaggccgcnnctccgcggatcgggccgctcggccctcccatggaaggtgctcgggtcttcggggcactgggtcccatcggtccctcctcacctgggctcaccctcgggggtctggccgtgagcgagcaccggctcagcaacaagctgctggcttggagcggcgtcctcgagtggcaggaggtgagtctctgtggggctgcggctggcctccagggtcttgtcttgtccctgcggggacaggccagggcatctaggctgtgcacagtgacgcccctcctgcccccacagaagcgcagaccctactctgactccactgcaaagctgaagcggaccctgccctgccaagcctacgtgaaccaaggcgagaacctgtgagtgccggggcgtggcagccagggcggtggcaggggcagtggctgtggccgtggggatcagggcagccctttctgaccagctccttcccatagggagaccgaccagtggccgcagaagctgatcatgcagctgatccctcagcagctgctggtgagacccgcccctcccaccccatccactctgagcacccccatgcctggctgacccagctgtctgtcctgtcgcccccagaccaccctgggccccctgttccggaactcccagttggcacagttccacttcaccaacagagactgcgactcgctcaaggggctctgccgcatcatgggcaacggcttcgtgagtggggcgggctcccttgtagcactgtggtgacaagtacagctggaggcagcgctctgctcacacagtccaggcgggggtcggggggtctcccctggggccgagggtagccctcgtggcctctcggaccccatctggaaatgactgactccaggcaccctccgtagagcacagggtgaaggaactcagcctgagaggcctccagtttctgcatctgtgcccagcttcgaggtggccctgggggcgtgagtgcagggagggactggggccagccctgttggggcccaggagcctgtcggggacacatagcgtatggcagggacctggtaaatgggtgtgctaggcacaagagccagccaggagggagtggcacgttggggcttggtattctggtctgtaaaatgggctaacctccccgagtggcctgagctggccgtgagggagcagagctgagggtgctgaagcaggcgcggtgagtaggtcctcaggcctggctccaaggggacccaggtatccagccagtggctgtgcagggactgagtggggcaggcgcggccatgacctggacccggggggctgccaagggatctgagagcggcttccgcagcactccagggttgggctggttgaggggtagagatgacattttctgaggtagggaggacaggggagccgtgcttcctagggccaccgggaggctggagggagggaatttgtgtaaagcgcttgagatggtgactttagtacctagtgagtgctgggtgaacccagctggtgaggctgttcaggtgactgagattctggcgcagggcaggtcagaaagggggcttgggctgtgaaagatggcaggtgctggagaggaggcaggggtggggtgggagcgagttgtctgcccagaggacctggctctgggacattcccagtccctgttccctgttgggacagtctgcctctacccgtcccagctgccgttgagcgccctgggttccgctagggcctcccttctccctcaggagaccaggggcagaccagggcttgtgcctggcatgaggtctcttaagtgacccgttcccccttcacccagcaccgtttgttgagggcctgccatatctgggccccgagtacccagtctgtagggaaagtggacatccatactcaccccccaggcatggccctgggaggctgactgtgcatggctccagggaggccagggacagggccctgagcgggtgatccctgggctggacaccaaggttgagaagttaggccggcagcgtggaggggacagcactgtgggggtggcccggtgtggggaggggacatggggttttgggacggtcacaccacttcatctagacaccacagccaggcacatctgtcaggcttagttctcccatgcgccatcctcaagaggcaccagcactttatctgttgagcctttatgtggcaccaactgtgtgcactattacccggttttacagatgatggaggcccagaagcaggaggtggctggtgttaggtcacacagctaggaggcagcagaacggtggggcgctgcctgtgctcttaacccccaggccaagtcaccccatcaggcagtcaggagggctggcggcagggggtgatgtgggtgggaggtagtgccttcttggcattctcaccgcagcctgggtgccgggtgccactctgacctcagccatggcagggtcgggggatgccgatgggcgctgcacgggctctcagaggcccctcacctatggccatggccttgactgtgggggcctctgtccaccgatgatctcccttcatcccctacaggtggggcggtccagggtggtgggggcacagtggccccgggcagtgaccacagggtcctgacccgcggcccccgcaggcgggctgcatgctgttcccccacatctccccctgtgaggtgcgcgtgctcatgctcctgtactcgtccaagaagaagatcttcatgggcctcatcccctacgaccagagcggcttcgtcagtgccatccggcaggtcatcaccacccgcaagcaggcagtgggacctggtggtgtcaactcaggcccagtccagatcgtcaacaacaagtttctggcatggagtggtgtcatggagtggcaggagcccaggcctgagcccaacagtcggtccaagaggtggctgccatcccacgtctacgtgaaccagggggagatcctgaggaccgagcagtggccaaggaagctgtacatgcagctcatcccgcagcagctgctgaccaccctagtgccgctgttccggaactcgcgcctggtccagttccacttcaccaaggacctggagacactgaagagcctgtgccggatcatggacaatggcttcgccggctgcgtgcacttttcctacaaagcatcgtgtgagatccgcgtgcttatgctcctgtactcttcagagaagaaaatcttcattggcctcatcccccatgaccagggcaactttgtcaacggcatccggcgtgtcattgccaaccagcagcaggtcctgcagcggaacctggagcaggagcaacagcaacgagggatgggggggtagtggttaccccgggctgggcccctccaggagtcacagatgaggcccccgcagagactggtgacacgcttctgagcaggggcccctggggacttcaactgcccagcaacatggaggatggtgtcctgaggcctccaaggacggtccccacccctctacgtttccccaataaagccttttaaaaacctg

SEQ ID NO: 425570 - DNA, 1629 bp, Homo sapiens
  misc_feature (45)..(46): n is a, c, g, or t
aaggctaggtgagaggcctgcggtgaaatcggcgaggaggccgcnnctccgcggatcgggccgctcggccctcccatggaaggtgctcgggtcttcggggcactgggtcccatcggtccctcctcacctgggctcaccctcgggggtctggccgtgagcgagcaccggctcagcaacaagctgctggcttggagcggcgtcctcgagtggcaggaggtgagtctctgtggggctgcggctggcctccagggtcttgtcttgtccctgcggggacaggccagggcatctaggctgtgcacagtgacgcccctcctgcccccacagaagcgcagaccctactctgactccactgcaaagctgaagcggaccctgccctgccaagcctacgtgaaccaaggcgagaacctgtgagtgccggggcgtggcagccagggcggtggcaggggcagtggctgtggccgtggggatcagggcagccctttctgaccagctccttcccatagggagaccgaccagtggccgcagaagctgatcatgcagctgatccctcagcagctgctggtgagacccgcccctcccaccccatccactctgagcacccccatgcctggctgacccagctgtctgtcctgtcgcccccagaccaccctgggccccctgttccggaactcccagttggcacagttccacttcaccaacagagactgcgactcgctcaaggggctctgccgcatcatgggcaacggcttcgcgggctgcatgctgttcccccacatctccccctgtgaggtgcgcgtgctcatgctcctgtactcgtccaagaagaagatcttcatgggcctcatcccctacgaccagagcggcttcgtcagtgccatccggcaggtcatcaccacccgcaagcaggcagtgggacctggtggtgtcaactcaggcccagtccagatcgtcaacaacaagtttctggcatggagtggtgtcatggagtggcaggagcccaggcctgagcccaacagtcggtccaagaggtggctgccatcccacgtctacgtgaaccagggggagatcctgaggaccgagcagtggccaaggaagctgtacatgcagctcatcccgcagcagctgctgaccaccctagtgccgctgttccggaactcgcgcctggtccagttccacttcaccaaggacctggagacactgaagagcctgtgccggatcatggacaatggcttcgccggctgcgtgcacttttcctacaaagcatcgtgtgagatccgcgtgcttatgctcctgtactcttcagagaagaaaatcttcattggcctcatcccccatgaccagggcaactttgtcaacggcatccggcgtgtcattgccaaccagcagcaggtcctgcagcggaacctggagcaggagcaacagcaacgagggatgggggggtagtggttaccccgggctgggcccctccaggagtcacagatgaggcccccgcagagactggtgacacgcttctgagcaggggcccctggggacttcaactgcccagcaacatggaggatggtgtcctgaggcctccaaggacggtccccacccctctacgtttccccaataaagccttttaaaaacctg

SEQ ID NO: 425571 - DNA, 4088 bp, Homo sapiens
  misc_feature (45)..(46): n is a, c, g, or t
aaggctaggtgagaggcctgcggtgaaatcggcgaggaggccgcnnctccgcggatcgggccgctcggccctcccatggaaggtgctcgggtcttcggggcactgggtcccatcggtccctcctcacctgggctcaccctcgggggtctggccgtgagcgagcaccggctcagcaacaagctgctggcttggagcggcgtcctcgagtggcaggaggtgagtctctgtggggctgcggctggcctccagggtcttgtcttgtccctgcggggacaggccagggcatctaggctgtgcacagtgacgcccctcctgcccccacagaagcgcagaccctactctgactccactgcaaagctgaagcggaccctgccctgccaagcctacgtgaaccaaggcgagaacctgtgagtgccggggcgtggcagccagggcggtggcaggggcagtggctgtggccgtggggatcagggcagccctttctgaccagctccttcccatagggagaccgaccagtggccgcagaagctgatcatgcagctgatccctcagcagctgctggtgagacccgcccctcccaccccatccactctgagcacccccatgcctggctgacccagctgtctgtcctgtcgcccccagaccaccctgggccccctgttccggaactcccagttggcacagttccacttcaccaacagagactgcgactcgctcaaggggctctgccgcatcatgggcaacggcttcgtgagtggggcgggctcccttgtagcactgtggtgacaagtacagctggaggcagcgctctgctcacacagtccaggcgggggtcggggggtctcccctggggccgagggtagccctcgtggcctctcggaccccatctggaaatgactgactccaggcaccctccgtagagcacagggtgaaggaactcagcctgagaggcctccagtttctgcatctgtgcccagcttcgaggtggccctgggggcgtgagtgcagggagggactggggccagccctgttggggcccaggagcctgtcggggacacatagcgtatggcagggacctggtaaatgggtgtgctaggcacaagagccagccaggagggagtggcacgttggggcttggtattctggtctgtaaaatgggctaacctccccgagtggcctgagctggccgtgagggagcagagctgagggtgctgaagcaggcgcggtgagtaggtcctcaggcctggctccaaggggacccaggtatccagccagtggctgtgcagggactgagtggggcaggcgcggccatgacctggacccggggggctgccaagggatctgagagcggcttccgcagcactccagggttgggctggttgaggggtagagatgacattttctgaggtagggaggacaggggagccgtgcttcctagggccaccgggaggctggagggagggaatttgtgtaaagcgcttgagatggtgactttagtacctagtgagtgctgggtgaacccagctggtgaggctgttcaggtgactgagattctggcgcagggcaggtcagaaagggggcttgggctgtgaaagatggcaggtgctggagaggaggcaggggtggggtgggagcgagttgtctgcccagaggacctggctctgggacattcccagtccctgttccctgttgggacagtctgcctctacccgtcccagctgccgttgagcgccctgggttccgctagggcctcccttctccctcaggagaccaggggcagaccagggcttgtgcctggcatgaggtctcttaagtgacccgttcccccttcacccagcaccgtttgttgagggcctgccatatctgggccccgagtacccagtctgtagggaaagtggacatccatactcaccccccaggcatggccctgggaggctgactgtgcatggctccagggaggccagggacagggccctgagcgggtgatccctgggctggacaccaaggttgagaagttaggccggcagcgtggaggggacagcactgtgggggtggcccggtgtggggaggggacatggggttttgggacggtcacaccacttcatctagacaccacagccaggcacatctgtcaggcttagttctcccatgcgccatcctcaagaggcaccagcactttatctgttgagcctttatgtggcaccaactgtgtgcactattacccggttttacagatgatggaggcccagaagcaggaggtggctggtgttaggtcacacagctaggaggcagcagaacggtggggcgctgcctgtgctcttaacccccaggccaagtcaccccatcaggcagtcaggagggctggcggcagggggtgatgtgggtgggaggtagtgccttcttggcattctcaccgcagcctgggtgccgggtgccactctgacctcagccatggcagggtcgggggatgccgatgggcgctgcacgggctctcagaggcccctcacctatggccatggccttgactgtgggggcctctgtccaccgatgatctcccttcatcccctacaggtggggcggtccagggtggtgggggcacagtggccccgggcagtgaccacagggtcctgacccgcggcccccgcaggcgggctgcatgctgttcccccacatctccccctgtgaggtgcgcgtgctcatgctcctgtactcgtccaagaagaagatcttcatgggcctcatcccctacgaccagagcggcttcgtcagtgccatccggcaggtcatcaccacccgcaagcaggtgtgccagccaagcacagcccctctggggacagagggggattagaccccactgccctggttgggcagccagacttggtgtgggcggagtgtgatgcgatggctggagcaaggagctgcaggggagcccggaggatgccgggcgggttcccaccagggctccatggaaaagcggccactgggcggctctgcagggctggagggtgggtcttggcgcggcggcagggaagccagcggagcggggagctgggcaggggttgggatcgtcctgcggctggaaggccctgcctggtaaccacgtgtcctggtcatgccttgccagttgaggcagactctgcaggtcctgtgcaccaggtgagggccgggacctgtctcaggccactggggagccatggggggctgtgagcagatgaggggcagggcctgttcccctgggactagagaatggacccagctggggctaacaggccaaggctcggagggagggatggcaggccccaggacagacagacaggtttcccaggagcctgggcccctcttcccaccccgttcccttccaacaggcagtgggacctggtggtgtcaactcaggcccagtccagatcgtcaacaacaagtttctggcatggagtggtgtcatggagtggcaggagcccaggcctgagcccaacagtcggtccaagaggtggctgccatcccacgtctacgtgaaccagggggagatcctgaggaccgagcagtggccaaggaagctgtacatgcagctcatcccgcagcagctgctgaccaccctagtgccgctgttccggaactcgcgcctggtccagttccacttcaccaaggacctggagacactgaagagcctgtgccggatcatggacaatggcttcgccggctgcgtgcacttttcctacaaagcatcgtgtgagatccgcgtgcttatgctcctgtactcttcagagaagaaaatcttcattggcctcatcccccatgaccagggcaactttgtcaacggcatccggcgtgtcattgccaaccagcagcaggtcctgcagcggaacctggagcaggagcaacagcaacgagggatgggggggtagtggttaccccgggctgggcccctccaggagtcacagatgaggcccccgcagagactggtgacacgcttctgagcaggggcccctggggacttcaactgcccagcaacatggaggatggtgtcctgaggcctccaaggacggtccccacccctctacgtttccccaataaagccttttaaaaacctg

SEQ ID NO: 425572 - DNA, 1863 bp, Homo sapiens
  misc_feature (45)..(46): n is a, c, g, or t
aaggctaggtgagaggcctgcggtgaaatcggcgaggaggccgcnnctccgcggatcgggccgctcggccctcccatggaaggtgctcgggtcttcggggcactgggtcccatcggtccctcctcacctgggctcaccctcgggggtctggccgtgagcgagcaccggctcagcaacaagctgctggcttggagcggcgtcctcgagtggcaggaggtgagtctctgtggggctgcggctggcctccagggtcttgtcttgtccctgcggggacaggccagggcatctaggctgtgcacagtgacgcccctcctgcccccacagaagcgcagaccctactctgactccactgcaaagctgaagcggaccctgccctgccaagcctacgtgaaccaaggcgagaacctgtgagtgccggggcgtggcagccagggcggtggcaggggcagtggctgtggccgtggggatcagggcagccctttctgaccagctccttcccatagggagaccgaccagtggccgcagaagctgatcatgcagctgatccctcagcagctgctggtgagacccgcccctcccaccccatccactctgagcacccccatgcctggctgacccagctgtctgtcctgtcgcccccagaccaccctgggccccctgttccggaactcccagttggcacagttccacttcaccaacagagactgcgactcgctcaaggggctctgccgcatcatgggcaacggcttcgtgagtggggcgggctcccttgtagcactgtggtgacaagtacagctggaggcagcgctctgctcacacagtccaggcgggggtcggggggtctcccctggggccgagggtagccctcgtggcctctcggaccccatctggaaatgactgactccaggcaccctccgtagagcacagggtgaaggaactcagcctgagaggcctccagtttctgcatctgtgcccagcttcgaggcgggctgcatgctgttcccccacatctccccctgtgaggtgcgcgtgctcatgctcctgtactcgtccaagaagaagatcttcatgggcctcatcccctacgaccagagcggcttcgtcagtgccatccggcaggtcatcaccacccgcaagcaggcagtgggacctggtggtgtcaactcaggcccagtccagatcgtcaacaacaagtttctggcatggagtggtgtcatggagtggcaggagcccaggcctgagcccaacagtcggtccaagaggtggctgccatcccacgtctacgtgaaccagggggagatcctgaggaccgagcagtggccaaggaagctgtacatgcagctcatcccgcagcagctgctgaccaccctagtgccgctgttccggaactcgcgcctggtccagttccacttcaccaaggacctggagacactgaagagcctgtgccggatcatggacaatggcttcgccggctgcgtgcacttttcctacaaagcatcgtgtgagatccgcgtgcttatgctcctgtactcttcagagaagaaaatcttcattggcctcatcccccatgaccagggcaactttgtcaacggcatccggcgtgtcattgccaaccagcagcaggtcctgcagcggaacctggagcaggagcaacagcaacgagggatgggggggtagtggttaccccgggctgggcccctccaggagtcacagatgaggcccccgcagagactggtgacacgcttctgagcaggggcccctggggacttcaactgcccagcaacatggaggatggtgtcctgaggcctccaaggacggtccccacccctctacgtttccccaataaagccttttaaaaacctg

SEQ ID NO: 425573 - DNA, 956 bp, Homo sapiens
  misc_feature (13)..(13): n is a, c, g, or t
gattacgaatatncgagctcaggtacccccatgtcagtcgctcattggggctctgccgcatcatgggcaacggcttcgcgggctgcatgctgttcccccacatctccccctgtgaggtgcgcgtgctcatgctcctgtactcgtccaagaagaagatcttcatgggcctcatcccctacgaccagagcggcttcgtcagtgccatccggcaggtcatcaccacccgcaagcaggcagtgggacctggtggtgtcaactcaggcccagtccagatcgtcaacaacaagtttctggcatggagtggtgtcatggagtggcaggagcccaggcctgagcccaacagtcggtccaagaggtggctgccatcccacgtctacgtgaaccagggggagatcctgaggaccgagcagtggccaaggaagctgtacatgcagctcatcccgcagcagctgctgaccaccctagtgccgctgttccggaactcgcgcctggtccagttccacttcaccaaggacctggagacactgaagagcctgtgccggatcatggacaatggcttcgccggctgcgtgcacttttcctacaaagcatcgtgtgagatccgcgtgcttatgctcctgtactcttcagagaagaaaatcttcattggcctcatcccccatgaccagggcaactttgtcaacggcatccggcgtgtcattgccaaccagcagcaggtcctgcagcggaacctggagcaggagcaacagcaacgagggatgggggggtagtggttaccccgggctgggcccctccaggagtcacagatgaggcccccgcagagactggtgacacgcttctgagcaggggcccctggggacttcaactgcccagcaacatggaggatggtgtcctgaggcctccaaggacggtccccacccctctacgtttccccaataaagccttttaaaaacctg

SEQ ID NO: 425574 - DNA, 3505 bp, Homo sapiens
  misc_feature (45)..(46): n is a, c, g, or t
aaggctaggtgagaggcctgcggtgaaatcggcgaggaggccgcnnctccgcggatcgggccgctcggccctcccatggaaggtgctcgggtcttcggggcactgggtcccatcggtccctcctcacctgggctcaccctcgggggtctggccgtgagcgagcaccggctcagcaacaagctgctggcttggagcggcgtcctcgagtggcaggaggtgagtctctgtggggctgcggctggcctccagggtcttgtcttgtccctgcggggacaggccagggcatctaggctgtgcacagtgacgcccctcctgcccccacagaagcgcagaccctactctgactccactgcaaagctgaagcggaccctgccctgccaagcctacgtgaaccaaggcgagaacctgtgagtgccggggcgtggcagccagggcggtggcaggggcagtggctgtggccgtggggatcagggcagccctttctgaccagctccttcccatagggagaccgaccagtggccgcagaagctgatcatgcagctgatccctcagcagctgctggtgagacccgcccctcccaccccatccactctgagcacccccatgcctggctgacccagctgtctgtcctgtcgcccccagaccaccctgggccccctgttccggaactcccagttggcacagttccacttcaccaacagagactgcgactcgctcaaggggctctgccgcatcatgggcaacggcttcgtgagtggggcgggctcccttgtagcactgtggtgacaagtacagctggaggcagcgctctgctcacacagtccaggcgggggtcggggggtctcccctggggccgagggtagccctcgtggcctctcggaccccatctggaaatgactgactccaggcaccctccgtagagcacagggtgaaggaactcagcctgagaggcctccagtttctgcatctgtgcccagcttcgaggtggccctgggggcgtgagtgcagggagggactggggccagccctgttggggcccaggagcctgtcggggacacatagcgtatggcagggacctggtaaatgggtgtgctaggcacaagagccagccaggagggagtggcacgttggggcttggtattctggtctgtaaaatgggctaacctccccgagtggcctgagctggccgtgagggagcagagctgagggtgctgaagcaggcgcggtgagtaggtcctcaggcctggctccaaggggacccaggtatccagccagtggctgtgcagggactgagtggggcaggcgcggccatgacctggacccggggggctgccaagggatctgagagcggcttccgcagcactccagggttgggctggttgaggggtagagatgacattttctgaggtagggaggacaggggagccgtgcttcctagggccaccgggaggctggagggagggaatttgtgtaaagcgcttgagatggtgactttagtacctagtgagtgctgggtgaacccagctggtgaggctgttcaggtgactgagattctggcgcagggcaggtcagaaagggggcttgggctgtgaaagatggcaggtgctggagaggaggcaggggtggggtgggagcgagttgtctgcccagaggacctggctctgggacattcccagtccctgttccctgttgggacagtctgcctctacccgtcccagctgccgttgagcgccctgggttccgctagggcctcccttctccctcaggagaccaggggcagaccagggcttgtgcctggcatgaggtctcttaagtgacccgttcccccttcacccagcaccgtttgttgagggcctgccatatctgggccccgagtacccagtctgtagggaaagtggacatccatactcaccccccaggcatggccctgggaggctgactgtgcatggctccagggaggccagggacagggccctgagcgggtgatccctgggctggacaccaaggttgagaagttaggccggcagcgtggaggggacagcactgtgggggtggcccggtgtggggaggggacatggggttttgggacggtcacaccacttcatctagacaccacagccaggcacatctgtcaggcttagttctcccatgcgccatcctcaagaggcaccagcactttatctgttgagcctttatgtggcaccaactgtgtgcactattacccggttttacagatgatggaggcccagaagcaggaggtggctggtgttaggtcacacagctaggaggcagcagaacggtggggcgctgcctgtgctcttaacccccaggccaagtcaccccatcaggcagtcaggagggctggcggcagggggtgatgtgggtgggaggtagtgccttcttggcattctcaccgcagcctgggtgccgggtgccactctgacctcagccatggcagggtcgggggatgccgatgggcgctgcacgggctctcagaggcccctcacctatggccatggccttgactgtgggggcctctgtccaccgatgatctcccttcatcccctacaggtggggcggtccagggtggtgggggcacagtggccccgggcagtgaccacagggtcctgacccgcggcccccgcaggcgggctgcatgctgttcccccacatctccccctgtgaggtgcgcgtgctcatgctcctgtactcgtccaagaagaagatcttcatgggcctcatcccctacgaccagagcggcttcgtcagtgccatccggcaggcagtgggacctggtggtgtcaactcaggcccagtccagatcgtcaacaacaagtttctggcatggagtggtgtcatggagtggcaggagcccaggcctgagcccaacagtcggtccaagaggtggctgccatcccacgtctacgtgaaccagggggagatcctgaggaccgagcagtggccaaggaagctgtacatgcagctcatcccgcagcagctgctgaccaccctagtgccgctgttccggaactcgcgcctggtccagttccacttcaccaaggacctggagacactgaagagcctgtgccggatcatggacaatggcttcgccggctgcgtgcacttttcctacaaagcatcgtgtgagatccgcgtgcttatgctcctgtactcttcagagaagaaaatcttcattggcctcatcccccatgaccagggcaactttgtcaacggcatccggcgtgtcattgccaaccagcagcaggtcctgcagcggaacctggagcaggagcaacagcaacgagggatgggggggtagtggttaccccgggctgggcccctccaggagtcacagatgaggcccccgcagagactggtgacacgcttctgagcaggggcccctggggacttcaactgcccagcaacatggaggatggtgtcctgaggcctccaaggacggtccccacccctctacgtttccccaataaagccttttaaaaacctg

SEQ ID NO: 425575 - DNA, 4722 bp, Homo sapiens
  misc_feature (45)..(46): n is a, c, g, or t
aaggctaggtgagaggcctgcggtgaaatcggcgaggaggccgcnnctccgcggatcgggccgctcggccctcccatggaaggtgctcgggtcttcggggcactgggtcccatcggtccctcctcacctgggctcaccctcgggggtctggccgtgagcgagcaccggctcagcaacaagctgctggcttggagcggcgtcctcgagtggcaggaggtgagtctctgtggggctgcggctggcctccagggtcttgtcttgtccctgcggggacaggccagggcatctaggctgtgcacagtgacgcccctcctgcccccacagaagcgcagaccctactctgactccactgcaaagctgaagcggaccctgccctgccaagcctacgtgaaccaaggcgagaacctgtgagtgccggggcgtggcagccagggcggtggcaggggcagtggctgtggccgtggggatcagggcagccctttctgaccagctccttcccatagggagaccgaccagtggccgcagaagctgatcatgcagctgatccctcagcagctgctggtgagacccgcccctcccaccccatccactctgagcacccccatgcctggctgacccagctgtctgtcctgtcgcccccagaccaccctgggccccctgttccggaactcccagttggcacagttccacttcaccaacagagactgcgactcgctcaaggggctctgccgcatcatgggcaacggcttcgtgagtggggcgggctcccttgtagcactgtggtgacaagtacagctggaggcagcgctctgctcacacagtccaggcgggggtcggggggtctcccctggggccgagggtagccctcgtggcctctcggaccccatctggaaatgactgactccaggcaccctccgtagagcacagggtgaaggaactcagcctgagaggcctccagtttctgcatctgtgcccagcttcgaggtggccctgggggcgtgagtgcagggagggactggggccagccctgttggggcccaggagcctgtcggggacacatagcgtatggcagggacctggtaaatgggtgtgctaggcacaagagccagccaggagggagtggcacgttggggcttggtattctggtctgtaaaatgggctaacctccccgagtggcctgagctggccgtgagggagcagagctgagggtgctgaagcaggcgcggtgagtaggtcctcaggcctggctccaaggggacccaggtatccagccagtggctgtgcagggactgagtggggcaggcgcggccatgacctggacccggggggctgccaagggatctgagagcggcttccgcagcactccagggttgggctggttgaggggtagagatgacattttctgaggtagggaggacaggggagccgtgcttcctagggccaccgggaggctggagggagggaatttgtgtaaagcgcttgagatggtgactttagtacctagtgagtgctgggtgaacccagctggtgaggctgttcaggtgactgagattctggcgcagggcaggtcagaaagggggcttgggctgtgaaagatggcaggtgctggagaggaggcaggggtggggtgggagcgagttgtctgcccagaggacctggctctgggacattcccagtccctgttccctgttgggacagtctgcctctacccgtcccagctgccgttgagcgccctgggttccgctagggcctcccttctccctcaggagaccaggggcagaccagggcttgtgcctggcatgaggtctcttaagtgacccgttcccccttcacccagcaccgtttgttgagggcctgccatatctgggccccgagtacccagtctgtagggaaagtggacatccatactcaccccccaggcatggccctgggaggctgactgtgcatggctccagggaggccagggacagggccctgagcgggtgatccctgggctggacaccaaggttgagaagttaggccggcagcgtggaggggacagcactgtgggggtggcccggtgtggggaggggacatggggttttgggacggtcacaccacttcatctagacaccacagccaggcacatctgtcaggcttagttctcccatgcgccatcctcaagaggcaccagcactttatctgttgagcctttatgtggcaccaactgtgtgcactattacccggttttacagatgatggaggcccagaagcaggaggtggctggtgttaggtcacacagctaggaggcagcagaacggtggggcgctgcctgtgctcttaacccccaggccaagtcaccccatcaggcagtcaggagggctggcggcagggggtgatgtgggtgggaggtagtgccttcttggcattctcaccgcagcctgggtgccgggtgccactctgacctcagccatggcagggtcgggggatgccgatgggcgctgcacgggctctcagaggcccctcacctatggccatggccttgactgtgggggcctctgtccaccgatgatctcccttcatcccctacaggtggggcggtccagggtggtgggggcacagtggccccgggcagtgaccacagggtcctgacccgcggcccccgcaggcgggctgcatgctgttcccccacatctccccctgtgaggtgcgcgtgctcatgctcctgtactcgtccaagaagaagatcttcatgggcctcatcccctacgaccagagcggcttcgtcagtgccatccggcaggtcatcaccacccgcaagcaggtgtgccagccaagcacagcccctctggggacagagggggattagaccccactgccctggttgggcagccagacttggtgtgggcggagtgtgatgcgatggctggagcaaggagctgcaggggagcccggaggatgccgggcgggttcccaccagggctccatggaaaagcggccactgggcggctctgcagggctggagggtgggtcttggcgcggcggcagggaagccagcggagcggggagctgggcaggggttgggatcgtcctgcggctggaaggccctgcctggtaaccacgtgtcctggtcatgccttgccagttgaggcagactctgcaggtcctgtgcaccaggtgagggccgggacctgtctcaggccactggggagccatggggggctgtgagcagatgaggggcagggcctgttcccctgggactagagaatggacccagctggggctaacaggccaaggctcggagggagggatggcaggccccaggacagacagacaggtttcccaggagcctgggcccctcttcccaccccgttcccttccaacaggcagtgggacctggtggtgtcaactcaggcccagtccagatcgtcaacaacaagtttctggcatggagtggtgtcatggagtggcaggaggtgagcactcggcagcccagggacttgggacccccagatcctcacggactgtggctgggaggggacactggcattgggggtctccagccctgagggctcctctttgcctctcccccaaaagcccaggcctgagcccaacagtcggtccaagaggtggctgccatcccacgtctacgtgaaccagggggagatcctgtgagtgctgggctggggggtggaggcagcatccaggggagctggggcttcctgaccctcgtccctttgtgccccacaggaggaccgagcagtggccaaggaagctgtacatgcagctcatcccgcagcagctgctggtgaggggctggggccgggtgctggagcctgcacgcagtagctcttccagagggcggggctgggggcaagagcgcctccccaggtggcctgagctggctgtgagggagcggagctgagggtgctgaagcaggtgtggtgggtagctcctcaggcttggcttcaaggggtcccaggcagccagctggtggctgtgcagggactgagcggggcaggggcagccacgacctgcacctggggggctgccaagggatctgagagcggcttccacagcactccagggttgggctggttgagcggtggagatgacgtttcctgaggtagggaggacaggggagtctcagtttggtcctgggcccgggggactcagcgggctgggagccgggaggccgtggtgggagaagccagagctgggggtcccctcgcttccccgcagaccaccctagtgccgctgttccggaactcgcgcctggtccagttccacttcaccaaggacctggagacactgaagagcctgtgccggatcatggacaatggcttcgccggctgcgtgcacttttcctacaaagcatcgtgtgagatccgcgtgcttatgctcctgtactcttcagagaagaaaatcttcattggcctcatcccccatgaccagggcaactttgtcaacggcatccggcgtgtcattgccaaccagcagcaggtcctgcagcggaacctggagcaggagcaacagcaacgagggatgggggggtagtggttaccccgggctgggcccctccaggagtcacagatgaggcccccgcagagactggtgacacgcttctgagcaggggcccctggggacttcaactgcccagcaacatggaggatggtgtcctgaggcctccaaggacggtccccacccctctacgtttccccaataaagccttttaaaaacctg

SEQ ID NO: 425576 - DNA, 2231 bp, Homo sapiens
  misc_feature (45)..(46): n is a, c, g, or t
aaggctaggtgagaggcctgcggtgaaatcggcgaggaggccgcnnctccgcggatcgggccgctcggccctcccatggaaggtgctcgggtcttcggggcactgggtcccatcggtccctcctcacctgggctcaccctcgggggtctggccgtgagcgagcaccggctcagcaacaagctgctggcttggagcggcgtcctcgagtggcaggaggtgagtctctgtggggctgcggctggcctccagggtcttgtcttgtccctgcggggacaggccagggcatctaggctgtgcacagtgacgcccctcctgcccccacagaagcgcagaccctactctgactccactgcaaagctgaagcggaccctgccctgccaagcctacgtgaaccaaggcgagaacctgtgagtgccggggcgtggcagccagggcggtggcaggggcagtggctgtggccgtggggatcagggcagccctttctgaccagctccttcccatagggagaccgaccagtggccgcagaagctgatcatgcagctgatccctcagcagctgctgaccaccctgggccccctgttccggaactcccagttggcacagttccacttcaccaacagagactgcgactcgctcaaggggctctgccgcatcatgggcaacggcttcgcgggctgcatgctgttcccccacatctccccctgtgaggtgcgcgtgctcatgctcctgtactcgtccaagaagaagatcttcatgggcctcatcccctacgaccagagcggcttcgtcagtgccatccggcaggtcatcaccacccgcaagcaggtgtgccagccaagcacagcccctctggggacagagggggattagaccccactgccctggttgggcagccagacttggtgtgggcggagtgtgatgcgatggctggagcaaggagctgcaggggagcccggaggatgccgggcgggttcccaccagggctccatggaaaagcggccactgggcggctctgcagggctggagggtgggtcttggcgcggcggcagggaagccagcggagcggggagctgggcaggggttgggatcgtcctgcggctggaaggccctgcctggtaaccacgtgtcctggtcatgccttgccagttgaggcagactctgcaggtcctgtgcaccaggtgagggccgggacctgtctcaggccactggggagccatggggggctgtgagcagatgaggggcagggcctgttcccctgggactagagaatggacccagctggggctaacaggccaaggctcggagggagggatggcaggccccaggacagacagacaggtttcccaggagcctgggcccctcttcccaccccgttcccttccaacaggcagtgggacctggtggtgtcaactcaggcccagtccagatcgtcaacaacaagtttctggcatggagtggtgtcatggagtggcaggaggtgagcactcggcagcccagggacttgggacccccagatcctcacggactgtggctgggaggggacactggcattgggggtctccagccctgagggctcctctttgcctctcccccaaaagcccaggcctgagcccaacagtcggtccaagaggtggctgccatcccacgtctacgtgaaccagggggagatcctgaggaccgagcagtggccaaggaagctgtacatgcagctcatcccgcagcagctgctgaccaccctagtgccgctgttccggaactcgcgcctggtccagttccacttcaccaaggacctggagacactgaagagcctgtgccggatcatggacaatggcttcgccggctgcgtgcacttttcctacaaagcatcgtgtgagatccgcgtgcttatgctcctgtactcttcagagaagaaaatcttcattggcctcatcccccatgaccagggcaactttgtcaacggcatccggcgtgtcattgccaaccagcagcaggtcctgcagcggaacctggagcaggagcaacagcaacgagggatgggggggtagtggttaccccgggctgggcccctccaggagtcacagatgaggcccccgcagagactggtgacacgcttctgagcaggggcccctggggacttcaactgcccagcaacatggaggatggtgtcctgaggcctccaaggacggtccccacccctctacgtttccccaataaagccttttaaaaacctg

SEQ ID NO: 425577 - DNA, 2024 bp, Homo sapiens
  misc_feature (45)..(46): n is a, c, g, or t
aaggctaggtgagaggcctgcggtgaaatcggcgaggaggccgcnnctccgcggatcgggccgctcggccctcccatggaaggtgctcgggtcttcggggcactgggtcccatcggtccctcctcacctgggctcaccctcgggggtctggccgtgagcgagcaccggctcagcaacaagctgctggcttggagcggcgtcctcgagtggcaggaggtgagtctctgtggggctgcggctggcctccagggtcttgtcttgtccctgcggggacaggccagggcatctaggctgtgcacagtgacgcccctcctgcccccacagaagcgcagaccctactctgactccactgcaaagctgaagcggaccctgccctgccaagcctacgtgaaccaaggcgagaacctgtgagtgccggggcgtggcagccagggcggtggcaggggcagtggctgtggccgtggggatcagggcagccctttctgaccagctccttcccatagggagaccgaccagtggccgcagaagctgatcatgcagctgatccctcagcagctgctggtgagacccgcccctcccaccccatccactctgagcacccccatgcctggctgacccagctgtctgtcctgtcgcccccagaccaccctgggccccctgttccggaactcccagttggcacagttccacttcaccaacagagactgcgactcgctcaaggggctctgccgcatcatgggcaacggcttcgtgagtggggcgggctcccttgtagcactgtggtgacaagtacagctggaggcagcgctctgctcacacagtccaggcgggggtcggggggtctcccctggggccgagggtagccctcgtggcctctcggaccccatctggaaatgactgactccaggcaccctccgtagagcacagggtgaaggaactcagcctgagaggcctccagtttctgcatctgtgcccagcttcgaggtggccctgggggcgtgagtgcagggagggactggggccagccctgttggggcccaggagcctgtcggggacacatagcgtatggcagggacctggtaaatgggtgtgctaggcacaagagccagccaggagggagtggcacgttggggcttggtattctggtctgtaaaatgggctaacctccccgagtggcctgagctggccgtgagggagcagagctgagggtgctgaagcaggcgcggtgagtagctcctcaggcttggcttcaaggggtcccaggcagccagctggtggctgtgcagggactgagcggggcaggggcagccacgacctgcacctggggggctgccaagggatctgagagcggcttccacagcactccagggttgggctggttgagcggtggagatgacgtttcctgaggtagggaggacaggggagtctcagtttggtcctgggcccgggggactcagcgggctgggagccgggaggccgtggtgggagaagccagagctgggggtcccctcgcttccccgcagaccaccctagtgccgctgttccggaactcgcgcctggtccagttccacttcaccaaggacctggagacactgaagagcctgtgccggatcatggacaatggcttcgccggctgcgtgcacttttcctacaaagcatcgtgtgagatccgcgtgcttatgctcctgtactcttcagagaagaaaatcttcattggcctcatcccccatgaccagggcaactttgtcaacggcatccggcgtgtcattgccaaccagcagcaggtcctgcagcggaacctggagcaggagcaacagcaacgagggatgggggggtagtggttaccccgggctgggcccctccaggagtcacagatgaggcccccgcagagactggtgacacgcttctgagcaggggcccctggggacttcaactgcccagcaacatggaggatggtgtcctgaggcctccaaggacggtccccacccctctacgtttccccaataaagccttttaaaaacctg

SEQ ID NO: 425578 - DNA, 3561 bp, Homo sapiens
  misc_feature (45)..(46): n is a, c, g, or t
aaggctaggtgagaggcctgcggtgaaatcggcgaggaggccgcnnctccgcggatcgggccgctcggccctcccatggaaggtgctcgggtcttcggggcactgggtcccatcggtccctcctcacctgggctcaccctcgggggtctggccgtgagcgagcaccggctcagcaacaagctgctggcttggagcggcgtcctcgagtggcaggaggtgagtctctgtggggctgcggctggcctccagggtcttgtcttgtccctgcggggacaggccagggcatctaggctgtgcacagtgacgcccctcctgcccccacagaagcgcagaccctactctgactccactgcaaagctgaagcggaccctgccctgccaagcctacgtgaaccaaggcgagaacctgtgagtgccggggcgtggcagccagggcggtggcaggggcagtggctgtggccgtggggatcagggcagccctttctgaccagctccttcccatagggagaccgaccagtggccgcagaagctgatcatgcagctgatccctcagcagctgctggtgagacccgcccctcccaccccatccactctgagcacccccatgcctggctgacccagctgtctgtcctgtcgcccccagaccaccctgggccccctgttccggaactcccagttggcacagttccacttcaccaacagagactgcgactcgctcaaggggctctgccgcatcatgggcaacggcttcgtgagtggggcgggctcccttgtagcactgtggtgacaagtacagctggaggcagcgctctgctcacacagtccaggcgggggtcggggggtctcccctggggccgagggtagccctcgtggcctctcggaccccatctggaaatgactgactccaggcaccctccgtagagcacagggtgaaggaactcagcctgagaggcctccagtttctgcatctgtgcccagcttcgaggtggccctgggggcgtgagtgcagggagggactggggccagccctgttggggcccaggagcctgtcggggacacatagcgtatggcagggacctggtaaatgggtgtgctaggcacaagagccagccaggagggagtggcacgttggggcttggtattctggtctgtaaaatgggctaacctccccgagtggcctgagctggccgtgagggagcagagctgagggtgctgaagcaggcgcggtgagtaggtcctcaggcctggctccaaggggacccaggtatccagccagtggctgtgcagggactgagtggggcaggcgcggccatgacctggacccggggggctgccaagggatctgagagcggcttccgcagcactccagggttgggctggttgaggggtagagatgacattttctgaggtagggaggacaggggagccgtgcttcctagggccaccgggaggctggagggagggaatttgtgtaaagcgcttgagatggtgactttagtacctagtgagtgctgggtgaacccagctggtgaggctgttcaggtgactgagattctggcgcagggcaggtcagaaagggggcttgggctgtgaaagatggcaggtgctggagaggaggcaggggtggggtgggagcgagttgtctgcccagaggacctggctctgggacattcccagtccctgttccctgttgggacagtctgcctctacccgtcccagctgccgttgagcgccctgggttccgctagggcctcccttctccctcaggagaccaggggcagaccagggcttgtgcctggcatgaggtctcttaagtgacccgttcccccttcacccagcaccgtttgttgagggcctgccatatctgggccccgagtacccagtctgtagggaaagtggacatccatactcaccccccaggcatggccctgggaggctgactgtgcatggctccagggaggccagggacagggccctgagcgggtgatccctgggctggacaccaaggttgagaagttaggccggcagcgtggaggggacagcactgtgggggtggcccggtgtggggaggggacatggggttttgggacggtcacaccacttcatctagacaccacagccaggcacatctgtcaggcttagttctcccatgcgccatcctcaagaggcaccagcactttatctgttgagcctttatgtggcaccaactgtgtgcactattacccggttttacagatgatggaggcccagaagcaggaggtggctggtgttaggtcacacagctaggaggcagcagaacggtggggcgctgcctgtgctcttaacccccaggccaagtcaccccatcaggcagtcaggagggctggcggcagggggtgatgtgggtgggaggtagtgccttcttggcattctcaccgcagcctgggtgccgggtgccactctgacctcagccatggcagggtcgggggatgccgatgggcgctgcacgggctctcagaggcccctcacctatggccatggccttgactgtgggggcctctgtccaccgatgatctcccttcatcccctacaggtggggcggtccagggtggtgggggcacagtggccccgggcagtgaccacagggtcctgacccgcggcccccgcaggcgggctgcatgctgttcccccacatctccccctgtgaggtgcgcgtgctcatgctcctgtactcgtccaagaagaagatcttcatgggcctcatcccctacgaccagagcggcttcgtcagtgccatccggcaggtcatcaccacccgcaagcaggcagtgggacctggtggtgtcaactcaggcccagtccagatcgtcaacaacaagtttctggcatggagtggtgtcatggagtggcaggagcccaggcctgagcccaacagtcggtccaagaggtggctgccatcccacgtctacgtgaaccagggggagatcctgaggaccgagcagtggccaaggaagctgtacatgcagctcatcccgcagcagctgctgaccaccctagtgccgctgttccggaactcgcgcctggtccagttccacttcaccaaggacctggagacactgaagagcctgtgccggatcatggacaatggcttcgccggctgcgtgcacttttcctacaaagcatcgtgtgagatccgcgtgcttatgctcctgtactcttcagagaagaaaatcttcattggcctcatcccccatgaccagggcaactttgtcaacggcatccggcgtgtcattgccaaccagcagcaggtcctgcagcggaacctggagcaggagcaacagcaacgagggatgggggggtagtggttaccccgggctgggcccctccaggagtcacagatgaggcccccgcagagactggtgacacgcttctgagcaggggcccctggggacttcaactgcccagcaacatggaggatggtgtcctgaggcctccaaggacggtccccacccctctacgtttccccaataaagccttttaaaaacctgccaaaaaaaaaatattgaaatacatgttccacatc

SEQ ID NO: 425579 - DNA, 3574 bp, Homo sapiens
  misc_feature (45)..(46): n is a, c, g, or t
aaggctaggtgagaggcctgcggtgaaatcggcgaggaggccgcnnctccgcggatcgggccgctcggccctcccatggaaggtgctcgggtcttcggggcactgggtcccatcggtccctcctcacctgggctcaccctcgggggtctggccgtgagcgagcaccggctcagcaacaagctgctggcttggagcggcgtcctcgagtggcaggaggtgagtctctgtggggctgcggctggcctccagggtcttgtcttgtccctgcggggacaggccagggcatctaggctgtgcacagtgacgcccctcctgcccccacagaagcgcagaccctactctgactccactgcaaagctgaagcggaccctgccctgccaagcctacgtgaaccaaggcgagaacctgtgagtgccggggcgtggcagccagggcggtggcaggggcagtggctgtggccgtggggatcagggcagccctttctgaccagctccttcccatagggagaccgaccagtggccgcagaagctgatcatgcagctgatccctcagcagctgctggtgagacccgcccctcccaccccatccactctgagcacccccatgcctggctgacccagctgtctgtcctgtcgcccccagaccaccctgggccccctgttccggaactcccagttggcacagttccacttcaccaacagagactgcgactcgctcaaggggctctgccgcatcatgggcaacggcttcgtgagtggggcgggctcccttgtagcactgtggtgacaagtacagctggaggcagcgctctgctcacacagtccaggcgggggtcggggggtctcccctggggccgagggtagccctcgtggcctctcggaccccatctggaaatgactgactccaggcaccctccgtagagcacagggtgaaggaactcagcctgagaggcctccagtttctgcatctgtgcccagcttcgaggtggccctgggggcgtgagtgcagggagggactggggccagccctgttggggcccaggagcctgtcggggacacatagcgtatggcagggacctggtaaatgggtgtgctaggcacaagagccagccaggagggagtggcacgttggggcttggtattctggtctgtaaaatgggctaacctccccgagtggcctgagctggccgtgagggagcagagctgagggtgctgaagcaggcgcggtgagtaggtcctcaggcctggctccaaggggacccaggtatccagccagtggctgtgcagggactgagtggggcaggcgcggccatgacctggacccggggggctgccaagggatctgagagcggcttccgcagcactccagggttgggctggttgaggggtagagatgacattttctgaggtagggaggacaggggagccgtgcttcctagggccaccgggaggctggagggagggaatttgtgtaaagcgcttgagatggtgactttagtacctagtgagtgctgggtgaacccagctggtgaggctgttcaggtgactgagattctggcgcagggcaggtcagaaagggggcttgggctgtgaaagatggcaggtgctggagaggaggcaggggtggggtgggagcgagttgtctgcccagaggacctggctctgggacattcccagtccctgttccctgttgggacagtctgcctctacccgtcccagctgccgttgagcgccctgggttccgctagggcctcccttctccctcaggagaccaggggcagaccagggcttgtgcctggcatgaggtctcttaagtgacccgttcccccttcacccagcaccgtttgttgagggcctgccatatctgggccccgagtacccagtctgtagggaaagtggacatccatactcaccccccaggcatggccctgggaggctgactgtgcatggctccagggaggccagggacagggccctgagcgggtgatccctgggctggacaccaaggttgagaagttaggccggcagcgtggaggggacagcactgtgggggtggcccggtgtggggaggggacatggggttttgggacggtcacaccacttcatctagacaccacagccaggcacatctgtcaggcttagttctcccatgcgccatcctcaagaggcaccagcactttatctgttgagcctttatgtggcaccaactgtgtgcactattacccggttttacagatgatggaggcccagaagcaggaggtggctggtgttaggtcacacagctaggaggcagcagaacggtggggcgctgcctgtgctcttaacccccaggccaagtcaccccatcaggcagtcaggagggctggcggcagggggtgatgtgggtgggaggtagtgccttcttggcattctcaccgcagcctgggtgccgggtgccactctgacctcagccatggcagggtcgggggatgccgatgggcgctgcacgggctctcagaggcccctcacctatggccatggccttgactgtgggggcctctgtccaccgatgatctcccttcatcccctacaggtggggcggtccagggtggtgggggcacagtggccccgggcagtgaccacagggtcctgacccgcggcccccgcaggcgggctgcatgctgttcccccacatctccccctgtgaggtgcgcgtgctcatgctcctgtactcgtccaagaagaagatcttcatgggcctcatcccctacgaccagagcggcttcgtcagtgccatccggcaggtcatcaccacccgcaagcaggcagtgggacctggtggtgtcaactcaggcccagtccagatcgtcaacaacaagtttctggcatggagtggtgtcatggagtggcaggagcccaggcctgagcccaacagtcggtccaagaggtggctgccatcccacgtctacgtgaaccagggggagatcctgaggaccgagcagtggccaaggaagctgtacatgcagctcatcccgcagcagctgctgaccaccctagtgccgctgttccggaactcgcgcctggtccagttccacttcaccaaggacctggagacactgaagagcctgtgccggatcatggacaatggcttcgccggctgcgtgcacttttcctacaaagcatcgtgtgagatccgcgtgcttatgctcctgtactcttcagagaagaaaatcttcattggcctcatcccccatgaccagggcaactttgtcaacggcatccggcgtgtcattgccaaccagcagcaggtcctgcagcggaacctggagcaggagcaacagcaacgagggatgggggggtagtggttaccccgggctgggcccctccaggagtcacagatgaggcccccgcagagactgtgcttgggagcctgtggccagcagcccccactgcacccctgcccccaggtgacacgcttctgagcaggggcccctggggacttcaactgcccagcaacatggaggatggtgtcctgaggcctccaaggacggtccccacccctctacgtttccccaataaagccttttaaaaacctg

SEQ ID NO: 425580 - DNA, 4999 bp, Homo sapiens
  misc_feature (45)..(46): n is a, c, g, or t
aaggctaggtgagaggcctgcggtgaaatcggcgaggaggccgcnnctccgcggatcgggccgctcggccctcccatggaaggtgctcgggtcttcggggcactgggtcccatcggtccctcctcacctgggctcaccctcgggggtctggccgtgagcgagcaccggctcagcaacaagctgctggcttggagcggcgtcctcgagtggcaggaggtgagtctctgtggggctgcggctggcctccagggtcttgtcttgtccctgcggggacaggccagggcatctaggctgtgcacagtgacgcccctcctgcccccacagaagcgcagaccctactctgactccactgcaaagctgaagcggaccctgccctgccaagcctacgtgaaccaaggcgagaacctgtgagtgccggggcgtggcagccagggcggtggcaggggcagtggctgtggccgtggggatcagggcagccctttctgaccagctccttcccatagggagaccgaccagtggccgcagaagctgatcatgcagctgatccctcagcagctgctggtgagacccgcccctcccaccccatccactctgagcacccccatgcctggctgacccagctgtctgtcctgtcgcccccagaccaccctgggccccctgttccggaactcccagttggcacagttccacttcaccaacagagactgcgactcgctcaaggggctctgccgcatcatgggcaacggcttcgtgagtggggcgggctcccttgtagcactgtggtgacaagtacagctggaggcagcgctctgctcacacagtccaggcgggggtcggggggtctcccctggggccgagggtagccctcgtggcctctcggaccccatctggaaatgactgactccaggcaccctccgtagagcacagggtgaaggaactcagcctgagaggcctccagtttctgcatctgtgcccagcttcgaggtggccctgggggcgtgagtgcagggagggactggggccagccctgttggggcccaggagcctgtcggggacacatagcgtatggcagggacctggtaaatgggtgtgctaggcacaagagccagccaggagggagtggcacgttggggcttggtattctggtctgtaaaatgggctaacctccccgagtggcctgagctggccgtgagggagcagagctgagggtgctgaagcaggcgcggtgagtaggtcctcaggcctggctccaaggggacccaggtatccagccagtggctgtgcagggactgagtggggcaggcgcggccatgacctggacccggggggctgccaagggatctgagagcggcttccgcagcactccagggttgggctggttgaggggtagagatgacattttctgaggtagggaggacaggggagccgtgcttcctagggccaccgggaggctggagggagggaatttgtgtaaagcgcttgagatggtgactttagtacctagtgagtgctgggtgaacccagctggtgaggctgttcaggtgactgagattctggcgcagggcaggtcagaaagggggcttgggctgtgaaagatggcaggtgctggagaggaggcaggggtggggtgggagcgagttgtctgcccagaggacctggctctgggacattcccagtccctgttccctgttgggacagtctgcctctacccgtcccagctgccgttgagcgccctgggttccgctagggcctcccttctccctcaggagaccaggggcagaccagggcttgtgcctggcatgaggtctcttaagtgacccgttcccccttcacccagcaccgtttgttgagggcctgccatatctgggccccgagtacccagtctgtagggaaagtggacatccatactcaccccccaggcatggccctgggaggctgactgtgcatggctccagggaggccagggacagggccctgagcgggtgatccctgggctggacaccaaggttgagaagttaggccggcagcgtggaggggacagcactgtgggggtggcccggtgtggggaggggacatggggttttgggacggtcacaccacttcatctagacaccacagccaggcacatctgtcaggcttagttctcccatgcgccatcctcaagaggcaccagcactttatctgttgagcctttatgtggcaccaactgtgtgcactattacccggttttacagatgatggaggcccagaagcaggaggtggctggtgttaggtcacacagctaggaggcagcagaacggtggggcgctgcctgtgctcttaacccccaggccaagtcaccccatcaggcagtcaggagggctggcggcagggggtgatgtgggtgggaggtagtgccttcttggcattctcaccgcagcctgggtgccgggtgccactctgacctcagccatggcagggtcgggggatgccgatgggcgctgcacgggctctcagaggcccctcacctatggccatggccttgactgtgggggcctctgtccaccgatgatctcccttcatcccctacaggtggggcggtccagggtggtgggggcacagtggccccgggcagtgaccacagggtcctgacccgcggcccccgcaggcgggctgcatgctgttcccccacatctccccctgtgaggtgcgcgtgctcatgctcctgtactcgtccaagaagaagatcttcatgggcctcatcccctacgaccagagcggcttcgtcagtgccatccggcaggtcatcaccacccgcaagcaggtgtgccagccaagcacagcccctctggggacagagggggattagaccccactgccctggttgggcagccagacttggtgtgggcggagtgtgatgcgatggctggagcaaggagctgcaggggagcccggaggatgccgggcgggttcccaccagggctccatggaaaagcggccactgggcggctctgcagggctggagggtgggtcttggcgcggcggcagggaagccagcggagcggggagctgggcaggggttgggatcgtcctgcggctggaaggccctgcctggtaaccacgtgtcctggtcatgccttgccagttgaggcagactctgcaggtcctgtgcaccaggtgagggccgggacctgtctcaggccactggggagccatggggggctgtgagcagatgaggggcagggcctgttcccctgggactagagaatggacccagctggggctaacaggccaaggctcggagggagggatggcaggccccaggacagacagacaggtttcccaggagcctgggcccctcttcccaccccgttcccttccaacaggcagtgggacctggtggtgtcaactcaggcccagtccagatcgtcaacaacaagtttctggcatggagtggtgtcatggagtggcaggaggtgagcactcggcagcccagggacttgggacccccagatcctcacggactgtggctgggaggggacactggcattgggggtctccagccctgagggctcctctttgcctctcccccaaaagcccaggcctgagcccaacagtcggtccaagaggtggctgccatcccacgtctacgtgaaccagggggagatcctgtgagtgctgggctggggggtggaggcagcatccaggggagctggggcttcctgaccctcgtccctttgtgccccacaggaggaccgagcagtggccaaggaagctgtacatgcagctcatcccgcagcagctgctggtgaggggctggggccgggtgctggagcctgcacgcagtagctcttccagagggcggggctgggggcaagagcgcctccccaggtggcctgagctggctgtgagggagcggagctgagggtgctgaagcaggtgtggtgggtagctcctcaggcttggcttcaaggggtcccaggcagccagctggtggctgtgcagggactgagcggggcaggggcagccacgacctgcacctggggggctgccaagggatctgagagcggcttccacagcactccagggttgggctggttgagcggtggagatgacgtttcctgaggtagggaggacaggggagtctcagtttggtcctgggcccgggggactcagcgggctgggagccgggaggccgtggtgggagaagccagagctgggggtcccctcgcttccccgcagaccaccctagtgccgctgttccggaactcgcgcctggtccagttccacttcaccaaggacctggagacactgaagagcctgtgccggatcatggacaatggcttcgccggctgcgtgcacttttcctacaaagcatcgtgtgagatccgcgtgcttatgctcctgtactcttcagagaagaaaatcttcattggcctcatcccccatgaccagggcaactttgtcaacggcatccggcgtgtcattgccaaccagcagcaggtcctgcagcggaacctggagcaggagcaacagcaacgagggatgggggggtagtggttaccccgggctgggcccctccaggagtcacagatgaggcccccgcagagactggtgagtggtgaccctgtcatgtacaggagggaccctggggcatgtggggggggtggggttgggaaagaagcagggcgaccttggccttggggagagcagagcagagggagaggcagcagtcccagcggtcctaggctgtcgggaaactgcagcccagcctcagggccatgggaggtggtatccaggcctgggtggggccaggcctctgctcacagggatgtggggtcagtgcttgggagcctgtggccagcagcccccactgcacccctgcccccaggtgacacgcttctgagcaggggcccctggggacttcaactgcccagcaacatggaggatggtgtcctgaggcctccaaggacggtccccacccctctacgtttccccaataaagccttttaaaaacctg

SEQ ID NO: 425581 - DNA, 5082 bp, Homo sapiens
  misc_feature (45)..(46): n is a, c, g, or t
aaggctaggtgagaggcctgcggtgaaatcggcgaggaggccgcnnctccgcggatcgggccgctcggccctcccatggaaggtgctcgggtcttcggggcactgggtcccatcggtccctcctcacctgggctcaccctcgggggtctggccgtgagcgagcaccggctcagcaacaagctgctggcttggagcggcgtcctcgagtggcaggaggtgagtctctgtggggctgcggctggcctccagggtcttgtcttgtccctgcggggacaggccagggcatctaggctgtgcacagtgacgcccctcctgcccccacagaagcgcagaccctactctgactccactgcaaagctgaagcggaccctgccctgccaagcctacgtgaaccaaggcgagaacctgtgagtgccggggcgtggcagccagggcggtggcaggggcagtggctgtggccgtggggatcagggcagccctttctgaccagctccttcccatagggagaccgaccagtggccgcagaagctgatcatgcagctgatccctcagcagctgctggtgagacccgcccctcccaccccatccactctgagcacccccatgcctggctgacccagctgtctgtcctgtcgcccccagaccaccctgggccccctgttccggaactcccagttggcacagttccacttcaccaacagagactgcgactcgctcaaggggctctgccgcatcatgggcaacggcttcgtgagtggggcgggctcccttgtagcactgtggtgacaagtacagctggaggcagcgctctgctcacacagtccaggcgggggtcggggggtctcccctggggccgagggtagccctcgtggcctctcggaccccatctggaaatgactgactccaggcaccctccgtagagcacagggtgaaggaactcagcctgagaggcctccagtttctgcatctgtgcccagcttcgaggtggccctgggggcgtgagtgcagggagggactggggccagccctgttggggcccaggagcctgtcggggacacatagcgtatggcagggacctggtaaatgggtgtgctaggcacaagagccagccaggagggagtggcacgttggggcttggtattctggtctgtaaaatgggctaacctccccgagtggcctgagctggccgtgagggagcagagctgagggtgctgaagcaggcgcggtgagtaggtcctcaggcctggctccaaggggacccaggtatccagccagtggctgtgcagggactgagtggggcaggcgcggccatgacctggacccggggggctgccaagggatctgagagcggcttccgcagcactccagggttgggctggttgaggggtagagatgacattttctgaggtagggaggacaggggagccgtgcttcctagggccaccgggaggctggagggagggaatttgtgtaaagcgcttgagatggtgactttagtacctagtgagtgctgggtgaacccagctggtgaggctgttcaggtgactgagattctggcgcagggcaggtcagaaagggggcttgggctgtgaaagatggcaggtgctggagaggaggcaggggtggggtgggagcgagttgtctgcccagaggacctggctctgggacattcccagtccctgttccctgttgggacagtctgcctctacccgtcccagctgccgttgagcgccctgggttccgctagggcctcccttctccctcaggagaccaggggcagaccagggcttgtgcctggcatgaggtctcttaagtgacccgttcccccttcacccagcaccgtttgttgagggcctgccatatctgggccccgagtacccagtctgtagggaaagtggacatccatactcaccccccaggcatggccctgggaggctgactgtgcatggctccagggaggccagggacagggccctgagcgggtgatccctgggctggacaccaaggttgagaagttaggccggcagcgtggaggggacagcactgtgggggtggcccggtgtggggaggggacatggggttttgggacggtcacaccacttcatctagacaccacagccaggcacatctgtcaggcttagttctcccatgcgccatcctcaagaggcaccagcactttatctgttgagcctttatgtggcaccaactgtgtgcactattacccggttttacagatgatggaggcccagaagcaggaggtggctggtgttaggtcacacagctaggaggcagcagaacggtggggcgctgcctgtgctcttaacccccaggccaagtcaccccatcaggcagtcaggagggctggcggcagggggtgatgtgggtgggaggtagtgccttcttggcattctcaccgcagcctgggtgccgggtgccactctgacctcagccatggcagggtcgggggatgccgatgggcgctgcacgggctctcagaggcccctcacctatggccatggccttgactgtgggggcctctgtccaccgatgatctcccttcatcccctacaggtggggcggtccagggtggtgggggcacagtggccccgggcagtgaccacagggtcctgacccgcggcccccgcaggcgggctgcatgctgttcccccacatctccccctgtgaggtgcgcgtgctcatgctcctgtactcgtccaagaagaagatcttcatgggcctcatcccctacgaccagagcggcttcgtcagtgccatccggcaggtcatcaccacccgcaagcaggtgtgccagccaagcacagcccctctggggacagagggggattagaccccactgccctggttgggcagccagacttggtgtgggcggagtgtgatgcgatggctggagcaaggagctgcaggggagcccggaggatgccgggcgggttcccaccagggctccatggaaaagcggccactgggcggctctgcagggctggagggtgggtcttggcgcggcggcagggaagccagcggagcggggagctgggcaggggttgggatcgtcctgcggctggaaggccctgcctggtaaccacgtgtcctggtcatgccttgccagttgaggcagactctgcaggtcctgtgcaccaggtgagggccgggacctgtctcaggccactggggagccatggggggctgtgagcagatgaggggcagggcctgttcccctgggactagagaatggacccagctggggctaacaggccaaggctcggagggagggatggcaggccccaggacagacagacaggtttcccaggagcctgggcccctcttcccaccccgttcccttccaacaggcagtgggacctggtggtgtcaactcaggcccagtccagatcgtcaacaacaagtttctggcatggagtggtgtcatggagtggcaggaggtgagcactcggcagcccagggacttgggacccccagatcctcacggactgtggctgggaggggacactggcattgggggtctccagccctgagggctcctctttgcctctcccccaaaagcccaggcctgagcccaacagtcggtccaagaggtggctgccatcccacgtctacgtgaaccagggggagatcctgtgagtgctgggctggggggtggaggcagcatccaggggagctggggcttcctgaccctcgtccctttgtgccccacaggaggaccgagcagtggccaaggaagctgtacatgcagctcatcccgcagcagctgctggtgaggggctggggccgggtgctggagcctgcacgcagtagctcttccagagggcggggctgggggcaagagcgcctccccaggtggcctgagctggctgtgagggagcggagctgagggtgctgaagcaggtgtggtgggtagctcctcaggcttggcttcaaggggtcccaggcagccagctggtggctgtgcagggactgagcggggcaggggcagccacgacctgcacctggggggctgccaagggatctgagagcggcttccacagcactccagggttgggctggttgagcggtggagatgacgtttcctgaggtagggaggacaggggagtctcagtttggtcctgggcccgggggactcagcgggctgggagccgggaggccgtggtgggagaagccagagctgggggtcccctcgcttccccgcagaccaccctagtgccgctgttccggaactcgcgcctggtccagttccacttcaccaaggacctggagacactgaagagcctgtgccggatcatggacaatggcttcgccggctgcgtgcacttttcctacaaagcatcgtgtgagatccgcgtgcttatgctcctgtactcttcagagaagaaaatcttcattggcctcatcccccatgaccagggcaactttgtcaacggcatccggcgtgtcattgccaaccagcagcaggtcctgcagcggaacctggagcaggagcaacagcaacgaggggtgaggtggccggcctccagggctgctcagtctccctccacccccgctgcctgctcaccactggcctctgatttctcgccgtaatgggggggtagtggttaccccgggctgggcccctccaggagtcacagatgaggcccccgcagagactggtgagtggtgaccctgtcatgtacaggagggaccctggggcatgtggggggggtggggttgggaaagaagcagggcgaccttggccttggggagagcagagcagagggagaggcagcagtcccagcggtcctaggctgtcgggaaactgcagcccagcctcagggccatgggaggtggtatccaggcctgggtggggccaggcctctgctcacagggatgtggggtcagtgcttgggagcctgtggccagcagcccccactgcacccctgcccccaggtgacacgcttctgagcaggggcccctggggacttcaactgcccagcaacatggaggatggtgtcctgaggcctccaaggacggtccccacccctctacgtttccccaataaagccttttaaaaacctg

SEQ ID NO: 425582 - DNA, 4805 bp, Homo sapiens
  misc_feature (45)..(46): n is a, c, g, or t
aaggctaggtgagaggcctgcggtgaaatcggcgaggaggccgcnnctccgcggatcgggccgctcggccctcccatggaaggtgctcgggtcttcggggcactgggtcccatcggtccctcctcacctgggctcaccctcgggggtctggccgtgagcgagcaccggctcagcaacaagctgctggcttggagcggcgtcctcgagtggcaggaggtgagtctctgtggggctgcggctggcctccagggtcttgtcttgtccctgcggggacaggccagggcatctaggctgtgcacagtgacgcccctcctgcccccacagaagcgcagaccctactctgactccactgcaaagctgaagcggaccctgccctgccaagcctacgtgaaccaaggcgagaacctgtgagtgccggggcgtggcagccagggcggtggcaggggcagtggctgtggccgtggggatcagggcagccctttctgaccagctccttcccatagggagaccgaccagtggccgcagaagctgatcatgcagctgatccctcagcagctgctggtgagacccgcccctcccaccccatccactctgagcacccccatgcctggctgacccagctgtctgtcctgtcgcccccagaccaccctgggccccctgttccggaactcccagttggcacagttccacttcaccaacagagactgcgactcgctcaaggggctctgccgcatcatgggcaacggcttcgtgagtggggcgggctcccttgtagcactgtggtgacaagtacagctggaggcagcgctctgctcacacagtccaggcgggggtcggggggtctcccctggggccgagggtagccctcgtggcctctcggaccccatctggaaatgactgactccaggcaccctccgtagagcacagggtgaaggaactcagcctgagaggcctccagtttctgcatctgtgcccagcttcgaggtggccctgggggcgtgagtgcagggagggactggggccagccctgttggggcccaggagcctgtcggggacacatagcgtatggcagggacctggtaaatgggtgtgctaggcacaagagccagccaggagggagtggcacgttggggcttggtattctggtctgtaaaatgggctaacctccccgagtggcctgagctggccgtgagggagcagagctgagggtgctgaagcaggcgcggtgagtaggtcctcaggcctggctccaaggggacccaggtatccagccagtggctgtgcagggactgagtggggcaggcgcggccatgacctggacccggggggctgccaagggatctgagagcggcttccgcagcactccagggttgggctggttgaggggtagagatgacattttctgaggtagggaggacaggggagccgtgcttcctagggccaccgggaggctggagggagggaatttgtgtaaagcgcttgagatggtgactttagtacctagtgagtgctgggtgaacccagctggtgaggctgttcaggtgactgagattctggcgcagggcaggtcagaaagggggcttgggctgtgaaagatggcaggtgctggagaggaggcaggggtggggtgggagcgagttgtctgcccagaggacctggctctgggacattcccagtccctgttccctgttgggacagtctgcctctacccgtcccagctgccgttgagcgccctgggttccgctagggcctcccttctccctcaggagaccaggggcagaccagggcttgtgcctggcatgaggtctcttaagtgacccgttcccccttcacccagcaccgtttgttgagggcctgccatatctgggccccgagtacccagtctgtagggaaagtggacatccatactcaccccccaggcatggccctgggaggctgactgtgcatggctccagggaggccagggacagggccctgagcgggtgatccctgggctggacaccaaggttgagaagttaggccggcagcgtggaggggacagcactgtgggggtggcccggtgtggggaggggacatggggttttgggacggtcacaccacttcatctagacaccacagccaggcacatctgtcaggcttagttctcccatgcgccatcctcaagaggcaccagcactttatctgttgagcctttatgtggcaccaactgtgtgcactattacccggttttacagatgatggaggcccagaagcaggaggtggctggtgttaggtcacacagctaggaggcagcagaacggtggggcgctgcctgtgctcttaacccccaggccaagtcaccccatcaggcagtcaggagggctggcggcagggggtgatgtgggtgggaggtagtgccttcttggcattctcaccgcagcctgggtgccgggtgccactctgacctcagccatggcagggtcgggggatgccgatgggcgctgcacgggctctcagaggcccctcacctatggccatggccttgactgtgggggcctctgtccaccgatgatctcccttcatcccctacaggtggggcggtccagggtggtgggggcacagtggccccgggcagtgaccacagggtcctgacccgcggcccccgcaggcgggctgcatgctgttcccccacatctccccctgtgaggtgcgcgtgctcatgctcctgtactcgtccaagaagaagatcttcatgggcctcatcccctacgaccagagcggcttcgtcagtgccatccggcaggtcatcaccacccgcaagcaggtgtgccagccaagcacagcccctctggggacagagggggattagaccccactgccctggttgggcagccagacttggtgtgggcggagtgtgatgcgatggctggagcaaggagctgcaggggagcccggaggatgccgggcgggttcccaccagggctccatggaaaagcggccactgggcggctctgcagggctggagggtgggtcttggcgcggcggcagggaagccagcggagcggggagctgggcaggggttgggatcgtcctgcggctggaaggccctgcctggtaaccacgtgtcctggtcatgccttgccagttgaggcagactctgcaggtcctgtgcaccaggtgagggccgggacctgtctcaggccactggggagccatggggggctgtgagcagatgaggggcagggcctgttcccctgggactagagaatggacccagctggggctaacaggccaaggctcggagggagggatggcaggccccaggacagacagacaggtttcccaggagcctgggcccctcttcccaccccgttcccttccaacaggcagtgggacctggtggtgtcaactcaggcccagtccagatcgtcaacaacaagtttctggcatggagtggtgtcatggagtggcaggaggtgagcactcggcagcccagggacttgggacccccagatcctcacggactgtggctgggaggggacactggcattgggggtctccagccctgagggctcctctttgcctctcccccaaaagcccaggcctgagcccaacagtcggtccaagaggtggctgccatcccacgtctacgtgaaccagggggagatcctgtgagtgctgggctggggggtggaggcagcatccaggggagctggggcttcctgaccctcgtccctttgtgccccacaggaggaccgagcagtggccaaggaagctgtacatgcagctcatcccgcagcagctgctggtgaggggctggggccgggtgctggagcctgcacgcagtagctcttccagagggcggggctgggggcaagagcgcctccccaggtggcctgagctggctgtgagggagcggagctgagggtgctgaagcaggtgtggtgggtagctcctcaggcttggcttcaaggggtcccaggcagccagctggtggctgtgcagggactgagcggggcaggggcagccacgacctgcacctggggggctgccaagggatctgagagcggcttccacagcactccagggttgggctggttgagcggtggagatgacgtttcctgaggtagggaggacaggggagtctcagtttggtcctgggcccgggggactcagcgggctgggagccgggaggccgtggtgggagaagccagagctgggggtcccctcgcttccccgcagaccaccctagtgccgctgttccggaactcgcgcctggtccagttccacttcaccaaggacctggagacactgaagagcctgtgccggatcatggacaatggcttcgccggctgcgtgcacttttcctacaaagcatcgtgtgagatccgcgtgcttatgctcctgtactcttcagagaagaaaatcttcattggcctcatcccccatgaccagggcaactttgtcaacggcatccggcgtgtcattgccaaccagcagcaggtcctgcagcggaacctggagcaggagcaacagcaacgaggggtgaggtggccggcctccagggctgctcagtctccctccacccccgctgcctgctcaccactggcctctgatttctcgccgtaatgggggggtagtggttaccccgggctgggcccctccaggagtcacagatgaggcccccgcagagactggtgacacgcttctgagcaggggcccctggggacttcaactgcccagcaacatggaggatggtgtcctgaggcctccaaggacggtccccacccctctacgtttccccaataaagccttttaaaaacctg

SEQ ID NO: 425583 - DNA, 3803 bp, Homo sapiens
  misc_feature (45)..(46): n is a, c, g, or t
aaggctaggtgagaggcctgcggtgaaatcggcgaggaggccgcnnctccgcggatcgggccgctcggccctcccatggaaggtgctcgggtcttcggggcactgggtcccatcggtccctcctcacctgggctcaccctcgggggtctggccgtgagcgagcaccggctcagcaacaagctgctggcttggagcggcgtcctcgagtggcaggaggtgagtctctgtggggctgcggctggcctccagggtcttgtcttgtccctgcggggacaggccagggcatctaggctgtgcacagtgacgcccctcctgcccccacagaagcgcagaccctactctgactccactgcaaagctgaagcggaccctgccctgccaagcctacgtgaaccaaggcgagaacctgtgagtgccggggcgtggcagccagggcggtggcaggggcagtggctgtggccgtggggatcagggcagccctttctgaccagctccttcccatagggagaccgaccagtggccgcagaagctgatcatgcagctgatccctcagcagctgctggtgagacccgcccctcccaccccatccactctgagcacccccatgcctggctgacccagctgtctgtcctgtcgcccccagaccaccctgggccccctgttccggaactcccagttggcacagttccacttcaccaacagagactgcgactcgctcaaggggctctgccgcatcatgggcaacggcttcgtgagtggggcgggctcccttgtagcactgtggtgacaagtacagctggaggcagcgctctgctcacacagtccaggcgggggtcggggggtctcccctggggccgagggtagccctcgtggcctctcggaccccatctggaaatgactgactccaggcaccctccgtagagcacagggtgaaggaactcagcctgagaggcctccagtttctgcatctgtgcccagcttcgaggtggccctgggggcgtgagtgcagggagggactggggccagccctgttggggcccaggagcctgtcggggacacatagcgtatggcagggacctggtaaatgggtgtgctaggcacaagagccagccaggagggagtggcacgttggggcttggtattctggtctgtaaaatgggctaacctccccgagtggcctgagctggccgtgagggagcagagctgagggtgctgaagcaggcgcggtgagtaggtcctcaggcctggctccaaggggacccaggtatccagccagtggctgtgcagggactgagtggggcaggcgcggccatgacctggacccggggggctgccaagggatctgagagcggcttccgcagcactccagggttgggctggttgaggggtagagatgacattttctgaggtagggaggacaggggagccgtgcttcctagggccaccgggaggctggagggagggaatttgtgtaaagcgcttgagatggtgactttagtacctagtgagtgctgggtgaacccagctggtgaggctgttcaggtgactgagattctggcgcagggcaggtcagaaagggggcttgggctgtgaaagatggcaggtgctggagaggaggcaggggtggggtgggagcgagttgtctgcccagaggacctggctctgggacattcccagtccctgttccctgttgggacagtctgcctctacccgtcccagctgccgttgagcgccctgggttccgctagggcctcccttctccctcaggagaccaggggcagaccagggcttgtgcctggcatgaggtctcttaagtgacccgttcccccttcacccagcaccgtttgttgagggcctgccatatctgggccccgagtacccagtctgtagggaaagtggacatccatactcaccccccaggcatggccctgggaggctgactgtgcatggctccagggaggccagggacagggccctgagcgggtgatccctgggctggacaccaaggttgagaagttaggccggcagcgtggaggggacagcactgtgggggtggcccggtgtggggaggggacatggggttttgggacggtcacaccacttcatctagacaccacagccaggcacatctgtcaggcttagttctcccatgcgccatcctcaagaggcaccagcactttatctgttgagcctttatgtggcaccaactgtgtgcactattacccggttttacagatgatggaggcccagaagcaggaggtggctggtgttaggtcacacagctaggaggcagcagaacggtggggcgctgcctgtgctcttaacccccaggccaagtcaccccatcaggcagtcaggagggctggcggcagggggtgatgtgggtgggaggtagtgccttcttggcattctcaccgcagcctgggtgccgggtgccactctgacctcagccatggcagggtcgggggatgccgatgggcgctgcacgggctctcagaggcccctcacctatggccatggccttgactgtgggggcctctgtccaccgatgatctcccttcatcccctacaggtggggcggtccagggtggtgggggcacagtggccccgggcagtgaccacagggtcctgacccgcggcccccgcaggcgggctgcatgctgttcccccacatctccccctgtgaggtgcgcgtgctcatgctcctgtactcgtccaagaagaagatcttcatgggcctcatcccctacgaccagagcggcttcgtcagtgccatccggcaggtcatcaccacccgcaagcaggcagtgggacctggtggtgtcaactcaggcccagtccagatcgtcaacaacaagtttctggcatggagtggtgtcatggagtggcaggagcccaggcctgagcccaacagtcggtccaagaggtggctgccatcccacgtctacgtgaaccagggggagatcctgaggaccgagcagtggccaaggaagctgtacatgcagctcatcccgcagcagctgctgaccaccctagtgccgctgttccggaactcgcgcctggtccagttccacttcaccaaggacctggagacactgaagagcctgtgccggatcatggacaatggcttcgccggctgcgtgcacttttcctacaaagcatcgtgtgagatccgcgtgcttatgctcctgtactcttcagagaagaaaatcttcattggcctcatcccccatgaccagggcaactttgtcaacggcatccggcgtgtcattgccaaccagcagcaggtcctgcagcggaacctggagcaggagcaacagcaacgagggatgggggggtagtggttaccccgggctgggcccctccaggagtcacagatgaggcccccgcagagactggtgagtggtgaccctgtcatgtacaggagggaccctggggcatgtggggggggtggggttgggaaagaagcagggcgaccttggccttggggagagcagagcagagggagaggcagcagtcccagcggtcctaggctgtcgggaaactgcagcccagcctcagggccatgggaggtggtatccaggcctgggtggggccaggcctctgctcacagggatgtggggtcagtgcttgggagcctgtggccagcagcccccactgcacccctgcccccaggtgacacgcttctgagcaggggcccctggggacttcaactgcccagcaacatggaggatggtgtcctgaggcctccaaggacggtccccacccctctacgtttccccaataaagccttttaaaaacctg

SEQ ID NO: 425584 - DNA, 3451 bp, Homo sapiens
  misc_feature (45)..(46): n is a, c, g, or t
  misc_feature (3388)..(3389): n is a, c, g, or t
  misc_feature (3420)..(3420): n is a, c, g, or t
aaggctaggtgagaggcctgcggtgaaatcggcgaggaggccgcnnctccgcggatcgggccgctcggccctcccatggaaggtgctcgggtcttcggggcactgggtcccatcggtccctcctcacctgggctcaccctcgggggtctggccgtgagcgagcaccggctcagcaacaagctgctggcttggagcggcgtcctcgagtggcaggaggtgagtctctgtggggctgcggctggcctccagggtcttgtcttgtccctgcggggacaggccagggcatctaggctgtgcacagtgacgcccctcctgcccccacagaagcgcagaccctactctgactccactgcaaagctgaagcggaccctgccctgccaagcctacgtgaaccaaggcgagaacctgtgagtgccggggcgtggcagccagggcggtggcaggggcagtggctgtggccgtggggatcagggcagccctttctgaccagctccttcccatagggagaccgaccagtggccgcagaagctgatcatgcagctgatccctcagcagctgctggtgagacccgcccctcccaccccatccactctgagcacccccatgcctggctgacccagctgtctgtcctgtcgcccccagaccaccctgggccccctgttccggaactcccagttggcacagttccacttcaccaacagagactgcgactcgctcaaggggctctgccgcatcatgggcaacggcttcgtgagtggggcgggctcccttgtagcactgtggtgacaagtacagctggaggcagcgctctgctcacacagtccaggcgggggtcggggggtctcccctggggccgagggtagccctcgtggcctctcggaccccatctggaaatgactgactccaggcaccctccgtagagcacagggtgaaggaactcagcctgagaggcctccagtttctgcatctgtgcccagcttcgaggtggccctgggggcgtgagtgcagggagggactggggccagccctgttggggcccaggagcctgtcggggacacatagcgtatggcagggacctggtaaatgggtgtgctaggcacaagagccagccaggagggagtggcacgttggggcttggtattctggtctgtaaaatgggctaacctccccgagtggcctgagctggccgtgagggagcagagctgagggtgctgaagcaggcgcggtgagtaggtcctcaggcctggctccaaggggacccaggtatccagccagtggctgtgcagggactgagtggggcaggcgcggccatgacctggacccggggggctgccaagggatctgagagcggcttccgcagcactccagggttgggctggttgaggggtagagatgacattttctgaggtagggaggacaggggagccgtgcttcctagggccaccgggaggctggagggagggaatttgtgtaaagcgcttgagatggtgactttagtacctagtgagtgctgggtgaacccagctggtgaggctgttcaggtgactgagattctggcgcagggcaggtcagaaagggggcttgggctgtgaaagatggcaggtgctggagaggaggcaggggtggggtgggagcgagttgtctgcccagaggacctggctctgggacattcccagtccctgttccctgttgggacagtctgcctctacccgtcccagctgccgttgagcgccctgggttccgctagggcctcccttctccctcaggagaccaggggcagaccagggcttgtgcctggcatgaggtctcttaagtgacccgttcccccttcacccagcaccgtttgttgagggcctgccatatctgggccccgagtacccagtctgtagggaaagtggacatccatactcaccccccaggcatggccctgggaggctgactgtgcatggctccagggaggccagggacagggccctgagcgggtgatccctgggctggacaccaaggttgagaagttaggccggcagcgtggaggggacagcactgtgggggtggcccggtgtggggaggggacatggggttttgggacggtcacaccacttcatctagacaccacagccaggcacatctgtcaggcttagttctcccatgcgccatcctcaagaggcaccagcactttatctgttgagcctttatgtggcaccaactgtgtgcactattacccggttttacagatgatggaggcccagaagcaggaggtggctggtgttaggtcacacagctaggaggcagcagaacggtggggcgctgcctgtgctcttaacccccaggccaagtcaccccatcaggcagtcaggagggctggcggcagggggtgatgtgggtgggaggtagtgccttcttggcattctcaccgcagcctgggtgccgggtgccactctgacctcagccatggcagggtcgggggatgccgatgggcgctgcacgggctctcagaggcccctcacctatggccatggccttgactgtgggggcctctgtccaccgatgatctcccttcatcccctacaggtggggcggtccagggtggtgggggcacagtggccccgggcagtgaccacagggtcctgacccgcggcccccgcaggcgggctgcatgctgttcccccacatctccccctgtgaggtgcgcgtgctcatgctcctgtactcgtccaagaagaagatcttcatgggcctcatcccctacgaccagagcggcttcgtcagtgccatccggcaggtcatcaccacccgcaagcaggcagtgggacctggtggtgtcaactcaggcccagtccagatcgtcaacaacaagtttctggcatggagtggtgtcatggagtggcaggagcccaggcctgagcccaacagtcggtccaagaggtggctgccatcccacgtctacgtgaaccagggggagatcctgaggaccgagcagtggccaaggaagctgtacatgcagctcatcccgcagcagctgctgaccaccctagtgccgctgttccggaactcgcgcctggtccagttccacttcaccaaggacctggagacactgaagagcctgtgccggatcatggacaatggcttcgccggctgcgtgcacttttcctacaaagcatcgtgtgagatccgcgtgcttatgctcctgtactcttcagagaagaaaatcttcattggcctcatcccccatgaccagggcaactttgtcaacggcatccggcgtgtcattgccaaccagcagcaggtcctgcagcggaacctggagcaggagcaacagcaacgagggatgggggggtagtggttaccccgggctgggcccctccaggagtcacagataaagatatannccagagactgtagcttgggataaatttaacnagaaacaaaaacagaacaaaaaaataaaaaa

SEQ ID NO: 425585 - DNA, 4450 bp, Homo sapiens
  misc_feature (45)..(46): n is a, c, g, or t
aaggctaggtgagaggcctgcggtgaaatcggcgaggaggccgcnnctccgcggatcgggccgctcggccctcccatggaaggtgctcgggtcttcggggcactgggtcccatcggtccctcctcacctgggctcaccctcgggggtctggccgtgagcgagcaccggctcagcaacaagctgctggcttggagcggcgtcctcgagtggcaggaggtgagtctctgtggggctgcggctggcctccagggtcttgtcttgtccctgcggggacaggccagggcatctaggctgtgcacagtgacgcccctcctgcccccacagaagcgcagaccctactctgactccactgcaaagctgaagcggaccctgccctgccaagcctacgtgaaccaaggcgagaacctgtgagtgccggggcgtggcagccagggcggtggcaggggcagtggctgtggccgtggggatcagggcagccctttctgaccagctccttcccatagggagaccgaccagtggccgcagaagctgatcatgcagctgatccctcagcagctgctggtgagacccgcccctcccaccccatccactctgagcacccccatgcctggctgacccagctgtctgtcctgtcgcccccagaccaccctgggccccctgttccggaactcccagttggcacagttccacttcaccaacagagactgcgactcgctcaaggggctctgccgcatcatgggcaacggcttcgtgagtggggcgggctcccttgtagcactgtggtgacaagtacagctggaggcagcgctctgctcacacagtccaggcgggggtcggggggtctcccctggggccgagggtagccctcgtggcctctcggaccccatctggaaatgactgactccaggcaccctccgtagagcacagggtgaaggaactcagcctgagaggcctccagtttctgcatctgtgcccagcttcgaggtggccctgggggcgtgagtgcagggagggactggggccagccctgttggggcccaggagcctgtcggggacacatagcgtatggcagggacctggtaaatgggtgtgctaggcacaagagccagccaggagggagtggcacgttggggcttggtattctggtctgtaaaatgggctaacctccccgagtggcctgagctggccgtgagggagcagagctgagggtgctgaagcaggcgcggtgagtaggtcctcaggcctggctccaaggggacccaggtatccagccagtggctgtgcagggactgagtggggcaggcgcggccatgacctggacccggggggctgccaagggatctgagagcggcttccgcagcactccagggttgggctggttgaggggtagagatgacattttctgaggtagggaggacaggggagccgtgcttcctagggccaccgggaggctggagggagggaatttgtgtaaagcgcttgagatggtgactttagtacctagtgagtgctgggtgaacccagctggtgaggctgttcaggtgactgagattctggcgcagggcaggtcagaaagggggcttgggctgtgaaagatggcaggtgctggagaggaggcaggggtggggtgggagcgagttgtctgcccagaggacctggctctgggacattcccagtccctgttccctgttgggacagtctgcctctacccgtcccagctgccgttgagcgccctgggttccgctagggcctcccttctccctcaggagaccaggggcagaccagggcttgtgcctggcatgaggtctcttaagtgacccgttcccccttcacccagcaccgtttgttgagggcctgccatatctgggccccgagtacccagtctgtagggaaagtggacatccatactcaccccccaggcatggccctgggaggctgactgtgcatggctccagggaggccagggacagggccctgagcgggtgatccctgggctggacaccaaggttgagaagttaggccggcagcgtggaggggacagcactgtgggggtggcccggtgtggggaggggacatggggttttgggacggtcacaccacttcatctagacaccacagccaggcacatctgtcaggcttagttctcccatgcgccatcctcaagaggcaccagcactttatctgttgagcctttatgtggcaccaactgtgtgcactattacccggttttacagatgatggaggcccagaagcaggaggtggctggtgttaggtcacacagctaggaggcagcagaacggtggggcgctgcctgtgctcttaacccccaggccaagtcaccccatcaggcagtcaggagggctggcggcagggggtgatgtgggtgggaggtagtgccttcttggcattctcaccgcagcctgggtgccgggtgccactctgacctcagccatggcagggtcgggggatgccgatgggcgctgcacgggctctcagaggcccctcacctatggccatggccttgactgtgggggcctctgtccaccgatgatctcccttcatcccctacaggtggggcggtccagggtggtgggggcacagtggccccgggcagtgaccacagggtcctgacccgcggcccccgcaggcgggctgcatgctgttcccccacatctccccctgtgaggtgcgcgtgctcatgctcctgtactcgtccaagaagaagatcttcatgggcctcatcccctacgaccagagcggcttcgtcagtgccatccggcaggtcatcaccacccgcaagcaggtgtgccagccaagcacagcccctctggggacagagggggattagaccccactgccctggttgggcagccagacttggtgtgggcggagtgtgatgcgatggctggagcaaggagctgcaggggagcccggaggatgccgggcgggttcccaccagggctccatggaaaagcggccactgggcggctctgcagggctggagggtgggtcttggcgcggcggcagggaagccagcggagcggggagctgggcaggggttgggatcgtcctgcggctggaaggccctgcctggtaaccacgtgtcctggtcatgccttgccagttgaggcagactctgcaggtcctgtgcaccaggtgagggccgggacctgtctcaggccactggggagccatggggggctgtgagcagatgaggggcagggcctgttcccctgggactagagaatggacccagctggggctaacaggccaaggctcggagggagggatggcaggccccaggacagacagacaggtttcccaggagcctgggcccctcttcccaccccgttcccttccaacaggcagtgggacctggtggtgtcaactcaggcccagtccagatcgtcaacaacaagtttctggcatggagtggtgtcatggagtggcaggaggtgagcactcggcagcccagggacttgggacccccagatcctcacggactgtggctgggaggggacactggcattgggggtctccagccctgagggctcctctttgcctctcccccaaaagcccaggcctgagcccaacagtcggtccaagaggtggctgccatcccacgtctacgtgaaccagggggagatcctgtgagtgctgggctggggggtggaggcagcatccaggggagctggggcttcctgaccctcgtccctttgtgccccacaggaggaccgagcagtggccaaggaagctgtacatgcagctcatcccgcagcagctgctggtgaggggctggggccgggtgctggagcctgcacgcagtagctcttccagagggcggggctgggggcaagagcgcctccccaggtggcctgagctggctgtgagggagcggagctgagggtgctgaagcaggtgtggtgggtagctcctcaggcttggcttcaaggggtcccaggcagccagctggtggctgtgcagggactgagcggggcaggggcagccacgacctgcacctggggggctgccaagggatctgagagcggcttccacagcactccagggttgggctggttgagcggtggagatgacgtttcctgaggtagggaggacaggggagtctcagtttggtcctgggcccgggggactcagcgggctgggagccgggaggccgtggtgggagaagccagagctgggggtcccctcgcttccccgcagaccaccctagtgccgctgttccggaactcgcgcctggtccagttccacttcaccaaggacctggagacactgaagagcctgtgccggatcatggacaatggcttcgccggctgcgtgcacttttcctacaaagcatcgtgtgagatccgcgtgcttatgctcctgtactcttcagagaagaaaatcttcattgccaatcccacgtggccatcgggacggggggacctca

SEQ ID NO: 425586 - DNA, 4304 bp, Homo sapiens
  misc_feature (45)..(46): n is a, c, g, or t
aaggctaggtgagaggcctgcggtgaaatcggcgaggaggccgcnnctccgcggatcgggccgctcggccctcccatggaaggtgctcgggtcttcggggcactgggtcccatcggtccctcctcacctgggctcaccctcgggggtctggccgtgagcgagcaccggctcagcaacaagctgctggcttggagcggcgtcctcgagtggcaggaggtgagtctctgtggggctgcggctggcctccagggtcttgtcttgtccctgcggggacaggccagggcatctaggctgtgcacagtgacgcccctcctgcccccacagaagcgcagaccctactctgactccactgcaaagctgaagcggaccctgccctgccaagcctacgtgaaccaaggcgagaacctgtgagtgccggggcgtggcagccagggcggtggcaggggcagtggctgtggccgtggggatcagggcagccctttctgaccagctccttcccatagggagaccgaccagtggccgcagaagctgatcatgcagctgatccctcagcagctgctggtgagacccgcccctcccaccccatccactctgagcacccccatgcctggctgacccagctgtctgtcctgtcgcccccagaccaccctgggccccctgttccggaactcccagttggcacagttccacttcaccaacagagactgcgactcgctcaaggggctctgccgcatcatgggcaacggcttcgtgagtggggcgggctcccttgtagcactgtggtgacaagtacagctggaggcagcgctctgctcacacagtccaggcgggggtcggggggtctcccctggggccgagggtagccctcgtggcctctcggaccccatctggaaatgactgactccaggcaccctccgtagagcacagggtgaaggaactcagcctgagaggcctccagtttctgcatctgtgcccagcttcgaggtggccctgggggcgtgagtgcagggagggactggggccagccctgttggggcccaggagcctgtcggggacacatagcgtatggcagggacctggtaaatgggtgtgctaggcacaagagccagccaggagggagtggcacgttggggcttggtattctggtctgtaaaatgggctaacctccccgagtggcctgagctggccgtgagggagcagagctgagggtgctgaagcaggcgcggtgagtaggtcctcaggcctggctccaaggggacccaggtatccagccagtggctgtgcagggactgagtggggcaggcgcggccatgacctggacccggggggctgccaagggatctgagagcggcttccgcagcactccagggttgggctggttgaggggtagagatgacattttctgaggtagggaggacaggggagccgtgcttcctagggccaccgggaggctggagggagggaatttgtgtaaagcgcttgagatggtgactttagtacctagtgagtgctgggtgaacccagctggtgaggctgttcaggtgactgagattctggcgcagggcaggtcagaaagggggcttgggctgtgaaagatggcaggtgctggagaggaggcaggggtggggtgggagcgagttgtctgcccagaggacctggctctgggacattcccagtccctgttccctgttgggacagtctgcctctacccgtcccagctgccgttgagcgccctgggttccgctagggcctcccttctccctcaggagaccaggggcagaccagggcttgtgcctggcatgaggtctcttaagtgacccgttcccccttcacccagcaccgtttgttgagggcctgccatatctgggccccgagtacccagtctgtagggaaagtggacatccatactcaccccccaggcatggccctgggaggctgactgtgcatggctccagggaggccagggacagggccctgagcgggtgatccctgggctggacaccaaggttgagaagttaggccggcagcgtggaggggacagcactgtgggggtggcccggtgtggggaggggacatggggttttgggacggtcacaccacttcatctagacaccacagccaggcacatctgtcaggcttagttctcccatgcgccatcctcaagaggcaccagcactttatctgttgagcctttatgtggcaccaactgtgtgcactattacccggttttacagatgatggaggcccagaagcaggaggtggctggtgttaggtcacacagctaggaggcagcagaacggtggggcgctgcctgtgctcttaacccccaggccaagtcaccccatcaggcagtcaggagggctggcggcagggggtgatgtgggtgggaggtagtgccttcttggcattctcaccgcagcctgggtgccgggtgccactctgacctcagccatggcagggtcgggggatgccgatgggcgctgcacgggctctcagaggcccctcacctatggccatggccttgactgtgggggcctctgtccaccgatgatctcccttcatcccctacaggtggggcggtccagggtggtgggggcacagtggccccgggcagtgaccacagggtcctgacccgcggcccccgcaggcgggctgcatgctgttcccccacatctccccctgtgaggtgcgcgtgctcatgctcctgtactcgtccaagaagaagatcttcatgggcctcatcccctacgaccagagcggcttcgtcagtgccatccggcaggtcatcaccacccgcaagcaggtgtgccagccaagcacagcccctctggggacagagggggattagaccccactgccctggttgggcagccagacttggtgtgggcggagtgtgatgcgatggctggagcaaggagctgcaggggagcccggaggatgccgggcgggttcccaccagggctccatggaaaagcggccactgggcggctctgcagggctggagggtgggtcttggcgcggcggcagggaagccagcggagcggggagctgggcaggggttgggatcgtcctgcggctggaaggccctgcctggtaaccacgtgtcctggtcatgccttgccagttgaggcagactctgcaggtcctgtgcaccaggtgagggccgggacctgtctcaggccactggggagccatggggggctgtgagcagatgaggggcagggcctgttcccctgggactagagaatggacccagctggggctaacaggccaaggctcggagggagggatggcaggccccaggacagacagacaggtttcccaggagcctgggcccctcttcccaccccgttcccttccaacaggcagtgggacctggtggtgtcaactcaggcccagtccagatcgtcaacaacaagtttctggcatggagtggtgtcatggagtggcaggaggtgagcactcggcagcccagggacttgggacccccagatcctcacggactgtggctgggaggggacactggcattgggggtctccagccctgagggctcctctttgcctctcccccaaaagcccaggcctgagcccaacagtcggtccaagaggtggctgccatcccacgtctacgtgaaccagggggagatcctgtgagtgctgggctggggggtggaggcagcatccaggggagctggggcttcctgaccctcgtccctttgtgccccacaggaggaccgagcagtggccaaggaagctgtacatgcagctcatcccgcagcagctgctggtgaggggctggggccgggtgctggagcctgcacgcagtagctcttccagagggcggggctgggggcaagagcgcctccccaggtggcctgagctggctgtgagggagcggagctgagggtgctgaagcaggtgtggtgggtagctcctcaggcttggcttcaaggggtcccaggcagccagctggtggctgtgcagggactgagcggggcaggggcagccacgacctgcacctggggggctgccaagggatctgagagcggcttccacagcactccagggttgggctggttgagcggtggagatgacgtttcctgaggtagggaggacaggggagccgtgcttcctaggcccaccgggagtctggagggagggaatttgtgtaaagcgcttgagatggtgactttagtacctagtgagtgctggtgaaccccgctggtgaggctgttcaggtgactgagattctggcgcagggcaggtcagaaaggggcttgggcatgtgaaagatggcagtgcga

SEQ ID NO: 425587 - DNA, 514 bp, Homo sapiens
  misc_feature (10)..(10): n is a, c, g, or t
aacggctgcnggatcatggacaatggcttctttctccatctgtgaggtggagaaggttggactttggtgtttctgagccctccccccgatgtccaccttccagctgggccatacttgggccggctgcgtgcacttttcctacaaagcatcgtgtgagatccgcgtgcttatgctcctgtactcttcagagaagaaaatcttcattggcctcatcccccatgaccagggcaactttgtcaacggcatccggcgtgtcattgccaaccagcagcaggtcctgcagcggaacctggagcaggagcaacagcaacgagggatgggggggtagtggttaccccgggctgggcccctccaggagtcacagatgaggcccccgcagagactggtgacacgcttctgagcaggggcccctggggacttcaactgcccagcaacatggaggatggtgtcctgaggcctccaaggacggtccccacccctctacgtttccccaataaagccttttaaaaacctg

SEQ ID NO: 425588 - DNA, 4014 bp, Homo sapiens
  misc_feature (45)..(46): n is a, c, g, or t
aaggctaggtgagaggcctgcggtgaaatcggcgaggaggccgcnnctccgcggatcgggccgctcggccctcccatggaaggtgctcgggtcttcggggcactgggtcccatcggtccctcctcacctgggctcaccctcgggggtctggccgtgagcgagcaccggctcagcaacaagctgctggcttggagcggcgtcctcgagtggcaggaggtgagtctctgtggggctgcggctggcctccagggtcttgtcttgtccctgcggggacaggccagggcatctaggctgtgcacagtgacgcccctcctgcccccacagaagcgcagaccctactctgactccactgcaaagctgaagcggaccctgccctgccaagcctacgtgaaccaaggcgagaacctgtgagtgccggggcgtggcagccagggcggtggcaggggcagtggctgtggccgtggggatcagggcagccctttctgaccagctccttcccatagggagaccgaccagtggccgcagaagctgatcatgcagctgatccctcagcagctgctggtgagacccgcccctcccaccccatccactctgagcacccccatgcctggctgacccagctgtctgtcctgtcgcccccagaccaccctgggccccctgttccggaactcccagttggcacagttccacttcaccaacagagactgcgactcgctcaaggggctctgccgcatcatgggcaacggcttcgtgagtggggcgggctcccttgtagcactgtggtgacaagtacagctggaggcagcgctctgctcacacagtccaggcgggggtcggggggtctcccctggggccgagggtagccctcgtggcctctcggaccccatctggaaatgactgactccaggcaccctccgtagagcacagggtgaaggaactcagcctgagaggcctccagtttctgcatctgtgcccagcttcgaggtggccctgggggcgtgagtgcagggagggactggggccagccctgttggggcccaggagcctgtcggggacacatagcgtatggcagggacctggtaaatgggtgtgctaggcacaagagccagccaggagggagtggcacgttggggcttggtattctggtctgtaaaatgggctaacctccccgagtggcctgagctggccgtgagggagcagagctgagggtgctgaagcaggcgcggtgagtaggtcctcaggcctggctccaaggggacccaggtatccagccagtggctgtgcagggactgagtggggcaggcgcggccatgacctggacccggggggctgccaagggatctgagagcggcttccgcagcactccagggttgggctggttgaggggtagagatgacattttctgaggtagggaggacaggggagccgtgcttcctagggccaccgggaggctggagggagggaatttgtgtaaagcgcttgagatggtgactttagtacctagtgagtgctgggtgaacccagctggtgaggctgttcaggtgactgagattctggcgcagggcaggtcagaaagggggcttgggctgtgaaagatggcaggtgctggagaggaggcaggggtggggtgggagcgagttgtctgcccagaggacctggctctgggacattcccagtccctgttccctgttgggacagtctgcctctacccgtcccagctgccgttgagcgccctgggttccgctagggcctcccttctccctcaggagaccaggggcagaccagggcttgtgcctggcatgaggtctcttaagtgacccgttcccccttcacccagcaccgtttgttgagggcctgccatatctgggccccgagtacccagtctgtagggaaagtggacatccatactcaccccccaggcatggccctgggaggctgactgtgcatggctccagggaggccagggacagggccctgagcgggtgatccctgggctggacaccaaggttgagaagttaggccggcagcgtggaggggacagcactgtgggggtggcccggtgtggggaggggacatggggttttgggacggtcacaccacttcatctagacaccacagccaggcacatctgtcaggcttagttctcccatgcgccatcctcaagaggcaccagcactttatctgttgagcctttatgtggcaccaactgtgtgcactattacccggttttacagatgatggaggcccagaagcaggaggtggctggtgttaggtcacacagctaggaggcagcagaacggtggggcgctgcctgtgctcttaacccccaggccaagtcaccccatcaggcagtcaggagggctggcggcagggggtgatgtgggtgggaggtagtgccttcttggcattctcaccgcagcctgggtgccgggtgccactctgacctcagccatggcagggtcgggggatgccgatgggcgctgcacgggctctcagaggcccctcacctatggccatggccttgactgtgggggcctctgtccaccgatgatctcccttcatcccctacaggtggggcggtccagggtggtgggggcacagtggccccgggcagtgaccacagggtcctgacccgcggcccccgcaggcgggctgcatgctgttcccccacatctccccctgtgaggtgcgcgtgctcatgctcctgtactcgtccaagaagaagatcttcatgggcctcatcccctacgaccagagcggcttcgtcagtgccatccggcaggtcatcaccacccgcaagcaggtgtgccagccaagcacagcccctctggggacagagggggattagaccccactgccctggttgggcagccagacttggtgtgggcggagtgtgatgcgatggctggagcaaggagctgcaggggagcccggaggatgccgggcgggttcccaccagggctccatggaaaagcggccactgggcggctctgcagggctggagggtgggtcttggcgcggcggcagggaagccagcggagcggggagctgggcaggggttgggatcgtcctgcggctggaaggccctgcctggtaaccacgtgtcctggtcatgccttgccagttgaggcagactctgcaggtcctgtgcaccaggtgagggccgggacctgtctcaggccactggggagccatggggggctgtgagcagatgaggggcagggcctgttcccctgggactagagaatggacccagctggggctaacaggccaaggctcggagggagggatggcaggccccaggacagacagacaggtttcccaggagcctgggcccctcttcccaccccgttcccttccaacaggcagtgggacctggtggtgtcaactcaggcccagtccagatcgtcaacaacaagtttctggcatggagtggtgtcatggagtggcaggagcccaggcctgagcccaacagtcggtccaagaggtggctgccatcccacgtctacgtgaaccagggggagatcctgaggaccgagcagtggccaaggaagctgtacatgcagctcatcccgcagcagctgctgaccaccctagtgccgctgttccggaactcgcgcctggtccagttccacttcaccaaggacctggagacactgaagagcctgtgccggatcatggacaatggcttcgccggctgcgtgcacttttcctacaaagcatcgtgtgagatccgcgtgcttatgctcctgtactcttcagagaagaaaatcttcattggcctcatcccccatgaccagggcaactttgtcaacgatgggggggtagtggttaccccgggctgggcccctccaggagtcacagatgaggcccccgcagagactggtgacacgcttctgagcaggggcccctggggacttcaactgcccagcaacatggaggatggtgtcctgaggcctccaaggacggtccccacccctctacgtttccccaataaagccttttaaaaacctg

SEQ ID NO: 425589 - DNA, 2872 bp, Homo sapiens
  misc_feature (45)..(46): n is a, c, g, or t
aaggctaggtgagaggcctgcggtgaaatcggcgaggaggccgcnnctccgcggatcgggccgctcggccctcccatggaaggtgctcgggtcttcggggcactgggtcccatcggtccctcctcacctgggctcaccctcgggggtctggccgtgagcgagcaccggctcagcaacaagctgctggcttggagcggcgtcctcgagtggcaggaggtgagtctctgtggggctgcggctggcctccagggtcttgtcttgtccctgcggggacaggccagggcatctaggctgtgcacagtgacgcccctcctgcccccacagaagcgcagaccctactctgactccactgcaaagctgaagcggaccctgccctgccaagcctacgtgaaccaaggcgagaacctgtgagtgccggggcgtggcagccagggcggtggcaggggcagtggctgtggccgtggggatcagggcagccctttctgaccagctccttcccatagggagaccgaccagtggccgcagaagctgatcatgcagctgatccctcagcagctgctggtgagacccgcccctcccaccccatccactctgagcacccccatgcctggctgacccagctgtctgtcctgtcgcccccagaccaccctgggccccctgttccggaactcccagttggcacagttccacttcaccaacagagactgcgactcgctcaaggggctctgccgcatcatgggcaacggcttcgtgagtggggcgggctcccttgtagcactgtggtgacaagtacagctggaggcagcgctctgctcacacagtccaggcgggggtcggggggtctcccctggggccgagggtagccctcgtggcctctcggaccccatctggaaatgactgactccaggcaccctccgtagagcacagggtgaaggaactcagcctgagaggcctccagtttctgcatctgtgcccagcttcgaggtggccctgggggcgtgagtgcagggagggactggggccagccctgttggggcccaggagcctgtcggggacacatagcgtatggcagggacctggtaaatgggtgtgctaggcacaagagccagccaggagggagtggcacgttggggcttggtattctggtctgtaaaatgggctaacctccccgagtggcctgagctggccgtgagggagcagagctgagggtgctgaagcaggcgcggtgagtaggtcctcaggcctggctccaaggggacccaggtatccagccagtggctgtgcagggactgagtggggcaggcgcggccatgacctggacccggggggctgccaagggatctgagagcggcttccgcagcactccagggttgggctggttgaggggtagagatgacattttctgaggtagggaggacaggggagccgtgcttcctagggccaccgggaggctggagggagggaatttgtgtaaagcgcttgagatggtgactttagtacctagtgagtgctgggtgaacccagctggtgaggctgttcaggtgactgagattctggcgcagggcaggtcagaaagggggcttgggctgtgaaagatggcaggtgctggagaggaggcaggggtggggtgggagcgagttgtctgcccagaggacctggctctgggacattcccagtccctgttccctgttgggacagtctgcctctacccgtcccagctgccgttgagcgccctgggttccgctagggcctcccttctccctcaggagaccaggggcagaccagggcttgtgcctggcatgaggtctcttaagtgacccgttcccccttcacccagcaccgtttgttgagggcctgccatatctgggccccgagtacccagtctgtagggaaagtggacatccatactcaccccccaggcatggccctgggaggctgactgtgcatggctccagggaggccagggacagggccctgagcgggtgatccctgggctggacaccaaggttgagaagttaggccggcagcgtggaggggacagcactgtgggggtggcccggtgtggggaggggacatggggttttgggacggtcacaccacttcatctagacaccacagccaggcacatctgtcaggcttagttctcccatgcgccatcctcaagaggcaccagcactttatctgttgagcctttatgtggcaccaactgtgtgcactattacccggttttacagatgatggaggcccagaagcaggaggtggctggtgttaggtcacacagctaggaggcagcagaacggtggggcgctgcctgtgctcttaacccccaggccaagtcaccccatcaggcagtcaggagggctggcggcagggggtgatgtgggtgggaggtagtgccttcttggcattctcaccgcagcctgggtgccgggtgccactctgacctcagccatggcagggtcgggggatgccgatgggcgctgcacgggctctcagaggcccctcacctatggccatggccttgactgtgggggcctctgtccaccgatgatctcccttcatcccctacaggtgggccatacttgggtaatatcccgaaactaccttaaaattaccttcgactcagtctgagtaaactgtccacgaagctgttcgtgggtggggggggcctgggtgtaggtgcttttacatgaaagcaatttcaagcattccctcaggggccgggtgcggtggctcacgcctgcaatcccagcactttgggaggccgaggcgggtggatcacctgaggtcaggagtttgagaccagcctggccaacatggtgaaaccccgtctctactaaaaatacaaaaattagccaggcatgatggccac

SEQ ID NO: 425590 - DNA, 425 bp, Homo sapiens
atgacgtttcctgaggtagggaggacaggggagtctcagtttggtcctgggcccgggggactcagcgggctgggagccgggaggccgtggtgggagaagccagagctgggggtcccctcgcttccccgcagaccaccctagtgccgctgttccggaactcgcgcctggtccagttccacttcaccaaggacctggagacactgaagagcctgtgccggatcatggacaatggcttcgtgagtggtgccagcagacgcaggggaggggccggccagggcagagcgagcccggaccgctcacgggggcggacatgggagaggaacagagcaccatgtcccagaccagctggggagagagggtggctagtgtgggcgtgacttctgggggctctgtgctgtccccacggcactggatggggcactgac

SEQ ID NO: 425591 - DNA, 3133 bp, Homo sapiens
  misc_feature (45)..(46): n is a, c, g, or t
aaggctaggtgagaggcctgcggtgaaatcggcgaggaggccgcnnctccgcggatcgggccgctcggccctcccatggaaggtgctcgggtcttcggggcactgggtcccatcggtccctcctcacctgggctcaccctcgggggtctggccgtgagcgagcaccggctcagcaacaagctgctggcttggagcggcgtcctcgagtggcaggaggtgagtctctgtggggctgcggctggcctccagggtcttgtcttgtccctgcggggacaggccagggcatctaggctgtgcacagtgacgcccctcctgcccccacagaagcgcagaccctactctgactccactgcaaagctgaagcggaccctgccctgccaagcctacgtgaaccaaggcgagaacctgtgagtgccggggcgtggcagccagggcggtggcaggggcagtggctgtggccgtggggatcagggcagccctttctgaccagctccttcccatagggagaccgaccagtggccgcagaagctgatcatgcagctgatccctcagcagctgctggtgagacccgcccctcccaccccatccactctgagcacccccatgcctggctgacccagctgtctgtcctgtcgcccccagaccaccctgggccccctgttccggaactcccagttggcacagttccacttcaccaacagagactgcgactcgctcaaggggctctgccgcatcatgggcaacggcttcgtgagtggggcgggctcccttgtagcactgtggtgacaagtacagctggaggcagcgctctgctcacacagtccaggcgggggtcggggggtctcccctggggccgagggtagccctcgtggcctctcggaccccatctggaaatgactgactccaggcaccctccgtagagcacagggtgaaggaactcagcctgagaggcctccagtttctgcatctgtgcccagcttcgaggtggccctgggggcgtgagtgcagggagggactggggccagccctgttggggcccaggagcctgtcggggacacatagcgtatggcagggacctggtaaatgggtgtgctaggcacaagagccagccaggagggagtggcacgttggggcttggtattctggtctgtaaaatgggctaacctccccgagtggcctgagctggccgtgagggagcagagctgagggtgctgaagcaggcgcggtgagtaggtcctcaggcctggctccaaggggacccaggtatccagccagtggctgtgcagggactgagtggggcaggcgcggccatgacctggacccggggggctgccaagggatctgagagcggcttccgcagcactccagggttgggctggttgaggggtagagatgacattttctgaggtagggaggacaggggagccgtgcttcctagggccaccgggaggctggagggagggaatttgtgtaaagcgcttgagatggtgactttagtacctagtgagtgctgggtgaacccagctggtgaggctgttcaggtgactgagattctggcgcagggcaggtcagaaagggggcttgggctgtgaaagatggcaggtgctggagaggaggcaggggtggggtgggagcgagttgtctgcccagaggacctggctctgggacattcccagtccctgttccctgttgggacagtctgcctctacccgtcccagctgccgttgagcgccctgggttccgctagggcctcccttctccctcaggagaccaggggcagaccagggcttgtgcctggcatgaggtctcttaagtgacccgttcccccttcacccagcaccgtttgttgagggcctgccatatctgggccccgagtacccagtctgtagggaaagtggacatccatactcaccccccaggcatggccctgggaggctgactgtgcatggctccagggaggccagggacagggccctgagcgggtgatccctgggctggacaccaaggttgagaagttaggccggcagcgtggaggggacagcactgtgggggtggcccggtgtggggaggggacatggggttttgggacggtcacaccacttcatctagacaccacagccaggcacatctgtcaggcttagttctcccatgcgccatcctcaagaggcaccagcactttatctgttgagcctttatgtggcaccaactgtgtgcactattacccggttttacagatgatggaggcccagaagcaggaggtggctggtgttaggtcacacagctaggaggcagcagaacggtggggcgctgcctgtgctcttaacccccaggccaagtcaccccatcaggcagtcaggagggctggcggcagggggtgatgtgggtgggaggtagtgccttcttggcattctcaccgcagcctgggtgccgggtgccactctgacctcagccatggcagggtcgggggatgccgatgggcgctgcacgggctctcagaggcccctcacctatggccatggccttgactgtgggggcctctgtccaccgatgatctcccttcatcccctacaggtggggcggtccagggtggtgggggcacagtggccccgggcagtgaccacagggtcctgacccgcggcccccgcaggcgggctgcatgctgttcccccacatctccccctgtgaggtgcgcgtgctcatgctcctgtactcgtccaagaagaagatcttcatgggcctcatcccctacgaccagagcggcttcgtcagtgccatccggcaggtcatcaccacccgcaagcaggtgtgccagccaagcacagcccctctggggacagagggggattagaccccactgccctggttgggcagccagacttggtgtgggcggagtgtgatgcgatggctggagcaaggagctgcaggggagcccggaggatgccgggcgggttcccaccagggtgggcccctccaggagtcacagatgaggcccccgcagagactggtgacacgcttctgagcaggggcccctggggacttcaactgcccagcaacatggaggatggtgtcctgaggcctccaaggacggtccccacccctctacgtttccccaataaagccttttaaaaacctg

SEQ ID NO: 425592 - DNA, 1719 bp, Homo sapiens
  misc_feature (45)..(46): n is a, c, g, or t
aaggctaggtgagaggcctgcggtgaaatcggcgaggaggccgcnnctccgcggatcgggccgctcggccctcccatggaaggtgctcgggtcttcggggcactgggtcccatcggtccctcctcacctgggctcaccctcgggggtctggccgtgagcgagcaccggctcagcaacaagctgctggcttggagcggcgtcctcgagtggcaggaggtgagtctctgtggggctgcggctggcctccagggtcttgtcttgtccctgcggggacaggccagggcatctaggctgtgcacagtgacgcccctcctgcccccacagaagcgcagaccctactctgactccactgcaaagctgaagcggaccctgccctgccaagcctacgtgaaccaaggcgagaacctgtgagtgccggggcgtggcagccagggcggtggcaggggcagtggctgtggccgtggggatcagggcagccctttctgaccagctccttcccatagggagaccgaccagtggccgcagaagctgatcatgcagctgatccctcagcagctgctggtgagacccgcccctcccaccccatccactctgagcacccccatgcctggctgacccagctgtctgtcctgtcgcccccagaccaccctgggccccctgttccggaactcccagttggcacagttccacttcaccaacagagactgcgactcgctcaaggggctctgccgcatcatgggcaacggcttcgtgagtggggcgggctcccttgtagcactgtggtgacaagtacagctggaggcagcgctctgctcacacagtccaggcgggggtcggggggtctcccctggggccgagggtagccctcgtggcctctcggaccccatctggaaatgactgactccaggcaccctccgtagagcacagggtgaaggaactcagcctgagaggcctccagtttctgcatctgtgcccagcttcgaggtggccctgggggcgtgagtgcagggagggactggggccagccctgttggggcccaggagcctgtcggggacacatagcgtatggcagggacctggtaaatgggtgtgctaggcacaagagccagccaggagggagtggcacgttggggcttggtattctggtctgtaaaatgggctaacctccccgagtggcctgagctggccgtgagggagcagagctgagggtgctgaagcaggcgcggtgagtagctcctcaggcttggcttcaaggggtcccaggcagccagctggtggctgtgcagggactgagcggggcaggggcagccacgacctgcacctggggggctgccaagggatctgagagcggcttccacagcactccagggttgggctggttgagcggtggagatgacgtttcctgaggtagggaggacaggggagtctcagtttggtcctgggcccgggggactcagcgggctgggagccgggaggccgtggtgggagaagccagagctgggggtcccctcgcttccccgcagaccaccctagtgccgctgttccggaactcgcgcctggtccagttccacttcaccaaggacctggagaccctggttctgcgggggcctgctcctcctctgccacatcagggctgactcagcaccaactccgcgctctccactcctcagggacaggcgcccttgtcactcctggtttcccgggagcttgtgccacatc

SEQ ID NO: 425593 - DNA, 2380 bp, Homo sapiens
taaagcttgaacacaggaacactacaactgccagatgctgaggagaatcaggaaagcaatgagctagactctttttttagtcaattaagtgggttgttttagatgtatagagtattgatatgagttaacactttttagtagatggcaaagtgggcttgatgttcaaaagtaatgttcgagttagggttcatggtccctttctcagtaattttttcttaataaaagtaaacactggttcaaagacaaatagcaagtattccctcctgtgctatttatagagggctcaattcgtagaaaggcataccctccaatgcaattctgtggctgtcccttacagtggtttcagaatcacgaaaaaacagctagtaaataggatagaaacaataaaagaaagagtttagaagttccctgtgagcaatctgtgtgtcttcagcgagcttgaaccaaagtcttcatatcctgacccactgaattataagcaattgctacttgcccatcttgccaaagtagtccaaacacacttcaatgaggacagttatatttagcaggtcctcacccctgcaagagacagcatatcctcactattattattcatgtgttattggcaaaaacatagcttgcatctttccagaggcagagtttcaaagacagggttttctttgagacataagcacattgcttaagtacataacaaggttattaacacttgcactcaggggaaaggaaatagctattgcaaattaatgtgtgcaacttaataaaataagctgtttgtgtatatgaatttagctctaggtaagcaaaatgcacacatcatataaaaataaattgcaatgatcagaccaagtggctgtgctggacatcaaagaaaagacatgctgttgccatcaggagaactctttcttatatgcgatagccaagatatcttctttaatatgaaaaaagttaatttctgaatttcaaaaagagtaagattagctaattggtcttcctaatttttatgcctttagagtttttagtctattcaagtagaagagtccagcgaggccaaagaagggttacggtgttcaagttctggttgttggagtttttagcccagagtgacatactgaaatcagtaaataattattttataatgacacagcacaactgccttgttatgaatttttcttaaatgcatatatactgtatttaaaattaaaatatagataccaatttaccaaagatacatattactaattctaagcaaaactaaaaaaaaaacccaactcatcataatttaagaatcaaaatgtagttgtcttaagaatttagtggttatactggaaatgcattttcaactcctatgttctaaagtttatgttcaaatggtgccagtgaatttttatatgaagggaaaatgcctgctttttttttttttttaaccagatgtaatttcacttaaccctttgcgctttcccttagttgtcatttaacatacaatactggctttacttatctctagaaaagaagaaggcatgctacaaataggaaggaattgtaataatgatatttggcctctactttgtcttagctgttaaactgtttttagtatttttgttaaatatttgcaaagggaagcattttctacagaggataattaatttcaagaaaaatatcttgagttttaagaaataaacatctccagaaaaggagaaagtcgattttataaaatgtcgcaactctccaacatttggggtagtgactccttttttgttaggacatttgaaactagcaagcagccattgtttctaaagaattctggcttcacattgactcatgtttctttcactccattttgaaatagctaaaaatcattaaaactgtaaatattttgttgcttgggtaagcatcttctgggaactttgtatctatggtatataatcatagaattttatattttcatataaagctaatttttttctagtttcaactccgtcatagttttttttcctttttgtggtggatatgtgaattcaactttctgtgtattgaagtagcaaaaaccatctttacattccaaaagaatccaacatgtgttatttctttgaggcagtgattgtgaaagttgggttttctttttaattccattgaccatttgtgcaataggaattagacataattagtcactgaaaacattcgtcacattgacccatttggaaaaagtgtgctttttttttttttttaaatttgttcagggggaggggttttgtaacctgaaatttttccctttttcttctgtttaaactatatcaaatcattctattatagtgttatttaatatgtaaattgtattgctatacataaaataaagtatggtttttgatgtaaaaaaaaaaaa

SEQ ID NO: 425594 - DNA, 855 bp, Homo sapiens
taaagcttgaacacaggaacactacaactgccagatgctgaggagaatcaggaaagcaatgagctagactctttttttagtcaattaagtgggttgttttagatgtatagagtattgatatgagttaacactttttagtagatggcaaagtgggcttgatgttcaaaagtaatgttcgagttagggttcatggtccctttctcagtaattttttcttaataaaagtaaacactggttcaaagacaaatagcaagtattccctcctgtgctatttatagagggctcaattcgtagaaaggcataccctccaatgcaattctgtggctgtcccttacagtggtttcagaatcacgaaaaaacagctagtaaataggatagaaacaataaaagaaagagtttagaagttccctgtgagcaatctgtgtgtcttcagcgagcttgaaccaaagtcttcatatcctgacccactgaattataagcaattgctacttgcccatcttgccaaagtagtccaaacacacttcaatgaggacagttatatttagcaggtcctcacccctgcaagagacagcatatcctcactattattattcatgtgttattggcaaaaacatagcttgcatctttccagaggcagagtttcaaagacagggttttctttgagacataagcacattgcttaagtacataacaaggtcataacctggcctccgggaacggactactttggcagtaatggtggacttcaaaaaagcgtgcggtataactagactgggtcacatgccacccttaatttgcggtacaccatgtcggggtccaacaagttgccccaccatttaccactattctcgtcgt

SEQ ID NO: 425595 - DNA, 2104 bp, Homo sapiens
agggagtaaggaataaaagatatagaatagtaatctagttgaactgttctgcacaaaacatgcttccttttcaaagaatagacttcaaaagggacgaacaaacattaggtcaccttttgtgtttataatgaattgttgacgtttccatgctgtggtctcttgatatacggaagtagacgtaacttattttccagcgaaattatatacttcttctgggctcctttgctcagttgccccaggaaggcttccctgtgagtaatgcttatggaatctgacaaatgtgaatgagctgccattggtgggaatcagtaaactttgaaaacctttcactgatgattccctggtaagtgctcctgtgaggggccacttccctagtatgtgagagagaccctctgcaagccgctgtggggacttagcttcctgatactaggtagtgatggtggatctagagacattcacttgaagagcaaggattggggtggggtgggttggtgaatctatctcaggccactgcactgcaaggtgcatttctgtcatttctgcaacaccatgagacctgagcaagaatgtgctgtggcagagggggtcttggtttcataaatgggtatatacagcctgaactcaggaggcagaaatcaaaagaaatccttgagggctggaacctgaggatagagcgaaaatggagagaagggtgttcaaggtcaggagtgatttttgcatttggtggaaaacctcaagtcagactcagtggcagaacatgcagcagaaaagctgtgaaggaaggaaatttacgtgattgtaatggaggctaggggtggattgggaggtgagtggaggagagtctctgaccagctgcagagccaacccctatcattttattaacatggaacccacacagataggggagggattaagctaagaacttacagaatgcaaacacgagcacactctcttcgaacccaattgtgggtgtagcaatgaaagcaatatgatatgctgcagtgtgaagctccttctggggttatcgtatgtacaaagtttaccttataatggctcaaattgtatttaatttttttgttttgtttataaatgaagaaaagctataagtataatgtaattattttataggtatactattaaattatagaacaaataaagataatctaggattatatgtgatcccggtgtgacgtgccataaaagtggaatttttgacttgttgcagtgagctgtgaagcagcactatgcgttcagagagtttttgttcaaccatggtgagttcaacctctagcttatgtcacatgatctcctttggggtctggaatcttctaagagaaatagaatcaggcatccaaggagcagaagtgatggaggtggccctcaatcctggtctttggaagcttccaagcctcttccacatcccctgccagctgaagacagagtattctcactgtgctggctgaaggagaaacactaaacaaggaaaccttgagaaactgcagcaatggaagtccactgttagtctctccgttagcaccagggacacacttgttctgagttttgttcattttcacatttactcctcatgagttccaacatttcttaatttaaatatttcttagtttatagcatctccatttttctattaattgacttaatctgccatttaagaaaactccgtaatcaataaaaaataaaatccacaatcaaactgcacatggttgatccactgtgtaggcttcaaaggaattaaactcaacttcctaggaaataattcatcttagtttattaaatgggacagaatatttcactgctaacgtattctaactcacttgtttttgaaattggccagatgatttttaagttataaagtcaatgaaaatgacttttgctattgtgtgaacaacttagaatgtatatattcccagaaggcttatttaatgattgacctatcaccactgattattaatgtctgcatgaatgataacaataagaccaagtcatcaataatgcaatgaaaattttttaagtgaaagcaagtttattaagaaagtaaaggaataaagaatgcctacttcataggcagagcagcctaaaaaaaaaa

SEQ ID NO: 425596 - DNA, 1034 bp, Homo sapiens
tatgacgcacccacgcgtccggaagaaaagctataagtataatgtaattattttataggtatactattaaattatagaacaaataaagataatctaggattatatgtgatcccggtgtgacgtgccataaaagtggaatttttgacttgttgcagtgagctgtgaagcagcactatgcgttcagagagtttttgttcaaccatggtgagttcaacctctagcttatgtcacatgatctcctttggggtctggaatcttctaagagaaatagaatcaggcatccaaggagcagaagtgatggaggtggccctcaatcctggtctttggaagcttccaagcctcttccacatcccctgccagctgaagacagagtattctcactgtgctggctgaaggagaaacactaaacaaggaaaccttgagaaactgcagcaatggaagtccactgttagtctctccgttagcaccagggacacacttgttctgagttttgttcattttcacatttactcctcatgagttccaacatttcttaatttaaatatttcttagtttatagcatctccatttttctattaattgacttaatctgccatttaagaaaactccgtaatcaataaaaaataaaatccacaatcaaactgcacatggttgatccactgtgtaggcttcaaaggaattaaactcaacttcctaggaaataattcatcttagtttattaaatgggacagaatatttcactgctaacgtattctaactcacttgtttttgaaattggccagatgatttttaagttataaagtcaatgaaaatgacttttgctattgtgtgaacaacttagaatgtatatattcccagaaggcttatttaatgattgacctatcaccactgattattaatgtctgcatgaatgataacaataagaccaagtcatcaataatgcaatgaaaattttttaagtgaaagcaagtttattaagaaagtaaaggaataaagaatgcctacttcataggcagagcagcctaaaaaaaaaa

SEQ ID NO: 425597 - DNA, 6490 bp, Homo sapiens
tgcgagcccagcgtcaagtgattccggcctcctcgagacagcggtggtgggatgaggctctgccgaggggactggctgtgaaggatgagttcagggtgggatgacggaccgcttctgggaccagtggtatctctggtatctccgcttgctccggctgctggatcgaggggtcttttcggaatgatggtttgaaagcttctgatgtccttcctatcctaaaggaaaaggtggccttcgtgtctggtgaggggtcgtgataagcgaggcggacccatcctgaccttccctgctcgcagcaatcatgacagaataagacaggaagacctgcggaaactcgtgacgtatttggccagcgtgccaagtgaggacgtgtgcaaacgtggcttcactgtcatcatcgacatgcggggctccaagtgggacctcatcaagcccctcctcaaaacgctgcaggaagcctttccagctgagatccatgtggccctcatcattaaacccgacaacttctggcagaaacagaagaccaactttggcagctccaaattcatctttgagacgagcatggtatctgtggagggcctcacaaagctggtggacccctcccagctgacggaggagtttgatggctccctggactacaaccatgaggagtggatcgaactgcggctctccctggaggagttcttcaacagcgccgtgcacctgctctcgcgcctcgaggacctccaggagatgctagcccggaaggagtttcctgtggatgtggagggctctcggcggctcattgacgaacacacacagctcaagaaaaaggtgctgaaggcccctgtggaggagctggaccgggaggggcagcggctgctgcagtgcatccgctgcagcgacggcttctcaggacgcaactgcatcccgggcagtgctgacttccagagcctggtgcccaagatcaccagtctcctggacaagctgcactccacccggcagcacctgcaccagatgtggcacgtgcgcaagctcaagctggaccagtgctttcagctgcggctcttcgagcaggatgctgagaagatgtttgactggataagccacaacaaggagttattcctccagagccacacggagatcggagtcagctaccagtacgcccttgacctccagacgcagcacaatcactttgccatgaactccatgaatgcctatgtcaacatcaaccgcatcatgtccgtggcttcccgcctctctgaggccggtcattatgcctcacaacaaatcaagcagatctccacccagctggaccaggagtggaagagctttgctgctgccctggatgaacgcagcaccatcctcgccatgtctgctgtgttccaccagaaggctgagcagttcctgtcgggagtggatgcctggtgcaagatgtgcagtgaaggtggtctgccatccgagatgcaagacctagagctggcaatccaccaccaccagaccttgtatgagcaggtgacccaagcctacacagaggtcagccaggatggcaaagcactacttgatgtgctgcagcggcccctgagccctgggaactccgaatccctcacggccacagccaactactccaaggcagtgcaccaggtgctggacgtggtgcatgaggtgttacatcaccagcgacggctggagagcatctggcagcaccgcaaggtgcggctccaccagcggctgcagctctgcgtcttccagcaggatgtacagcaggtgttggactggattgaaaaccatggtgaggcctttctcagcaaacacactggagttgggaagtccctacatcgagcccgggccctgcagaagaggcatgatgactttgaagaggtggctcagaatacgtacaccaatgcggacaagctcctagaagcagcagagcagttggctcagacgggggaatgtgaccccgaggagatctacaaggcagctcgacacctggaggtgcgcatccaagacttcgtgcgcagggtggagcagcggaagcttctcctggacatgtctgtttccttccacacacacaccaaagagttgtggacatggatggaagaccttcagaaggagatgttggaggatgtctgtgcagattctgtggatgcagtccaggaactgatcaagcagttccagcagcagcagaccgccactctagatgccacactcaatgtcatcaaggaaggcgaagaccttatccagcagctcaggtcagcgcctccctccctcggggagcccagcgaggggactcggctgtgtccaacaacaaaacaccccacagcagctccatcagccacatcgagtcggtcctgcagcagcttgatgatgcccaggtgcagatggaggagctgttccacgagcggaagatcaagctggacatcttcctgcaactgcgcatctttgagcagtacaccatcgaggtgacagcagagctagacgcctggaatgaagacttgcttcggcagatgaatgacttcaacacagaggacctaaccctggcagaacagcggctgcagcgccacacagaacggaagctagccatgaacaacatgacctttgaggttatccagcagggacaggatctgcaccagtacatcacggaggtccaggcatcaggaattgagttgatctgtgaaaaagacattgatctggcagcccaggtgcaagagttattggaatttctccatgagaagcagcatgaattggagctcaatgcagagcagactcataagcggctagagcagtgcctccaattacgtcacctccaggctgaagtcaaacaggttctgggatggatccgcaatggagagtcaatgctcaacgccagcctggtcaatgccagctctttgtcggaagcagagcagctgcagcgggagcacgagcagttccaactggccatcgagtccctctttcatgccacttccttgcagaagacgcaccagagtgccctgcaggtacagcagaaagccgaggtgctgctccaggccggccactacgatgccgatgccatccgggaatgtgctgagaaggtggccctccactggcagcagctcatgctgaagatggaagaccggctaaaattggtcaatgcctctgtggccttttacaaaacttctgaacaggtgtgtagtgtcctggagagcttagagcaagaataccggagagatgaggactggtgtggtggacgagataagctggggccagcagcagagatcgaccatgtcattcccctcatcagcaaacatttggaacaaaaggaggcctttcttaaggcctgcaccctggctcggcggaatgctgaggtgtttctcaagtacatccacaggaacaacgtcagcatgcccagtgtcgccagccacactcggggacccgagcaacaagtgaaagccatcctgagtgagctcctgcagagggagaatcgcgtgctgcatttctggaccttgaagaagcggcggttagaccaatgccagcaatatgtggtgttcgagcgcagcgctaagcaggcgcttgactggatccaagaaacaggtgaattttacctctcaacacatacctccactggagagaccacagaggagactcaggaactgctgaaagaatatggggaattcagggtgcctgccaagcaaacaaaggagaaggtgaagcttctgattcagctggccgatagctttgtggaaaaaggccacattcatgccacggagataaggaaatgggtgaccacggtggacaagcactacagagatttctccctgaggatgggaaagtaccgatactcactggagaaagccctaggagtcaacacagaggataataaggacctggagctggatattatcccagcaagcctttcggatcgggaggtcaagctgcgggacgccaaccacgaagtcaatgaagagaagcggaagtcagcccggaagaaagaatttattatggctgaactactccagacagagaaggcttatgtaagggatttgcatgagtgcttagagacctacctgtgggaaatgaccagtggtgtggaggagatcccccctgggatcctcaataaagagcatatcatctttggcaacatccaagagatctacgatttccataacaacatcttcctcaaagagctggagaagtacgagcaactgcctgaggatgtgggacactgctttgttacctgggcagacaaatttcagatgtatgtcacctactgtaaaaacaagcctgattccaaccagcttatcctggagcatgcgggcaccttctttgatgagatacaacagcggcatggtctggccaactccatctcttcctacctaattaagcctgtccaaaggatcaccaaatatcaactgctcctgaaggaacttttaacttgctgtgaagaagggaaaggggagctcaaggatggcctggaggtgatgctcagtgtcccaaagaaagccaatgatgccatgcatgtcagcatgctggaagggttcgacgagaacctggatgtgcagggggagttgattctccaggatgcctttcaagtgtgggacccgaagtcgctgatccggaaggggcgggagcggcacttgttcctctttgagatctccttggtttttagcaaggagatcaaagattcttcaggacacacgaaatatgtttacaagaacaagctactgacctcagagctgggtgtgaccgagcacgtggagggcgatccctgcaaattcgccttgtggtctgggcgcaccccatcctcagacaataaaacagtgctgaaagcctccaacattgaaaccaagcaggagtggatcaagaacattcgagaagtgattcaagaaaggatcattcacctgaaaggagctttaaaggagccacttcagctccccaaaacaccagccaaacagaggaacaatagtaagagggatggagtggaggatattgacagccagggggatgggagcagccaaccagacaccatctccattgcttctaggacctctcagaacacagtggacagtgacaaggatggcaaccttgttcctcggtggcacctgggacctggagatcctttctccacttacgtttagcgcgcatcctgggacttgtccctgcagctcaccgggttagccgtggcaccgttgggacctcccaccaggactccaatcacccacctctcttgagacttctctggcagggctggtgtggggtgcagcctttgctcagagggcaacatgttccaagcaaaatctccccgcctgggccatgggctcaccctcggggctcccttcttctctactgggtgcaattcgaggttgctgagcttctctccaaagtctaaaatggtggggcagtagggacctgtgagaggcccaatggcccaatgtacttcccccagatcccactcagaacagcaggtacgcccaggctcctgctgccctagaggtctgcaacatgagtgaagaggttaattagagggacacacttatctctgaagtttttctccaggctgaacatttctattatcagtggcccctaatctggaaaaacccatcattctaatctagcttgtatccccacatcatgagaaagagggaagaagaagaagggatgatgtgtggtagagaagatgagggttaactttagcctttcccaaacactggcaacaaccacttcctcaacaatttttctatttgcttcagcctactcagattttttcaggtttttctagctcctccataacctcactccctcccgaggtctctggttcaaagaccaccctaccagcccctatttgcttcaggttatcctgttgagggtgggtgggaagagtgagaagatataaatgaaaaactggccacatgttgataattgttgaaactagatgatggtacgtggacattcattataccattctccccacttctgtatttgtttgcaatttttcataataaaaaagttttaaaagtcctccagtttccaacacactcaagagagagccccaaccccaaacacagagtttcatggaaaccccacaccaaggcaagaggcagagatgatgattccatttcatatatacactcattttctaactttttttaaaggcccactgctttattttcaatagattaaacctgatttctgagaggtcctgaagttgggcttatttccctggctgggttatgggggagggcagggtaaagggatccttaaaaaagtttacacttctatgtatctcacaatcttattgtgaggatgtgacttgttcagtgttctgaacttttcgaaggaatcgtgctctcaatgcaaagtgtcattctctggaattgcacctggctcaggaaaggactgtctttgtacttgaatttaaatccaatggagaactttaacacgggcatttgcatgactgagaattgctgctgtcttttttccgtatgtcactttcttgaatgtgttctaataaaatgattctaaagcaggctgttga

SEQ ID NO: 425598 - DNA, 3470 bp, Homo sapiens
  misc_feature (1996)..(1997): n is a, c, g, or t
  misc_feature (1999)..(2002): n is a, c, g, or t
  misc_feature (2074)..(2074): n is a, c, g, or t
  misc_feature (2088)..(2088): n is a, c, g, or t
  misc_feature (2242)..(2242): n is a, c, g, or t
ttggaattggagtctccatgaaccagtggtgacttccagagctctgctccttctagattccttcagagttcttgagcctcctaaaaagtataaggaggagccaggtgccatggctcatgcctgtaatcctagcactttgggaggccaaggtgggcagattgcttgagcccagtagtttgagaccagcctgggcaacatagtgagacctcatgtttacaaaaaatgcacaaagttacctgggtgtggcggtgggcacctgtagtcccagctactcaggaggctgagatggaaggactgcttgagcctgggaggtggagactgcggtgagctatgatcatgccactgcactgcagcctaggcaacagagtgagactctgtctcaaaaaagaaaaaaaaaaaagcaaaagaaaatatggaaggaaggagggtatgccttctccattgtcttggattccatacacctgctgggacaggggcctcacagctttgtctttcgcaggcctgcaccctggctcggcggaatgctgaggtgtttctcaagtacatccacaggaacaacgtcagcatgcccagtgtcgccagccacactcggggacccgagcaacaagtgaaaggtcagtgagagacctgcccagccaccagtcacttcagcgacagcccctccctgaaatataccatgtacccagttttcacacaatctcaaatttcctgctgcttctccttagaaatgaaaatgtatgatgtgggatggtgtgggcagtaatgattcatggtcaatttttaaacacgcatcaagatctggaaggcaaaaacaaggataaaatttccccaagtattttcatttatcttagagtctggacagcactgcctagtggaattttctgaaataatggaaattgcctgtatctacgctgtgcaatacagcagctactgagctagtgcaactaaggaactaaattttaacttgtatttaatattaactaatttaaatgtaaattactgattttgattcctggttaatatattgaacagcacaagactagggtgtcttatagcctaggaacagaatgtggactgagaatcctaaaaccaaatgctgaccctggatttgtcactgattgattaagccttttaaaactttagtttcttatttaaaatgaggggagcatctagactcttgctcctcaaattgtagttcccagaccagccacaatgacatccctaggagagtgtatgaaatatagaatctcaggccacacccaaaccgactgagtcagaaactgcattttggcactttgggaggctgagatgggagggttgcttgaggccaggagttcaagaccagcctgggcaacatattgagaccccatctctacaaaaaattaaaaaattagcctggtatggtggcgtgcctatagctctagttattcaggaggccgagatggaaggctcatttgagcccaagagctggaggctgcagtgagccatgtttgcaccattgtactccagcctgggcaatagagtgagacgctgtctcaaaaaaagaaaaaagaaaagaaaaaaaagaaaaaaagaacaaagaacctgcattttggcaaaactgcccaattctaccaaccaggtaatttgtgtgttcataaaatttagataagtgctattctacataatctttaatatctccgaattctagaaagtctatgataataaatatataacttttaaaaattgcctattatctgaccatgtgaaacttaaatcattatctgtggaattattctgaccatgcagaaattagcctttgagtgagtgaagagtttaacaaatgtcatcttgccaaggcagagaaatataactctggagtccgaggctaggaatggaacccaagccgacttggagtgaggagtggggtatgggcttggagacaccatggacagggtagggtgcgtggtctgcttaagaagagcttccctctttgctcagatagctcaagagttgnngnnnncagagaccactggaaagaatggaatcaaagttccctacagagaggagggagcagagtttctcttccaaatgngctattctatttgnggtcaggggacctgtggggagctggtattatgtcacttcttccagcacatttgaaagcatatgttctggcttccaaatgtagatgggagcttgggtgaggccagctgcctactgagagaccacatatcccacctacacctctgcgtgctgaagnataacaggcacccagagacagtgggaaatgcctacatcttcttggaggcaagaccaagttgttgcccatgtaaaagctttcaggaagaggggggaaaataatcctgaaactctttatgatttctgccagatctgggttgattccctcagtcacaccatagagggagggagcttcaatgagcaaaactctggctagggaacataaagactaaaagaaatgggtttctactccttccttgcccaattgaagcttccacctgagcagggacctacaatcccttatatatcagtttccttttcacctactacctagactcaaagccagtgccatatatttttggcttttttatgctgctggttgttatatggctgcataacaaccaagaaattcaatgatatccaactgtaaacatatgttgttgaagtggctgtgcattggctgaggagcagcatctcaactgggctcagcagtgcagttgtgcttcagtctgcaagtctagctagcttggctccttcactccaggtaagagcttgtttgctccacgtgtatttattctgggacctgggtcgaaggggcagcagttacccaggagaatttcctatagtggtgatagcagaggtacaaggagcaaagtcaagtctgcaagtacatttcaaggccctgcttgtgttttatctgttaacaactcatttgctaaagcaagttatgtagctaagccagagatcagttggggagtgagcaactgtacttgcctctttgggaaggaatgaaaaagttacatgataaaggcttagatacagggaagggtgaatgattggacccaaaaaaggctgagcacggtggctcgcgcctgtaatcctagcactttgggagaccgaggaaggaggatcacttgagctcagaagtttgagaccagcctgggcaacatagtgagacccccatctctacaaaaaaaaaaaaatgtttacaaattgactgggtgtggtggcgtgtgcctatagtctcagctactcaggtggctgaagtgggaggatcacttgagcctgggaggttgaggctgcaatgagctatgactgcactccatcttgggtgacagagcaagaccctgtcaaaaaaaaaaaaaaagaacaagaaaaagaaagaaagaaagagagagaaagaaaaaaaagcacttagcctaaaagatgaaaaacagattctgtcctcagaaagccaaacttggctgggg

SEQ ID NO: 425599 - DNA, 642 bp, Homo sapiens
  misc_feature (1)..(1): n is a, c, g, or t
ngcgccatgccagcccatgagttagggaaggacgtctcaaagaggttgtcctcgtgccgaatttggcacgaggttgataattgttgaaactagatgatggtcataataaaaaagttttaaaagtcctccagtttccaacacactcaagagagagccccaaccccaaacacagagtttcatggaaaccccacaccaaggcaagaggcagagatgatgattccatttcatatatacactcattttctaactttttttaaaggcccactgctttattttcaatagattaaacctgatttctgagaggtcctgaagttgggcttatttccctggctgggttatgggggagggcagggtaaagggatccttaaaaaagtttacacttctatgtatctcacaatcttattgtgaggatgtgacttgttcagtgttctgaacttttcgaaggaatcgtgctctcaatgcaaagtgtcattctctggaattgcacctggctcaggaaaggactgtctttgtacttgaatttaaatccaatggagaactttaacacgggcatttgcatgactgagaattgctgctgtcttttttccgtatgtcactttcttgaatgtgttctaataaaatgattctaaagcaggctgttga

SEQ ID NO: 425600 - DNA, 807 bp, Homo sapiens
tgcgagcccagcgtcaagtgattccggcctcctcgagacagcggtggtgggatgaggctctgccgaggggactggctgtgaaggatgagttcagggtgggatgacggaccgcttctgggaccagtggtatctctggtatctccgcttgctccggctgctggatcgagttccatctatgttgctgcaaatgacaggatttcctttttataggttgtctcttcactctgttgattgtttcccttgctgtgcagaagctttttagtttcaacaagggtgccaagaacatatattgggaaaaggacatccttttcaataagtggtgctgggaaaatgggatatctatattcagaagaatgaaattagacccctatctctcaccctatacaaaaatcagctcaaaatggattaaagacttacgtgttagaagacaggtcccagtcttcctaatgaggcattgaaagtctaggtggaatagatgcttgctggagcctgtggatattataaaagaaagagctcactgccttaatgtggtcaggagaggcaggagtgagagccagtgtgaaggtgtgggagttggaaggaacttggaactcaacttcttttggcccctcaacttgagattcacaaagaaaaaaagcaatgtctcctcgctgaaagcaaaatggaagctcctccttgcacagtgcagccccttcctcactgtaggttattccaagtgagaagagtaaacatgacttctaaatgccatctaacgatatatgcatatctaaaggagacaaggatgactgaatgcatcttcatgtgtag

SEQ ID NO: 425601 - DNA, 395 bp, Homo sapiens
cggccgcagcagctgcgccccgcgccctccgcccaccgggcgccgagcagccctcggccccaggcttcttcggctcccggctgcccgcggacgccctcccacagtcatgaacccccctgagggagcagcggaggaaggaggagcagcagactcggacgtggacgcctttttccggacgggtcttttcggaatgatggtttgaaagcttctgatgtccttcctatcctaaaggaaaaggtggccttcgtgtctggtgaggggtcgtgataagcgaggcggacccatcctgaccttccctgctcgcagcaatcatgacagaataagacaggaagacctgcggaaactcgtgacgtatttggccagcgtgccaaggtaaggggaaggggaatggcctg

SEQ ID NO: 425602 - DNA, 6473 bp, Homo sapiens
gttgcattctatgttgccagtgttcctgctgccagaattggatccaacccattgttccagacaagatcagggcaactagtatggaaaacataacctcaagtatctttgatgtaatctccaagggaaaagttgctccaactttttcttactgggtcttttcggaatgatggtttgaaagcttctgatgtccttcctatcctaaaggaaaaggtggccttcgtgtctggtgaggggtcgtgataagcgaggcggacccatcctgaccttccctgctcgcagcaatcatgacagaataagacaggaagacctgcggaaactcgtgacgtatttggccagcgtgccaagtgaggacgtgtgcaaacgtggcttcactgtcatcatcgacatgcggggctccaagtgggacctcatcaagcccctcctcaaaacgctgcaggaagcctttccagctgagatccatgtggccctcatcattaaacccgacaacttctggcagaaacagaagaccaactttggcagctccaaattcatctttgagacgagcatggtatctgtggagggcctcacaaagctggtggacccctcccagctgacggaggagtttgatggctccctggactacaaccatgaggagtggatcgaactgcggctctccctggaggagttcttcaacagcgccgtgcacctgctctcgcgcctcgaggacctccaggagatgctagcccggaaggagtttcctgtggatgtggagggctctcggcggctcattgacgaacacacacagctcaagaaaaaggtgctgaaggcccctgtggaggagctggaccgggaggggcagcggctgctgcagtgcatccgctgcagcgacggcttctcaggacgcaactgcatcccgggcagtgctgacttccagagcctggtgcccaagatcaccagtctcctggacaagctgcactccacccggcagcacctgcaccagatgtggcacgtgcgcaagctcaagctggaccagtgctttcagctgcggctcttcgagcaggatgctgagaagatgtttgactggataagccacaacaaggagttattcctccagagccacacggagatcggagtcagctaccagtacgcccttgacctccagacgcagcacaatcactttgccatgaactccatgaatgcctatgtcaacatcaaccgcatcatgtccgtggcttcccgcctctctgaggccggtcattatgcctcacaacaaatcaagcagatctccacccagctggaccaggagtggaagagctttgctgctgccctggatgaacgcagcaccatcctcgccatgtctgctgtgttccaccagaaggctgagcagttcctgtcgggagtggatgcctggtgcaagatgtgcagtgaaggtggtctgccatccgagatgcaagacctagagctggcaatccaccaccaccagaccttgtatgagcaggtgacccaagcctacacagaggtcagccaggatggcaaagcactacttgatgtgctgcagcggcccctgagccctgggaactccgaatccctcacggccacagccaactactccaaggcagtgcaccaggtgctggacgtggtgcatgaggtgttacatcaccagcgacggctggagagcatctggcagcaccgcaaggtgcggctccaccagcggctgcagctctgcgtcttccagcaggatgtacagcaggtgttggactggattgaaaaccatggtgaggcctttctcagcaaacacactggagttgggaagtccctacatcgagcccgggccctgcagaagaggcatgatgactttgaagaggtggctcagaatacgtacaccaatgcggacaagctcctagaagcagcagagcagttggctcagacgggggaatgtgaccccgaggagatctacaaggcagctcgacacctggaggtgcgcatccaagacttcgtgcgcagggtggagcagcggaagcttctcctggacatgtctgtttccttccacacacacaccaaagagttgtggacatggatggaagaccttcagaaggagatgttggaggatgtctgtgcagattctgtggatgcagtccaggaactgatcaagcagttccagcagcagcagaccgccactctagatgccacactcaatgtcatcaaggaaggcgaagaccttatccagcagctcaggtcagcgcctccctccctcggggagcccagcgaggggactcggctgtgtccaacaacaaaacaccccacagcagctccatcagccacatcgagtcggtcctgcagcagcttgatgatgcccaggtgcagatggaggagctgttccacgagcggaagatcaagctggacatcttcctgcaactgcgcatctttgagcagtacaccatcgaggtgacagcagagctagacgcctggaatgaagacttgcttcggcagatgaatgacttcaacacagaggacctaaccctggcagaacagcggctgcagcgccacacagaacggaagctagccatgaacaacatgacctttgaggttatccagcagggacaggatctgcaccagtacatcacggaggtccaggcatcaggaattgagttgatctgtgaaaaagacattgatctggcagcccaggtgcaagagttattggaatttctccatgagaagcagcatgaattggagctcaatgcagagcagactcataagcggctagagcagtgcctccaattacgtcacctccaggctgaagtcaaacaggttctgggatggatccgcaatggagagtcaatgctcaacgccagcctggtcaatgccagctctttgtcggaagcagagcagctgcagcgggagcacgagcagttccaactggccatcgagtccctctttcatgccacttccttgcagaagacgcaccagagtgccctgcaggtacagcagaaagccgaggtgctgctccaggccggccactacgatgccgatgccatccgggaatgtgctgagaaggtggccctccactggcagcagctcatgctgaagatggaagaccggctaaaattggtcaatgcctctgtggccttttacaaaacttctgaacaggtgtgtagtgtcctggagagcttagagcaagaataccggagagatgaggactggtgtggtggacgagataagctggggccagcagcagagatcgaccatgtcattcccctcatcagcaaacatttggaacaaaaggaggcctttcttaaggcctgcaccctggctcggcggaatgctgaggtgtttctcaagtacatccacaggaacaacgtcagcatgcccagtgtcgccagccacactcggggacccgagcaacaagtgaaagccatcctgagtgagctcctgcagagggagaatcgcgtgctgcatttctggaccttgaagaagcggcggttagaccaatgccagcaatatgtggtgttcgagcgcagcgctaagcaggcgcttgactggatccaagaaacaggtgaattttacctctcaacacatacctccactggagagaccacagaggagactcaggaactgctgaaagaatatggggaattcagggtgcctgccaagcaaacaaaggagaaggtgaagcttctgattcagctggccgatagctttgtggaaaaaggccacattcatgccacggagataaggaaatgggtgaccacggtggacaagcactacagagatttctccctgaggatgggaaagtaccgatactcactggagaaagccctaggagtcaacacagaggataataaggacctggagctggatattatcccagcaagcctttcggatcgggaggtcaagctgcgggacgccaaccacgaagtcaatgaagagaagcggaagtcagcccggaagaaagaatttattatggctgaactactccagacagagaaggcttatgtaagggatttgcatgagtgcttagagacctacctgtgggaaatgaccagtggtgtggaggagatcccccctgggatcctcaataaagagcatatcatctttggcaacatccaagagatctacgatttccataacaacatcttcctcaaagagctggagaagtacgagcaactgcctgaggatgtgggacactgctttgttacctgggcagacaaatttcagatgtatgtcacctactgtaaaaacaagcctgattccaaccagcttatcctggagcatgcgggcaccttctttgatgagatacaacagcggcatggtctggccaactccatctcttcctacctaattaagcctgtccaaaggatcaccaaatatcaactgctcctgaaggaacttttaacttgctgtgaagaagggaaaggggagctcaaggatggcctggaggtgatgctcagtgtcccaaagaaagccaatgatgccatgcatgtcagcatgctggaagggttcgacgagaacctggatgtgcagggggagttgattctccaggatgcctttcaagtgtgggacccgaagtcgctgatccggaaggggcgggagcggcacttgttcctctttgagatctccttggtttttagcaaggagatcaaagattcttcaggacacacgaaatatgtttacaagaacaagctactgacctcagagctgggtgtgaccgagcacgtggagggcgatccctgcaaattcgccttgtggtctgggcgcaccccatcctcagacaataaaacagtgctgaaagcctccaacattgaaaccaagcaggagtggatcaagaacattcgagaagtgattcaagaaaggatcattcacctgaaaggagctttaaaggagccacttcagctccccaaaacaccagccaaacagaggaacaatagtaagagggatggagtggaggatattgacagccagggggatgggagcagccaaccagacaccatctccattgcttctaggacctctcagaacacagtggacagtgacaaggatggcaaccttgttcctcggtggcacctgggacctggagatcctttctccacttacgtttagcgcgcatcctgggacttgtccctgcagctcaccgggttagccgtggcaccgttgggacctcccaccaggactccaatcacccacctctcttgagacttctctggcagggctggtgtggggtgcagcctttgctcagagggcaacatgttccaagcaaaatctccccgcctgggccatgggctcaccctcggggctcccttcttctctactgggtgcaattcgaggttgctgagcttctctccaaagtctaaaatggtggggcagtagggacctgtgagaggcccaatggcccaatgtacttcccccagatcccactcagaacagcaggtacgcccaggctcctgctgccctagaggtctgcaacatgagtgaagaggttaattagagggacacacttatctctgaagtttttctccaggctgaacatttctattatcagtggcccctaatctggaaaaacccatcattctaatctagcttgtatccccacatcatgagaaagagggaagaagaagaagggatgatgtgtggtagagaagatgagggttaactttagcctttcccaaacactggcaacaaccacttcctcaacaatttttctatttgcttcagcctactcagattttttcaggtttttctagctcctccataacctcactccctcccgaggtctctggttcaaagaccaccctaccagcccctatttgcttcaggttatcctgttgagggtgggtgggaagagtgagaagatataaatgaaaaactggccacatgttgataattgttgaaactagatgatggtacgtggacattcattataccattctccccacttctgtatttgtttgcaatttttcataataaaaaagttttaaaagtcctccagtttccaacacactcaagagagagccccaaccccaaacacagagtttcatggaaaccccacaccaaggcaagaggcagagatgatgattccatttcatatatacactcattttctaactttttttaaaggcccactgctttattttcaatagattaaacctgatttctgagaggtcctgaagttgggcttatttccctggctgggttatgggggagggcagggtaaagggatccttaaaaaagtttacacttctatgtatctcacaatcttattgtgaggatgtgacttgttcagtgttctgaacttttcgaaggaatcgtgctctcaatgcaaagtgtcattctctggaattgcacctggctcaggaaaggactgtctttgtacttgaatttaaatccaatggagaactttaacacgggcatttgcatgactgagaattgctgctgtcttttttccgtatgtcactttcttgaatgtgttctaataaaatgattctaaagcaggctgttga

SEQ ID NO: 425603 - DNA, 6438 bp, Homo sapiens
gttgcattctatgttgccagtgttcctgctgccagaattggatccaacccattgttccagacaagatcagggcaactagtatggaaaacataacctcaagtatctttgatgtaatctccaagggaaaagttgctccaactttttcttactgggtcttttcggaatgatggtttgaaagcttctgatgtccttcctatcctaaaggaaaaggtggccttcgtgtctggtgaggggtcgtgataagcgaggcggacccatcctgaccttccctgctcgcagcaatcatgacagaataagacaggaagacctgcggaaactcgtgacgtatttggccagcgtgccaagtgaggacgtgtgcaaacgtggcttcactgtcatcatcgacatgcggggctccaagtgggacctcatcaagcccctcctcaaaacgctgcaggaagcctttccagctgagatccatgtggccctcatcattaaacccgacaacttctggcagaaacagaagaccaactttggcagctccaaattcatctttgagacgagcatggtatctgtggagggcctcacaaagctggtggacccctcccagctgacggaggagtttgatggctccctggactacaaccatgaggagtggatcgaactgcggctctccctggaggagttcttcaacagcgccgtgcacctgctctcgcgcctcgaggacctccaggagatgctagcccggaaggagtttcctgtggatgtggagggctctcggcggctcattgacgaacacacacagctcaagaaaaaggtgctgaaggcccctgtggaggagctggaccgggaggggcagcggctgctgcagtgcatccgctgcagcgacggcttctcaggacgcaactgcatcccgggcagtgctgacttccagagcctggtgcccaagatcaccagtctcctggacaagctgcactccacccggcagcacctgcaccagatgtggcacgtgcgcaagctcaagctggaccagtgctttcagctgcggctcttcgagcaggatgctgagaagatgtttgactggataagccacaacaaggagttattcctccagagccacacggagatcggagtcagctaccagtacgcccttgacctccagacgcagcacaatcactttgccatgaactccatgaatgcctatgtcaacatcaaccgcatcatgtccgtggcttcccgcctctctgaggccggtcattatgcctcacaacaaatcaagcagatctccacccagctggaccaggagtggaagagctttgctgctgccctggatgaacgcagcaccatcctcgccatgtctgctgtgttccaccagaaggctgagcagttcctgtcgggagtggatgcctggtgcaagatgtgcagtgaaggtggtctgccatccgagatgcaagacctagagctggcaatccaccaccaccagaccttgtatgagcaggtgacccaagcctacacagaggtcagccaggatggcaaagcactacttgatgtgctgcagcggcccctgagccctgggaactccgaatccctcacggccacagccaactactccaaggcagtgcaccaggtgctggacgtggtgcatgaggtgttacatcaccagcgacggctggagagcatctggcagcaccgcaaggtgcggctccaccagcggctgcagctctgcgtcttccagcaggatgtacagcaggtgttggactggattgaaaaccatggtgaggcctttctcagcaaacacactggagttgggaagtccctacatcgagcccgggccctgcagaagaggcatgatgactttgaagaggtggctcagaatacgtacaccaatgcggacaagctcctagaagcagcagagcagttggctcagacgggggaatgtgaccccgaggagatctacaaggcagctcgacacctggaggtgcgcatccaagacttcgtgcgcagggtggagcagcggaagcttctcctggacatgtctgtttccttccacacacacaccaaagagttgtggacatggatggaagaccttcagaaggagatgttggaggatgtctgtgcagattctgtggatgcagtccaggaactgatcaagcagttccagcagcagcagaccgccactctagatgccacactcaatgtcatcaaggaaggcgaagaccttatccagcagctcagggactcggctgtgtccaacaacaaaacaccccacagcagctccatcagccacatcgagtcggtcctgcagcagcttgatgatgcccaggtgcagatggaggagctgttccacgagcggaagatcaagctggacatcttcctgcaactgcgcatctttgagcagtacaccatcgaggtgacagcagagctagacgcctggaatgaagacttgcttcggcagatgaatgacttcaacacagaggacctaaccctggcagaacagcggctgcagcgccacacagaacggaagctagccatgaacaacatgacctttgaggttatccagcagggacaggatctgcaccagtacatcacggaggtccaggcatcaggaattgagttgatctgtgaaaaagacattgatctggcagcccaggtgcaagagttattggaatttctccatgagaagcagcatgaattggagctcaatgcagagcagactcataagcggctagagcagtgcctccaattacgtcacctccaggctgaagtcaaacaggttctgggatggatccgcaatggagagtcaatgctcaacgccagcctggtcaatgccagctctttgtcggaagcagagcagctgcagcgggagcacgagcagttccaactggccatcgagtccctctttcatgccacttccttgcagaagacgcaccagagtgccctgcaggtacagcagaaagccgaggtgctgctccaggccggccactacgatgccgatgccatccgggaatgtgctgagaaggtggccctccactggcagcagctcatgctgaagatggaagaccggctaaaattggtcaatgcctctgtggccttttacaaaacttctgaacaggtgtgtagtgtcctggagagcttagagcaagaataccggagagatgaggactggtgtggtggacgagataagctggggccagcagcagagatcgaccatgtcattcccctcatcagcaaacatttggaacaaaaggaggcctttcttaaggcctgcaccctggctcggcggaatgctgaggtgtttctcaagtacatccacaggaacaacgtcagcatgcccagtgtcgccagccacactcggggacccgagcaacaagtgaaagccatcctgagtgagctcctgcagagggagaatcgcgtgctgcatttctggaccttgaagaagcggcggttagaccaatgccagcaatatgtggtgttcgagcgcagcgctaagcaggcgcttgactggatccaagaaacaggtgaattttacctctcaacacatacctccactggagagaccacagaggagactcaggaactgctgaaagaatatggggaattcagggtgcctgccaagcaaacaaaggagaaggtgaagcttctgattcagctggccgatagctttgtggaaaaaggccacattcatgccacggagataaggaaatgggtgaccacggtggacaagcactacagagatttctccctgaggatgggaaagtaccgatactcactggagaaagccctaggagtcaacacagaggataataaggacctggagctggatattatcccagcaagcctttcggatcgggaggtcaagctgcgggacgccaaccacgaagtcaatgaagagaagcggaagtcagcccggaagaaagaatttattatggctgaactactccagacagagaaggcttatgtaagggatttgcatgagtgcttagagacctacctgtgggaaatgaccagtggtgtggaggagatcccccctgggatcctcaataaagagcatatcatctttggcaacatccaagagatctacgatttccataacaacatcttcctcaaagagctggagaagtacgagcaactgcctgaggatgtgggacactgctttgttacctgggcagacaaatttcagatgtatgtcacctactgtaaaaacaagcctgattccaaccagcttatcctggagcatgcgggcaccttctttgatgagatacaacagcggcatggtctggccaactccatctcttcctacctaattaagcctgtccaaaggatcaccaaatatcaactgctcctgaaggaacttttaacttgctgtgaagaagggaaaggggagctcaaggatggcctggaggtgatgctcagtgtcccaaagaaagccaatgatgccatgcatgtcagcatgctggaagggttcgacgagaacctggatgtgcagggggagttgattctccaggatgcctttcaagtgtgggacccgaagtcgctgatccggaaggggcgggagcggcacttgttcctctttgagatctccttggtttttagcaaggagatcaaagattcttcaggacacacgaaatatgtttacaagaacaagctactgacctcagagctgggtgtgaccgagcacgtggagggcgatccctgcaaattcgccttgtggtctgggcgcaccccatcctcagacaataaaacagtgctgaaagcctccaacattgaaaccaagcaggagtggatcaagaacattcgagaagtgattcaagaaaggatcattcacctgaaaggagctttaaaggagccacttcagctccccaaaacaccagccaaacagaggaacaatagtaagagggatggagtggaggatattgacagccagggggatgggagcagccaaccagacaccatctccattgcttctaggacctctcagaacacagtggacagtgacaaggatggcaaccttgttcctcggtggcacctgggacctggagatcctttctccacttacgtttagcgcgcatcctgggacttgtccctgcagctcaccgggttagccgtggcaccgttgggacctcccaccaggactccaatcacccacctctcttgagacttctctggcagggctggtgtggggtgcagcctttgctcagagggcaacatgttccaagcaaaatctccccgcctgggccatgggctcaccctcggggctcccttcttctctactgggtgcaattcgaggttgctgagcttctctccaaagtctaaaatggtggggcagtagggacctgtgagaggcccaatggcccaatgtacttcccccagatcccactcagaacagcaggtacgcccaggctcctgctgccctagaggtctgcaacatgagtgaagaggttaattagagggacacacttatctctgaagtttttctccaggctgaacatttctattatcagtggcccctaatctggaaaaacccatcattctaatctagcttgtatccccacatcatgagaaagagggaagaagaagaagggatgatgtgtggtagagaagatgagggttaactttagcctttcccaaacactggcaacaaccacttcctcaacaatttttctatttgcttcagcctactcagattttttcaggtttttctagctcctccataacctcactccctcccgaggtctctggttcaaagaccaccctaccagcccctatttgcttcaggttatcctgttgagggtgggtgggaagagtgagaagatataaatgaaaaactggccacatgttgataattgttgaaactagatgatggtacgtggacattcattataccattctccccacttctgtatttgtttgcaatttttcataataaaaaagttttaaaagtcctccagtttccaacacactcaagagagagccccaaccccaaacacagagtttcatggaaaccccacaccaaggcaagaggcagagatgatgattccatttcatatatacactcattttctaactttttttaaaggcccactgctttattttcaatagattaaacctgatttctgagaggtcctgaagttgggcttatttccctggctgggttatgggggagggcagggtaaagggatccttaaaaaagtttacacttctatgtatctcacaatcttattgtgaggatgtgacttgttcagtgttctgaacttttcgaaggaatcgtgctctcaatgcaaagtgtcattctctggaattgcacctggctcaggaaaggactgtctttgtacttgaatttaaatccaatggagaactttaacacgggcatttgcatgactgagaattgctgctgtcttttttccgtatgtcactttcttgaatgtgttctaataaaatgattctaaagcaggctgttga

SEQ ID NO: 425604 - DNA, 5445 bp, Homo sapiens
gttgcattctatgttgccagtgttcctgctgccagaattggatccaacccattgttccagacaagatcagggcaactagtatggaaaacataacctcaagtatctttgatgtaatctccaagggaaaagttgctccaactttttcttactgggtcttttcggaatgatggtttgaaagcttctgatgtccttcctatcctaaaggaaaaggtggccttcgtgtctggtgaggggtcgtgataagcgaggcggacccatcctgaccttccctgctcgcagcaatcatgacagaataagacaggaagacctgcggaaactcgtgacgtatttggccagcgtgccaagtgaggacgtgtgcaaacgtggcttcactgtcatcatcgacatgcggggctccaagtgggacctcatcaagcccctcctcaaaacgctgcaggaagcctttccagctgagatccatgtggccctcatcattaaacccgacaacttctggcagaaacagaagaccaactttggcagctccaaattcatctttgagacgagcatggtatctgtggagggcctcacaaagctggtggacccctcccagctgacggaggagtttgatggctccctggactacaaccatgaggagtggatcgaactgcggctctccctggaggagttcttcaacagcgccgtgcacctgctctcgcgcctcgaggacctccaggagatgctagcccggaaggagtttcctgtggatgtggagggctctcggcggctcattgacgaacacacacagctcaagaaaaaggtgctgaaggcccctgtggaggagctggaccgggaggggcagcggctgctgcagtgcatccgctgcagcgacggcttctcaggacgcaactgcatcccgggcagtgctgacttccagagcctggtgcccaagatcaccagtctcctggacaagctgcactccacccggcagcacctgcaccagatgtggcacgtgcgcaagctcaagctggaccagtgctttcagctgcggctcttcgagcaggatgctgagaagatgtttgactggataagccacaacaaggagttattcctccagagccacacggagatcggagtcagctaccagtacgcccttgacctccagacgcagcacaatcactttgccatgaactccatgaatgcctatgtcaacatcaaccgcatcatgtccgtggcttcccgcctctctgaggccggtcattatgcctcacaacaaatcaagcagatctccacccagctggaccaggagtggaagagctttgctgctgccctggatgaacgcagcaccatcctcgccatgtctgctgtgttccaccagaaggctgagcagttcctgtcgggagtggatgcctggtgcaagatgtgcagtgaaggtggtctgccatccgagatgcaagacctagagctggcaatccaccaccaccagaccttgtatgagcaggtgacccaagcctacacagaggtcagccaggatggcaaagcactacttgatgtgctgcagcggcccctgagccctgggaactccgaatccctcacggccacagccaactactccaaggcagtgcaccaggtgctggacgtggtgcatgaggtgttacatcaccagcgacggctggagagcatctggcagcaccgcaaggtgcggctccaccagcggctgcagctctgcgtcttccagcaggatgtacagcaggtgttggactggattgaaaaccatggtgaggcctttctcagcaaacacactggagttgggaagtccctacatcgagcccgggccctgcagaagaggcatgatgactttgaagaggtggctcagaatacgtacaccaatgcggacaagctcctagaagcagcagagcagttggctcagacgggggaatgtgaccccgaggagatctacaaggcagctcgacacctggaggtgcgcatccaagacttcgtgcgcagggtggagcagcggaagcttctcctggacatgtctgtttccttccacacacacaccaaagagttgtggacatggatggaagaccttcagaaggagatgttggaggatgtctgtgcagattctgtggatgcagtccaggaactgatcaagcagttccagcagcagcagaccgccactctagatgccacactcaatgtcatcaaggaaggcgaagaccttatccagcagctcaggtcagcgcctccctccctcggggagcccagcgaggggactcggctgtgtccaacaacaaaacaccccacagcagctccatcagccacatcgagtcggtcctgcagcagcttgatgatgcccaggtgcagatggaggagctgttccacgagcggaagatcaagctggacatcttcctgcaactgcgcatctttgagcagtacaccatcgaggtgacagcagagctagacgcctggaatgaagacttgcttcggcagatgaatgacttcaacacagaggacctaaccctggcagaacagcggctgcagcgccacacagaacggaagctagccatgaacaacatgacctttgaggttatccagcagggacaggatctgcaccagtacatcacggaggtccaggcatcaggaattgagttgatctgtgaaaaagacattgatctggcagcccaggtgcaagagttattggaatttctccatgagaagcagcatgaattggagctcaatgcagagcagactcataagcggctagagcagtgcctccaattacgtcacctccaggctgaagtcaaacaggttctgggatggatccgcaatggagagtcaatgctcaacgccagcctggtcaatgccagctctttgtcggaagcagagcagctgcagcgggagcacgagcagttccaactggccatcgagtccctctttcatgccacttccttgcagaagacgcaccagagtgccctgcaggtacagcagaaagccgaggtgctgctccaggccggccactacgatgccgatgccatccgggaatgtgctgagaaggtggccctccactggcagcagctcatgctgaagatggaagaccggctaaaattggtcaatgcctctgtggccttttacaaaacttctgaacaggtgtgtagtgtcctggagagcttagagcaagaataccggagagatgaggactggtgtggtggacgagataagctggggccagcagcagagatcgaccatgtcattcccctcatcagcaaacatttggaacaaaaggaggcctttcttaaggcctgcaccctggctcggcggaatgctgaggtgtttctcaagtacatccacaggaacaacgtcagcatgcccagtgtcgccagccacactcggggacccgagcaacaagtgaaagccatcctgagtgagctcctgcagagggagaatcgcgtgctgcatttctggaccttgaagaagcggcggttagaccaatgccagcaatatgtggtgttcgagcgcagcgctaagcaggcgcttgactggatccaagaaacaggtgaattttacctctcaacacatacctccactggagagaccacagaggagactcaggaactgctgaaagaatatggggaattcagggtgcctgccaagcaaacaaaggagaaggtgaagcttctgattcagctggccgatagctttgtggaaaaaggccacattcatgccacggagataaggaaatgggtgaccacggtggacaagcactacagagatttctccctgaggatgggaaagtaccgatactcactggagaaagccctaggagtcaacacagaggataataaggacctggagctggatattatcccagcaagcctttcggatcgggaggtcaagctgcgggacgccaaccacgaagtcaatgaagagaagcggaagtcagcccggaagaaagaatttattatggctgaactactccagacagagaaggcttatgtaagggatttgcatgagtgcttagagacctacctgtgggaaatgaccagtggtgtggaggagatcccccctgggatcctcaataaagagcatatcatctttggcaacatccaagagatctacgatttccataacaacatcttcctcaaagagctggagaagtacgagcaactgcctgaggatgtgggacactgctttgttacctgggcagacaaatttcagatgtatgtcacctactgtaaaaacaagcctgattccaaccagcttatcctggagcatgcgggcaccttctttgatgagatacaacagcggcatggtctggccaactccatctcttcctacctaattaagcctgtccaaaggatcaccaaatatcaactgctcctgaaggaacttttaacttgctgtgaagaagggaaaggggagctcaaggatggcctggaggtgatgctcagtgtcccaaagaaagccaatgatgccatgcatgtcagcatgctggaagggttcgacgagaacctggatgtgcagggggagttgattctccaggatgcctttcaagtgtgggacccgaagtcgctgatccggaaggggcgggagcggcacttgttcctctttgagatctccttggtttttagcaaggagatcaaagattcttcaggacacacgaaatatgtttacaagaacaagctactgacctcagagctgggtgtgaccgagcacgtggagggcgatccctgcaaattcgccttgtggtctgggcgcaccccatcctcagacaataaaacagtgctgaaagcctccaacattgaaaccaagcaggagtggatcaagaacattcgagaagtgattcaagaaaggatcattcacctgaaaggagctttaaaggagccacttcagctccccaaaacaccagccaaacagaggaacaatagtaagagggatggagtggaggatattgacagccagggggatgggagcagccaaccagacaccatctccattgcttctaggacctctcagaacacagtggacagtgacaagctctctggtggatgtgagctgacagtggtcctccaggacttcagtgcgggccacagcagtgagctgaccatccaggtggggcagacggtagagctgctggagcggcccagcgagcggcctggttggtgtctggtccgtaccaccgaacggagcccgcccttggagggtctggtccccagcagcgccctgtgcatctcacactcccgaagcagcgtggagatggactgcttcttccccttggtgaaagatgcatactctcattcctcaagcgagaatggaggcaagtccgagtccgtagccaacctgcaggcccagccctccctgaactccatccacagttccccgggtcccaagcgctccaccaacactcttaagaagtggctgacgagtcctgtgcgtcggctcaacagcgggaaggcagatggaaacatc

SEQ ID NO: 425605 - DNA, 3451 bp, Homo sapiens
ctaatgaaaaatgtcatatgtgtaggcttctataggctgaaggtcctcagagaataattcctgaataattaatttactgagtcttttcttccatgattcactaggtgtgtagtgtcctggagagcttagagcaagaataccggagagatgaggactggtgtggtggacgagataagctggggccagcagcagagatcgaccatgtcattcccctcatcagcaaacatttggaacaaaaggaggcctttcttaaggcctgcaccctggctcggcggaatgctgaggtgtttctcaagtacatccacaggaacaacgtcagcatgcccagtgtcgccagccacactcggggacccgagcaacaagtgaaagccatcctgagtgagctcctgcagagggagaatcgcgtgctgcatttctggaccttgaagaagcggcggttagaccaatgccagcaatatgtggtgttcgagcgcagcgctaagcaggcgcttgactggatccaagaaacaggtgaattttacctctcaacacatacctccactggagagaccacagaggagactcaggaactgctgaaagaatatggggaattcagggtgcctgccaagcaaacaaaggagaaggtgaagcttctgattcagctggccgatagctttgtggaaaaaggccacattcatgccacggagataaggaaatgggtgaccacggtggacaagcactacagagatttctccctgaggatgggaaagtaccgatactcactggagaaagccctaggagtcaacacagaggataataaggacctggagctggatattatcccagcaagcctttcggatcgggaggtcaagctgcgggacgccaaccacgaagtcaatgaagagaagcggaagtcagcccggaagaaagaatttattatggctgaactactccagacagagaaggcttatgtaagggatttgcatgagtgcttagagacctacctgtgggaaatgaccagtggtgtggaggagatcccccctgggatcctcaataaagagcatatcatctttggcaacatccaagagatctacgatttccataacaacatcttcctcaaagagctggagaagtacgagcaactgcctgaggatgtgggacactgctttgttacctgggcagacaaatttcagatgtatgtcacctactgtaaaaacaagcctgattccaaccagcttatcctggagcatgcgggcaccttctttgatgagatacaacagcggcatggtctggccaactccatctcttcctacctaattaagcctgtccaaaggatcaccaaatatcaactgctcctgaaggaacttttaacttgctgtgaagaagggaaaggggagctcaaggatggcctggaggtgatgctcagtgtcccaaagaaagccaatgatgccatgcatgtcagcatgctggaagggttcgacgagaacctggatgtgcagggggagttgattctccaggatgcctttcaagtgtgggacccgaagtcgctgatccggaaggggcgggagcggcacttgttcctctttgagatctccttggtttttagcaaggagatcaaagattcttcaggacacacgaaatatgtttacaagaacaagctactgacctcagagctgggtgtgaccgagcacgtggagggcgatccctgcaaattcgccttgtggtctgggcgcaccccatcctcagacaataaaacagtgctgaaagcctccaacattgaaaccaagcaggagtggatcaagaacattcgagaagtgattcaagaaaggatcattcacctgaaaggagctttaaaggagccacttcagctccccaaaacaccagccaaacagaggaacaatagtaagagggatggagtggaggatattgacagccagggggatgggagcagccaaccagacaccatctccattgcttctaggacctctcagaacacagtggacagtgacaaggatggcaaccttgttcctcggtggcacctgggacctggagatcctttctccacttacgtttagcgcgcatcctgggacttgtccctgcagctcaccgggttagccgtggcaccgttgggacctcccaccaggactccaatcacccacctctcttgagacttctctggcagggctggtgtggggtgcagcctttgctcagagggcaacatgttccaagcaaaatctccccgcctgggccatgggctcaccctcggggctcccttcttctctactgggtgcaattcgaggttgctgagcttctctccaaagtctaaaatggtggggcagtagggacctgtgagaggcccaatggcccaatgtacttcccccagatcccactcagaacagcaggtacgcccaggctcctgctgccctagaggtctgcaacatgagtgaagaggttaattagagggacacacttatctctgaagtttttctccaggctgaacatttctattatcagtggcccctaatctggaaaaacccatcattctaatctagcttgtatccccacatcatgagaaagagggaagaagaagaagggatgatgtgtggtagagaagatgagggttaactttagcctttcccaaacactggcaacaaccacttcctcaacaatttttctatttgcttcagcctactcagattttttcaggtttttctagctcctccataacctcactccctcccgaggtctctggttcaaagaccaccctaccagcccctatttgcttcaggttatcctgttgagggtgggtgggaagagtgagaagatataaatgaaaaactggccacatgttgataattgttgaaactagatgatggtacgtggacattcattataccattctccccacttctgtatttgtttgcaatttttcataataaaaaagttttaaaagtcctccagtttccaacacactcaagagagagccccaaccccaaacacagagtttcatggaaaccccacaccaaggcaagaggcagagatgatgattccatttcatatatacactcattttctaactttttttaaaggcccactgctttattttcaatagattaaacctgatttctgagaggtcctgaagttgggcttatttccctggctgggttatgggggagggcagggtaaagggatccttaaaaaagtttacacttctatgtatctcacaatcttattgtgaggatgtgacttgttcagtgttctgaacttttcgaaggaatcgtgctctcaatgcaaagtgtcattctctggaattgcacctggctcaggaaaggactgtctttgtacttgaatttaaatccaatggagaactttaacacgggcatttgcatgactgagaattgctgctgtcttttttccgtatgtcactttcttgaatgtgttctaataaaatgattctaaagcaggctgttga

SEQ ID NO: 425606 - DNA, 5148 bp, Homo sapiens
gttgcattctatgttgccagtgttcctgctgccagaattggatccaacccattgttccagacaagatcagggcaactagtatggaaaacataacctcaagtatctttgatgtaatctccaagggaaaagttgctccaactttttcttactgggtcttttcggaatgatggtttgaaagcttctgatgtccttcctatcctaaaggaaaaggtggccttcgtgtctggtgaggggtcgtgataagcgaggcggacccatcctgaccttccctgctcgcagcaatcatgacagaataagacaggaagacctgcggaaactcgtgacgtatttggccagcgtgccaagtgaggacgtgtgcaaacgtggcttcactgtcatcatcgacatgcggggctccaagtgggacctcatcaagcccctcctcaaaacgctgcaggaagcctttccagctgagatccatgtggccctcatcattaaacccgacaacttctggcagaaacagaagaccaactttggcagctccaaattcatctttgagacgagcatggtatctgtggagggcctcacaaagctggtggacccctcccagctgacggaggagtttgatggctccctggactacaaccatgaggagtggatcgaactgcggctctccctggaggagttcttcaacagcgccgtgcacctgctctcgcgcctcgaggacctccaggagatgctagcccggaaggagtttcctgtggatgtggagggctctcggcggctcattgacgaacacacacagctcaagaaaaaggtgctgaaggcccctgtggaggagctggaccgggaggggcagcggctgctgcagtgcatccgctgcagcgacggcttctcaggacgcaactgcatcccgggcagtgctgacttccagagcctggtgcccaagatcaccagtctcctggacaagctgcactccacccggcagcacctgcaccagatgtggcacgtgcgcaagctcaagctggaccagtgctttcagctgcggctcttcgagcaggatgctgagaagatgtttgactggataagccacaacaaggagttattcctccagagccacacggagatcggagtcagctaccagtacgcccttgacctccagacgcagcacaatcactttgccatgaactccatgaatgcctatgtcaacatcaaccgcatcatgtccgtggcttcccgcctctctgaggccggtcattatgcctcacaacaaatcaagcagatctccacccagctggaccaggagtggaagagctttgctgctgccctggatgaacgcagcaccatcctcgccatgtctgctgtgttccaccagaaggctgagcagttcctgtcgggagtggatgcctggtgcaagatgtgcagtgaaggtggtctgccatccgagatgcaagacctagagctggcaatccaccaccaccagaccttgtatgagcaggtgacccaagcctacacagaggtcagccaggatggcaaagcactacttgatgtgctgcagcggcccctgagccctgggaactccgaatccctcacggccacagccaactactccaaggcagtgcaccaggtgctggacgtggtgcatgaggtgttacatcaccagcgacggctggagagcatctggcagcaccgcaaggtgcggctccaccagcggctgcagctctgcgtcttccagcaggatgtacagcaggtgttggactggattgaaaaccatggtgaggcctttctcagcaaacacactggagttgggaagtccctacatcgagcccgggccctgcagaagaggcatgatgactttgaagaggtggctcagaatacgtacaccaatgcggacaagctcctagaagcagcagagcagttggctcagacgggggaatgtgaccccgaggagatctacaaggcagctcgacacctggaggtgcgcatccaagacttcgtgcgcagggtggagcagcggaagcttctcctggacatgtctgtttccttccacacacacaccaaagagttgtggacatggatggaagaccttcagaaggagatgttggaggatgtctgtgcagattctgtggatgcagtccaggaactgatcaagcagttccagcagcagcagaccgccactctagatgccacactcaatgtcatcaaggaaggcgaagaccttatccagcagctcaggtcagcgcctccctccctcggggagcccagcgaggggactcggctgtgtccaacaacaaaacaccccacagcagctccatcagccacatcgagtcggtcctgcagcagcttgatgatgcccaggtgcagatggaggagctgttccacgagcggaagatcaagctggacatcttcctgcaactgcgcatctttgagcagtacaccatcgaggtgacagcagagctagacgcctggaatgaagacttgcttcggcagatgaatgacttcaacacagaggacctaaccctggcagaacagcggctgcagcgccacacagaacggaagctagccatgaacaacatgacctttgaggttatccagcagggacaggatctgcaccagtacatcacggaggtccaggcatcaggaattgagttgatctgtgaaaaagacattgatctggcagcccaggtgcaagagttattggaatttctccatgagaagcagcatgaattggagctcaatgcagagcagactcataagcggctagagcagtgcctccaattacgtcacctccaggctgaagtcaaacaggttctgggatggatccgcaatggagagtcaatgctcaacgccagcctggtcaatgccagctctttgtcggaagcagagcagctgcagcgggagcacgagcagttccaactggccatcgagtccctctttcatgccacttccttgcagaagacgcaccagagtgccctgcaggtacagcagaaagccgaggtgctgctccaggccggccactacgatgccgatgccatccgggaatgtgctgagaaggtggccctccactggcagcagctcatgctgaagatggaagaccggctaaaattggtcaatgcctctgtggccttttacaaaacttctgaacaggtgtgtagtgtcctggagagcttagagcaagaataccggagagatgaggactggtgtggtggacgagataagctggggccagcagcagagatcgaccatgtcattcccctcatcagcaaacatttggaacaaaaggaggcctttcttaaggcctgcaccctggctcggcggaatgctgaggtgtttctcaagtacatccacaggaacaacgtcagcatgcccagtgtcgccagccacactcggggacccgagcaacaagtgaaagccatcctgagtgagctcctgcagagggagaatcgcgtgctgcatttctggaccttgaagaagcggcggttagaccaatgccagcaatatgtggtgttcgagcgcagcgctaagcaggcgcttgactggatccaagaaacaggtgaattttacctctcaacacatacctccactggagagaccacagaggagactcaggaactgctgaaagaatatggggaattcagggtgcctgccaagcaaacaaaggagaaggtgaagcttctgattcagctggccgatagctttgtggaaaaaggccacattcatgccacggagataaggaaatgggtgaccacggtggacaagcactacagagatttctccctgaggatgggaaagtaccgatactcactggagaaagccctaggagtcaacacagaggataataaggacctggagctggatattatcccagcaagcctttcggatcgggaggtcaagctgcgggacgccaaccacgaagtcaatgaagagaagcggaagtcagcccggaagaaagaatttattatggctgaactactccagacagagaaggcttatgtaagggatttgcatgagtgcttagagacctacctgtgggaaatgaccagtggtgtggaggagatcccccctgggatcctcaataaagagcatatcatctttggcaacatccaagagatctacgatttccataacaacatcttcctcaaagagctggagaagtacgagcaactgcctgaggatgtgggacactgctttgttacctgggcagacaaatttcagatgtatgtcacctactgtaaaaacaagcctgattccaaccagcttatcctggagcatgcgggcaccttctttgatgagatacaacagcggcatggtctggccaactccatctcttcctacctaattaagcctgtccaaaggatcaccaaatatcaactgctcctgaaggaacttttaacttgctgtgaagaagggaaaggggagctcaaggatggcctggaggtgatgctcagtgtcccaaagaaagccaatgatgccatgcatgtcagcatgctggaagggttcgacgagaacctggatgtgcagggggagttgattctccaggatgcctttcaagtgtgggacccgaagtcgctgatccggaaggggcgggagcggcacttgttcctctttgagatctccttggtttttagcaaggagatcaaagattcttcaggacacacgaaatatgtttacaagaacaagctactgacctcagagctgggtgtgaccgagcacgtggagggcgatccctgcaaattcgccttgtggtctgggcgcaccccatcctcagacaataaaacagtgctgaaagcctccaacattgaaaccaagcaggagtggatcaagaacattcgagaagtgattcaagaaaggatcattcacctgaaaggagctttaaaggagccacttcagctccccaaaacaccagccaaacagaggaacaatagtaagaggatggagtggaggatattgacagaaagaggccagaactggagagagacagaaccagtctacgttgcagctctgtcccccttagtagctatttgagtgtgaggaagttactgaacttctgtttcccacatgagaaatggtgataatagattcagccttgcagagtagtcgagtgggttttctaagcgtatgttgtcatttctcatgggtgcagagcactcagcactagctgcccgtggt

SEQ ID NO: 425607 - DNA, 2392 bp, Homo sapiens
tctgaggatcccgtttgataggtaacaacatcttcctcaaagagctggagaagtacgagcaactgcctgaggatgtgggacactgctttgttacctgggcagacaaatttcagatgtatgtcacctactgtaaaaacaagcctgattccaaccagcttatcctggagcatgcgggcaccttctttgatgagatacaacagcggcatggtctggccaactccatctcttcctacctaattaagcctgtccaaaggatcaccaaatatcaactgctcctgaaggaacttttaacttgctgtgaagaagggaaaggggagctcaaggatggcctggaggtgatgctcagtgtcccaaagaaagccaatgatgccatgcatgtcagcatgctggaagggttcgacgagaacctggatgtgcagggggagttgattctccaggatgcctttcaagtgtgggacccgaagtcgctgatccggaaggggcgggagcggcacttgttcctctttgagatctccttggtttttagcaaggagatcaaagattcttcaggacacacgaaatatgtttacaagaacaagctactgacctcagagctgggtgtgaccgagcacgtggagggcgatccctgcaaattcgccttgtggtctgggcgcaccccatcctcagacaataaaacagtgctgaaagcctccaacattgaaaccaagcaggagtggatcaagaacattcgagaagtgattcaagaaaggatcattcacctgaaaggagctttaaaggagccacttcagctccccaaaacaccagccaaacagaggaacaatagtaagagggatggagtggaggatattgacagccagggggatgggagcagccaaccagacaccatctccattgcttctaggacctctcagaacacagtggacagtgacaaggatggcaaccttgttcctcggtggcacctgggacctggagatcctttctccacttacgtttagcgcgcatcctgggacttgtccctgcagctcaccgggttagccgtggcaccgttgggacctcccaccaggactccaatcacccacctctcttgagacttctctggcagggctggtgtggggtgcagcctttgctcagagggcaacatgttccaagcaaaatctccccgcctgggccatgggctcaccctcggggctcccttcttctctactgggtgcaattcgaggttgctgagcttctctccaaagtctaaaatggtggggcagtagggacctgtgagaggcccaatggcccaatgtacttcccccagatcccactcagaacagcaggtacgcccaggctcctgctgccctagaggtctgcaacatgagtgaagaggttaattagagggacacacttatctctgaagtttttctccaggctgaacatttctattatcagtggcccctaatctggaaaaacccatcattctaatctagcttgtatccccacatcatgagaaagagggaagaagaagaagggatgatgtgtggtagagaagatgagggttaactttagcctttcccaaacactggcaacaaccacttcctcaacaatttttctatttgcttcagcctactcagattttttcaggtttttctagctcctccataacctcactccctcccgaggtctctggttcaaagaccaccctaccagcccctatttgcttcaggttatcctgttgagggtgggtgggaagagtgagaagatataaatgaaaaactggccacatgttgataattgttgaaactagatgatggtacgtggacattcattataccattctccccacttctgtatttgtttgcaatttttcataataaaaaagttttaaaagtcctccagtttccaacacactcaagagagagccccaaccccaaacacagagtttcatggaaaccccacaccaaggcaagaggcagagatgatgattccatttcatatatacactcattttctaactttttttaaaggcccactgctttattttcaatagattaaacctgatttctgagaggtcctgaagttgggcttatttccctggctgggttatgggggagggcagggtaaagggatccttaaaaaagtttacacttctatgtatctcacaatcttattgtgaggatgtgacttgttcagtgttctgaacttttcgaaggaatcgtgctctcaatgcaaagtgtcattctctggaattgcacctggctcaggaaaggactgtctttgtacttgaatttaaatccaatggagaactttaacacgggcatttgcatgactgagaattgctgctgtcttttttccgtatgtcactttcttgaatgtgttctaataaaatgattctaaagcaggctgttga

SEQ ID NO: 425608 - DNA, 5116 bp, Homo sapiens
gttgcattctatgttgccagtgttcctgctgccagaattggatccaacccattgttccagacaagatcagggcaactagtatggaaaacataacctcaagtatctttgatgtaatctccaagggaaaagttgctccaactttttcttactgggtcttttcggaatgatggtttgaaagcttctgatgtccttcctatcctaaaggaaaaggtggccttcgtgtctggtgaggggtcgtgataagcgaggcggacccatcctgaccttccctgctcgcagcaatcatgacagaataagacaggaagacctgcggaaactcgtgacgtatttggccagcgtgccaagtgaggacgtgtgcaaacgtggcttcactgtcatcatcgacatgcggggctccaagtgggacctcatcaagcccctcctcaaaacgctgcaggaagcctttccagctgagatccatgtggccctcatcattaaacccgacaacttctggcagaaacagaagaccaactttggcagctccaaattcatctttgagacgagcatggtatctgtggagggcctcacaaagctggtggacccctcccagctgacggaggagtttgatggctccctggactacaaccatgaggagtggatcgaactgcggctctccctggaggagttcttcaacagcgccgtgcacctgctctcgcgcctcgaggacctccaggagatgctagcccggaaggagtttcctgtggatgtggagggctctcggcggctcattgacgaacacacacagctcaagaaaaaggtgctgaaggcccctgtggaggagctggaccgggaggggcagcggctgctgcagtgcatccgctgcagcgacggcttctcaggacgcaactgcatcccgggcagtgctgacttccagagcctggtgcccaagatcaccagtctcctggacaagctgcactccacccggcagcacctgcaccagatgtggcacgtgcgcaagctcaagctggaccagtgctttcagctgcggctcttcgagcaggatgctgagaagatgtttgactggataagccacaacaaggagttattcctccagagccacacggagatcggagtcagctaccagtacgcccttgacctccagacgcagcacaatcactttgccatgaactccatgaatgcctatgtcaacatcaaccgcatcatgtccgtggcttcccgcctctctgaggccggtcattatgcctcacaacaaatcaagcagatctccacccagctggaccaggagtggaagagctttgctgctgccctggatgaacgcagcaccatcctcgccatgtctgctgtgttccaccagaaggctgagcagttcctgtcgggagtggatgcctggtgcaagatgtgcagtgaaggtggtctgccatccgagatgcaagacctagagctggcaatccaccaccaccagaccttgtatgagcaggtgacccaagcctacacagaggtcagccaggatggcaaagcactacttgatgtgctgcagcggcccctgagccctgggaactccgaatccctcacggccacagccaactactccaaggcagtgcaccaggtgctggacgtggtgcatgaggtgttacatcaccagcgacggctggagagcatctggcagcaccgcaaggtgcggctccaccagcggctgcagctctgcgtcttccagcaggatgtacagcaggtgttggactggattgaaaaccatggtgaggcctttctcagcaaacacactggagttgggaagtccctacatcgagcccgggccctgcagaagaggcatgatgactttgaagaggtggctcagaatacgtacaccaatgcggacaagctcctagaagcagcagagcagttggctcagacgggggaatgtgaccccgaggagatctacaaggcagctcgacacctggaggtgcgcatccaagacttcgtgcgcagggtggagcagcggaagcttctcctggacatgtctgtttccttccacacacacaccaaagagttgtggacatggatggaagaccttcagaaggagatgttggaggatgtctgtgcagattctgtggatgcagtccaggaactgatcaagcagttccagcagcagcagaccgccactctagatgccacactcaatgtcatcaaggaaggcgaagaccttatccagcagctcaggtcagcgcctccctccctcggggagcccagcgaggggactcggctgtgtccaacaacaaaacaccccacagcagctccatcagccacatcgagtcggtcctgcagcagcttgatgatgcccaggtgcagatggaggagctgttccacgagcggaagatcaagctggacatcttcctgcaactgcgcatctttgagcagtacaccatcgaggtgacagcagagctagacgcctggaatgaagacttgcttcggcagatgaatgacttcaacacagaggacctaaccctggcagaacagcggctgcagcgccacacagaacggaagctagccatgaacaacatgacctttgaggttatccagcagggacaggatctgcaccagtacatcacggaggtccaggcatcaggaattgagttgatctgtgaaaaagacattgatctggcagcccaggtgcaagagttattggaatttctccatgagaagcagcatgaattggagctcaatgcagagcagactcataagcggctagagcagtgcctccaattacgtcacctccaggctgaagtcaaacaggttctgggatggatccgcaatggagagtcaatgctcaacgccagcctggtcaatgccagctctttgtcggaagcagagcagctgcagcgggagcacgagcagttccaactggccatcgagtccctctttcatgccacttccttgcagaagacgcaccagagtgccctgcaggtacagcagaaagccgaggtgctgctccaggccggccactacgatgccgatgccatccgggaatgtgctgagaaggtggccctccactggcagcagctcatgctgaagatggaagaccggctaaaattggtcaatgcctctgtggccttttacaaaacttctgaacaggtgtgtagtgtcctggagagcttagagcaagaataccggagagatgaggactggtgtggtggacgagataagctggggccagcagcagagatcgaccatgtcattcccctcatcagcaaacatttggaacaaaaggaggcctttcttaaggcctgcaccctggctcggcggaatgctgaggtgtttctcaagtacatccacaggaacaacgtcagcatgcccagtgtcgccagccacactcggggacccgagcaacaagtgaaagccatcctgagtgagctcctgcagagggagaatcgcgtgctgcatttctggaccttgaagaagcggcggttagaccaatgccagcaatatgtggtgttcgagcgcagcgctaagcaggcgcttgactggatccaagaaacaggtgaattttacctctcaacacatacctccactggagagaccacagaggagactcaggaactgctgaaagaatatggggaattcagggtgcctgccaagcaaacaaaggagaaggtgaagcttctgattcagctggccgatagctttgtggaaaaaggccacattcatgccacggagataaggaaatgggtgaccacggtggacaagcactacagagatttctccctgaggatgggaaagtaccgatactcactggagaaagccctaggagtcaacacagaggataataaggacctggagctggatattatcccagcaagcctttcggatcgggaggtcaagctgcgggacgccaaccacgaagtcaatgaagagaagcggaagtcagcccggaagaaagaatttattatggctgaactactccagacagagaaggcttatgtaagggatttgcatgagtgcttagagacctacctgtgggaaatgaccagtggtgtggaggagatcccccctgggatcctcaataaagagcatatcatctttggcaacatccaagagatctacgatttccataacaacatcttcctcaaagagctggagaagtacgagcaactgcctgaggatgtgggacactgctttgttacctgggcagacaaatttcagatgtatgtcacctactgtaaaaacaagcctgattccaaccagcttatcctggagcatgcgggcaccttctttgatgagatacaacagcggcatggtctggccaactccatctcttcctacctaattaagcctgtccaaaggatcaccaaatatcaactgctcctgaaggaacttttaacttgctgtgaagaagggaaaggggagctcaaggatggcctggaggtgatgctcagtgtcccaaagaaagccaatgatgccatgcatgtcagcatgctggaagggttcgacgagaacctggatgtgcagggggagttgattctccaggatgcctttcaagtgtgggacccgaagtcgctgatccggaaggggcgggagcggcacttgttcctctttgagatctccttggtttttagcaaggagatcaaagattcttcaggacacacgaaatatgtttacaagaacaagctactgccctaagtttccccactgccctccccttccccgcctctcataggcatttcctgtctacagacctcagagctgggtgtgaccgagcacgtggagggcgatccctgcaaattcgccttgtggtctgggcgcaccccatcctcagacaataaaacagtgctgaaaggatggagtggaggatattgacagccagggggatgggagcagccaaccagacaccatctccattgcttctaggacctctcagaacacagtggacagtgacaaggactagctgctgtgtgcggatcctccttaaggtatgccatgtttagcatatgtgtccagtgctggctcagaaaatctccatgcccttttttatggactgcccttattcaggcaggtgacttagtaacctgagtgtaggactactttatgtctattagattttctcttatttagttccatctcagtg

SEQ ID NO: 425609 - DNA, 2440 bp, Homo sapiens
gttgcattctatgttgccagtgttcctgctgccagaattggatccaacccattgttccagacaagatcagggcaactagtatggaaaacataacctcaagtatctttgatgtaatctccaagggaaaagttgctccaactttttcttactgggtcttttcggaatgatggtttgaaagcttctgatgtccttcctatcctaaaggaaaaggtggccttcgtgtctggtgaggggtcgtgataagcgaggcggacccatcctgaccttccctgctcgcagcaatcatgacagaataagacaggaagacctgcggaaactcgtgacgtatttggccagcgtgccaagtgaggacgtgtgcaaacgtggcttcactgtcatcatcgacatgcggggctccaagtgggacctcatcaagcccctcctcaaaacgctgcaggaagcctttccagctgagatccatgtggccctcatcattaaacccgacaacttctggcagaaacagaagaccaactttggcagctccaaattcatctttgagacgagcatggtatctgtggagggcctcacaaagctggtggacccctcccagctgacggaggagtttgatggctccctggactacaaccatgaggagtggatcgaactgcggctctccctggaggagttcttcaacagcgccgtgcacctgctctcgcgcctcgaggacctccaggagatgctagcccggaaggagtttcctgtggatgtggagggctctcggcggctcattgacgaacacacacagctcaagaaaaaggtgctgaaggcccctgtggaggagctggaccgggaggggcagcggctgctgcagtgcatccgctgcagcgacggcttctcaggacgcaactgcatcccgggcagtgctgacttccagagcctggtgcccaagatcaccagtctcctggacaagctgcactccacccggcagcacctgcaccagatgtggcacgtgcgcaagctcaagctggaccagtgctttcagctgcggctcttcgagcaggatgctgagaagatgtttgactggataagccacaacaaggagttattcctccagagccacacggagatcggagtcagctaccagtacgcccttgacctccagacgcagcacaatcactttgccatgaactccatgaatgcctatgtcaacatcaaccgcatcatgtccgtggcttcccgcctctctgaggccggtcattatgcctcacaacaaatcaagcagatctccacccagctggaccaggagtggaagagctttgctgctgccctggatgaacgcagcaccatcctcgccatgtctgctgtgttccaccagaaggctgagcagttcctgtcgggagtggatgcctggtgcaagatgtgcagtgaaggtggtctgccatccgagatgcaagacctagagctggcaatccaccaccaccagaccttgtatgagcaggtgacccaagcctacacagaggtcagccaggatggcaaagcactacttgatgtgctgcagcggcccctgagccctgggaactccgaatccctcacggccacagccaactactccaaggcagtgcaccaggtgctggacgtggtgcatgaggtgttacatcaccagcgacggctggagagcatctggcagcaccgcaaggtgcggctccaccagcggctgcagctctgcgtcttccagcaggatgtacagcaggtgttggactggattgaaaaccatggtgaggcctttctcagcaaacacactggagttgggaagtccctacatcgagcccgggccctgcagaagaggcatgatgactttgaagaggtggctcagaatacgtacaccaatgcggacaagctcctagaagcagcagagcagttggctcagacgggggaatgtgaccccgaggagatctacaaggcagctcgacacctggaggtgcgcatccaagacttcgtgcgcagggtggagcagcggaagcttctcctggacatgtctgtttccttccacacacacaccaaagagttgtggacatggatggaagaccttcagaaggagatgttggaggatgtctgtgcagattctgtggatgcagtccaggaactgatcaagcagttccagcagcagcagaccgccactctagatgccacactcaatgtcatcaaggaaggcgaagaccttatccagcagctcaggtcagcgcctccctccctcggggagcccagcgaggaggccaggtcagcatgggcagagctttccagtgggaaatgcctcgggctagacgtgagataagtcctgtcccagtcttgactcagcaaaatcttgctttgtggtcttgtgtgagcttcggtttctttatctgtaagatgtaaaaatgcctgcaccatactcaacttgaatctagaataaaatagtaaatgg

SEQ ID NO: 425610 - DNA, 2536 bp, Homo sapiens
gttgcattctatgttgccagtgttcctgctgccagaattggatccaacccattgttccagacaagatcagggcaactagtatggaaaacataacctcaagtatctttgatgtaatctccaagggaaaagttgctccaactttttcttactgggtcttttcggaatgatggtttgaaagcttctgatgtccttcctatcctaaaggaaaaggtggccttcgtgtctggtgaggggtcgtgataagcgaggcggacccatcctgaccttccctgctcgcagcaatcatgacagaataagacaggaagacctgcggaaactcgtgacgtatttggccagcgtgccaagtgaggacgtgtgcaaacgtggcttcactgtcatcatcgacatgcggggctccaagtgggacctcatcaagcccctcctcaaaacgctgcaggaagcctttccagctgagatccatgtggccctcatcattaaacccgacaacttctggcagaaacagaagaccaactttggcagctccaaattcatctttgagacgagcatggtatctgtggagggcctcacaaagctggtggacccctcccagctgacggaggagtttgatggctccctggactacaaccatgaggagtggatcgaactgcggctctccctggaggagttcttcaacagcgccgtgcacctgctctcgcgcctcgaggacctccaggagatgctagcccggaaggagtttcctgtggatgtggagggctctcggcggctcattgacgaacacacacagctcaagaaaaaggtgctgaaggcccctgtggaggagctggaccgggaggggcagcggctgctgcagtgcatccgctgcagcgacggcttctcaggacgcaactgcatcccgggcagtgctgacttccagagcctggtgcccaagatcaccagtctcctggacaagctgcactccacccggcagcacctgcaccagatgtggcacgtgcgcaagctcaagctggaccagtgctttcagctgcggctcttcgagcaggatgctgagaagatgtttgactggataagccacaacaaggagttattcctccagagccacacggagatcggagtcagctaccagtacgcccttgacctccagacgcagcacaatcactttgccatgaactccatgaatgcctatgtcaacatcaaccgcatcatgtccgtggcttcccgcctctctgaggccggtcattatgcctcacaacaaatcaagcagatctccacccagctggaccaggagtggaagagctttgctgctgccctggatgaacgcagcaccatcctcgccatgtctgctgtgttccaccagaaggctgagcagttcctgtcgggagtggatgcctggtgcaagatgtgcagtgaaggtggtctgccatccgagatgcaagacctagagctggcaatccaccaccaccagaccttgtatgagcaggtgacccaagcctacacagaggtcagccaggatggcaaagcactacttgatgtgctgcagcggcccctgagccctgggaactccgaatccctcacggccacagccaactactccaaggcagtgcaccaggtgctggacgtggtgcatgaggtgttacatcaccagcgacggctggagagcatctggcagcaccgcaaggtgcggctccaccagcggctgcagctctgcgtcttccagcaggatgtacagcaggtgttggactggattgaaaaccatggtgaggcctttctcagcaaacacactggagttgggaagtccctacatcgagcccgggccctgcagaagaggcatgatgactttgaagaggtggctcagaatacgtacaccaatgcggacaagctcctagaagcagcagagcagttggctcagacgggggaatgtgaccccgaggagatctacaaggcagctcgacacctggaggtgcgcatccaagacttcgtgcgcagggtggagcagcggaagcttctcctggacatgtctgtttccttccacacacacaccaaagagttgtggacatggatggaagaccttcagaaggagatgttggaggatgtctgtgcagattctgtggatgcagtccaggaactgatcaagcagttccagcagcagcagaccgccactctagatgccacactcaatgtcatcaaggaaggcgaagaccttatccagcagctcaggtcagcgcctccctccctcggggagcccagcgaggaggccaggtcagcatgggcagagctttccagtgggaaatgcctcgggctagacgtgagataagtcctgtcccagtcttgactcagcaaaatcttgctttgtggtcttgtgtgagcttcggtttctttatctgtaagatgtaaaaatgcctgcaccatactcaacttgaatctagaataaaatagtaaatggaaaagctttaatgtttcaaagaattatttatcattcaggatgttattcagccatcagtaagtaacataaatacaacaaaaattaacaaaagacaaa

SEQ ID NO: 425611 - DNA, 544 bp, Homo sapiens
cggccgcagcagctgcgccccgcgccctccgcccaccgggcgccgagcagccctcggccccaggcttcttcggctcccggctgcccgcggacgccctcccacagtcatgaacccccctgagggagcagcggaggaaggaggagcagcagactcggacgtggacgcctttttccggacgggtcttttcggaatgatggtttgaaagcttctgatgtccttcctatcctaaaggaaaaggtggccttcgtgtctggtgaaggccaggtcagcatgggcagagctttccagtgggaaatgcctcgggctagacgtgagataagtcctgtcccagtcttgactcagcaaaatcttgctttgtggtcttgtgtgagcttcggtttctttatctgtaagatgtaaaaatgcctgcaccatactcaacttgaatctagaataaaatagtaaatggaaaagctttaatgtttcaaagaattatttatcattcaggatgttattcagccatcagtaagtaacataaatacaacaaaaattaacaaaagacaaa

SEQ ID NO: 425612 - DNA, 320 bp, Homo sapiens
ctgttctttttctccatttttgctcaatttctatttgtttcacacacttgcttctttccctaatccttctccctttttactctctctcctattttctctatatgcatcttggtctcttttgtttctctttttactcccctctccctatgaaagaacatgttctcatacttgtctacctttttctctttcttcctctcttctgacccctgcctttctcctctcagagttcacacacatgcacacacccctctgtgtctaattgcacattgttctcatccctgcaggagatacaacagcggcatggtctggccaactccatc

SEQ ID NO: 425613 - DNA, 211 bp, Homo sapiens
tgaattcttagagataaccccttttaccccacctcactttctttatagctcagagggaaccattacagagagcgaagctggtctataatttccttgctgggttaggtggtgggaggaagctgggggagatggccctaattatgtccggacttttttttccccaggaacttttaacttgctgtgaagaagggaaaggggagctcaaggatgg

SEQ ID NO: 425614 - DNA, 399 bp, Homo sapiens
gacacaaaagcagttcttctggggtggtaaatggctggcagttgtagaggcttgctaaagcagtcagcagtctgtagaaactgctgatcctgactgatctgtgactcctgaccagtgagtcccatggcctccactcaccatttccgaggcaggctgtggtcattattatgtggatttatcttgtcctttccctcatcctatttctgccctgttcttcccctgacatcactgagtatccttgtctgtgtctgccccttccagacgagcatggtatctgtggagggcctcacaaagctggtggacccctcccagctgacggaggagtttgatggctccctggactacaaccatgaggagtggatcgaactgcggctctccctggaggagttcttcaacagc

SEQ ID NO: 425615 - DNA, 4722 bp, Homo sapiens
ggggaggagagacaagcaggggcggcagaggctcaacgggatgctgactgggttttgcttttcgtcccagccttgtggggccgggacggaagaacccatcaaagcccttcctcccgccgcctctccggaatgaggtctcagcacccgcgcgggacagcacccttcctcctgcgacagagcccaagaagaggccgaaaccgagaccatgccagggaagctgaaggtgaaaatcgtggccgggcgccatttgccagtgatggaccgtgctagtgacctgactgatgccttcgtggaggtaaaatttggtaataccacctttaaaacagatgtgtaccttaagtcactcaaccctcagtggaactcggagtggtttaaatttgaggtggatgatgaagacttacaagatgaacctttacagatcacagttcttgaccatgatacttacagtgcaaatgatgccattggtaaagtgtacattgatattgatcctttactgtatagtgaagctgcaacagtcatctcaggatggtttccaatttatgacaccatacatggtatccgtggggaaatcaatgtagttgtcaaagtagacctcttcaatgatttaaatcgatttaggcagtcatcatgtggagtcaaattcttttgcacaacgtctattccaaaatgctatagagctgtgataattcatggatttgtagaagaacttgtggtcaatgaagacccagaatatcagtggattgatcgaattcgcacaccaagggcatcaaatgaggccagacagagactcatttcgttaatgtcaggtgagctgcagaggaagattggcttgaaagtacttgaaatgagaggaaatgcagttgtggggtacttacagtgtttcgatctggagggcgagtctgggttagtggtgcgagccataggaacggcgtgtactctggataaattaagtagcccagcagcattccttcctgcatgtaattccccatccaaagaaatgaaggagtctccgctggttcatcctccaagccatggatgccgctcgactcacaacagcccaattcacactgctactggctcacgacttactcagaacttctctgtgtctgttcccactctcatctatactggtacgagactgctcagactccagagctggggagatgcaggccacgggcagagtggctgcagaggcaggcaggcaggaatgggaagtggtagtgctggaaaagaaggggggccctttaaagctcttttaagacaacagactcaatcagcgttggaacagaggggaggatcgcctcataggttctgtagaaggcgggaatttccattttttaccttgacggcatttcctcctggattccttgtacacgttgggggtgtagttagtgcacgttctgtgaagcttttggatcgtatccacaatcctgcctttgtcggaattatgggtaacacaagatcttacaaactgctagactggaatagtttcaattcagatgaaccagaaactcgagatgcatggtgggcagaaatcagacaagaaataaaatcacatgctaaagcattaggctgtcatgctgtagtgggctacagtgaatcaactagcatctgtgaagaggtctgcattttatctgcatctggcacagcggctgtactgaatcctagatttctgcaggatggcaccgtggaaggctgtttggaacagaggcttgaagaaaatttgcctacacgttgtggattttgtcatataccatatgatgaactgaatatgccatttccagctcatctcacatattgctataactgcaggaaacaaaaagttcctgatgttctgtttacaactatagacctcccaacagatgcaacagttattggaaaaggttgtcttattcaagcaaggttatgtcgcttaaaaaagaaagcacaggcagaagcaaatgctacagctatcagtaatctcttgccatttatggaatatgaagtgcatactcagctaatgaataaactaaaactcaaaggaatgaatgctttgtttggactaagaattcagatcacagtgggtgaaaatatgttgatgggcttagcgtctgccacaggtgtgtatttagcagctttaccaactcctggtggtattcagattgctgggaagactcctaatgatggctcatatgaacaacacatctctcatatgcagaagaagataaatgacacaattgctaaaaacaaagagttatatgaaatcaatcctccagagatatctgaagagattataggatcacccatcccagaacctaggcaacgctcaagacttctaagatctcaatcagaaagctcggatgaagttacagaattagacctttcacatgggaaaaaagatgcttttgttttggagattgatgacacagatgccatggaagatgtccattctctacttactgatgttcctcctccttcaggcttttatagttgtaatacagaaattatgcccggtataaataattggacctctgaaatacagatgttcacttcagtaagagtaatcagattaagcagcctcaacctgactaatcaagctctcaataagaactttaatgatctctgtgaaaatttgctcaagagcctgtactttaaactacgatctatgatcccctgctgcctttgccatgtaaattttacagtatctctgcctgaagatgaattaattcaggttacagtcacggcagtcgcaatcacttttgacaaaaatcaggctttacaaaccacaaaaacccctgttgaaaagtcattgcaaagagcctcaacagataatgaagaacttttacaatttccactggaactgtgttcagattcacttccttctcatccttttccaccagctaaagaacacctggagagtgcaagttctaactcaggtataccagctgcacagagagcaacgtcagttgattacagttcctttgcagacagatgcagcagctggatagagctcattaaactgaaagctcagaccataaggcgtggatcaattaagacaaccatgacagttgaaaaagcaagtccagtgggtgatggaaatttccggaatcgttctgctccaccttgtgcaaattccacagttggggttgttaagatgacacctctttcttttattcctggagcaaaaataactaagtatcttgggataattaacatgttttttattcgagagactacttctcttcgggaggaaggaggagtcagtggttttctccatgcttttattgctgaagtgtttgcaatggtgagagctcatgttgctgcattaggagggaatgctgttgtctcctacataatgaagcagtgtgtcttcatggagaatccaaataaaaaccaggcacagtgtcttataaatgtaagtggtgacgcagtggtttttgttcgtgaatctgacttagaagtggtgtcatctcagcaacctactaccaactgccagtcatcatgtactgaaggcgaagttacaacctgaggaaaattaggaaaaaagagctcaactaaatgaaattcatcaatctctgttattttgtcattaattatcttcttagacttaaaattgaacttgagataaataaggaagaattgagtagatttgatttgcctggagtcttttggaggcatgagaattttctaatcttgacattttgtttgcctgttctagacaggccctgtggggtcttgacccttcagtaagttaagataaatttttaaaagaaccgtagcaaagatggaacctttgtaatttatgttgattttaataaaatcataatttaaaaaatgaaatgggaagattgtcaggaaattaggatagctactctagtataatttagaaaaactaagcaagagattctccagttgctagtgagtaagcactctgatttgagaaatgtgtggggacaatggagaaaagttttcagaaaactgctatgtagatttctgaatgtgttgtattttgctgaggaattcggtaacaactgaaagggaaaagtgcttcagccatcttttgaaaacaagttaaaattctggaacttgtatctgtaatacatcctaactcttgtaaaagaaaataatttatcatagctggtgtcctttcattgaaagttgtaatactgtctctaaggagggaggaaaagattattatataattttataactggcaacatttgagttagtattgactttgtctaaaagaggcttgacttcaactgggataaaaatgtcagtgaattttgttaaagtagtaaaaatgcagttgacttagtaggaacataaaattatttcctaataagataatattgcactcctaccaaataaacaggattttagtaatatctgagggattgttgatggtgagttagactgtatttggcatagaatttggaaatgtaacttgaatgtaaatatgctgcaaaatgttgaatgtatacatagaaagactttttctgtcgacgccaaatgcccgttgtaaatgaaccttaaatattacattcctcctttgcacaataatatttctttataacacttatgattttttcccccaggacaacaaactgcccttaagagtcatttccttgttatcacaggtgtcaatatttttctgtattttgtttataattttattttttaaataaaaagtgtataaaaataaactggaatattcctaaatctcttttttacctccatcat

SEQ ID NO: 425616 - DNA, 732 bp, Homo sapiens
acaaaacattaacaaaaatggccctttggttttcctcttactgattgtagaaagaagatactttaataacagataagtcaactactaacttttaaaaatatattcttcaacatttgattctctttttttaaaattttagggtaaaactagggaaatgaattattcacaaagctttgattataaaataaaatagaaacaactgaaatattgtaaattaagaagaataggaaataaagttagttaaagcacagtatgtggtcctttcattgatatttatgttagaccccactcaggctctccctaggagaccacacaactatgacatcaccagaaatgctcagcctgctaactgagaacttggttttggacaaatcagtgtctaaagcttgactctttactatctctcttatctgacttgaaaaggaccattctttttctgagttacagttaaattacatcatcgaaaggagtgttaagacgagtaagagacatcatccatatttttttctttgtttttttcttttgttttctgtctgtgttttcagcaacgtcagttgattacagttcctttgcagacagatgcagcagctggatagagctcattaaactgaaagctcagaccataaggcgtggatcaattaagacaagtaggcggatgtttctaccacattatgataatctgagaaacatatccctgatttcccagtggtgaaagctagaccttactaccca

SEQ ID NO: 425617 - DNA, 4422 bp, Homo sapiens
ggggaggagagacaagcaggggcggcagaggctcaacgggatgctgactgggttttgcttttcgtcccagccttgtggggccgggacggaagaacccatcaaagcccttcctcccgccgcctctccggaatgaggtctcagcacccgcgcgggacagcacccttcctcctgcgacagagcccaagaagaggccgaaaccgagaccatgccagggaagctgaaggtgaaaatcgtggccgggcgccatttgccagtgatggaccgtgctagtgacctgactgatgccttcgtggaggtaaaatttggtaataccacctttaaaacagatgtgtaccttaagtcactcaaccctcagtggaactcggagtggtttaaatttgaggtggatgatgaagacttacaagatgaacctttacagatcacagttcttgaccatgatacttacagtgcaaatgatgccattggtaaagtgtacattgatattgatcctttactgtatagtgaagctgcaacagtcatctcaggatggtttccaatttatgacaccatacatggtatccgtggggaaatcaatgtagttgtcaaagtagacctcttcaatgatttaaatcgatttaggcagtcatcatgtggagtcaaattcttttgcacaacgtctattccaaaatgctatagagctgtgataattcatggatttgtagaagaacttgtggtcaatgaagacccagaatatcagtggattgatcgaattcgcacaccaagggcatcaaatgaggccagacagagactcatttcgttaatgtcaggtgagctgcagaggaagattggcttgaaagtacttgaaatgagaggaaatgcagttgtggggtacttacagtgtttcgatctggagggcgagtctgggttagtggtgcgagccataggaacggcgtgtactctggataaattaagtagcccagcagcattccttcctgcatgtaattccccatccaaagaaatgaaggagattcccttcaatgaagatcccaatcccaatactcactcatcaggaccctcaacccctctgaaaaaccaaacttattccttttcaccttccaagtcctacagtcgacagtcctcttcttctgacacagatttgagtttgacacccaaaactggaatgggaagtggtagtgctggaaaagaaggggggccctttaaagctcttttaagacaacagactcaatcagcgttggaacagagggaatttccattttttaccttgacggcatttcctcctggattccttgtacacgttgggggtgtagttagtgcacgttctgtgaagcttttggatcgtatccacaatcctgatgaaccagaaactcgagatgcatggtgggcagaaatcagacaagaaataaaatcacatgctaaagcattaggctgtcatgctgtagtgggctacagtgaatcaactagcatctgtgaagaggtctgcattttatctgcatctggcacagcggctgtactgaatcctagatttctgcaggatggcaccgtggaaggctgtttggaacagaggcttgaagaaaatttgcctacacgttgtggattttgtcatataccatatgatgaactgaatatgccatttccagctcatctcacatattgctataactgcaggaaacaaaaagttcctgatgttctgtttacaactatagacctcccaacagatgcaacagttattggaaaaggttgtcttattcaagcaaggttatgtcgcttaaaaaagaaagcacaggcagaagcaaatgctacagctatcagtaatctcttgccatttatggaatatgaagtgcatactcagctaatgaataaactaaaactcaaaggaatgaatgctttgtttggactaagaattcagatcacagtgggtgaaaatatgttgatgggcttagcgtctgccacaggtgtgtatttagcagctttaccaactcctggtggtattcagattgctgggaagactcctaatgatggctcatatgaacaacacatctctcatatgcagaagaagataaatgacacaattgctaaaaacaaagagttatatgaaatcaatcctccagagatatctgaagagattataggatcacccatcccagaacctaggcaacgctcaagacttctaagatctcaatcagaaagctcggatgaagttacagaattagacctttcacatgggaaaaaagatgcttttgttttggagattgatgacacagatgccatggaagatgtccattctctacttactgatgttcctcctccttcaggcttttatagttgtaatacagaaattatgcccggtataaataattggacctctgaaatacagatgttcacttcagtaagagtaatcagattaagcagcctcaacctgactaatcaagctctcaataagaactttaatgatctctgtgaaaatttgctcaagagcctgtactttaaactacgatctatgatcccctgctgcctttgccatgtaaattttacagtatctctgcctgaagatgaattaattcaggttacagtcacggcagtcgcaatcacttttgacaaaaatcaggctttacaaaccacaaaaacccctgttgaaaagtcattgcaaagagcctcaacagataatgaagaacttttacaatttccactggaactgtgttcagattcacttccttctcatccttttccaccagctaaagccatgacagttgaaaaagcaagtccagtgggtgatggaaatttccggaatcgttctgctccaccttgtgcaaattccacagttggggttgttaagatgacacctctttcttttattcctggagcaaaaataactaagtatcttgggataattaacatgttttttattcgagagactacttctcttcgggaggaaggaggagtcagtggttttctccatgcttttattgctgaagtgtttgcaatggtgagagctcatgttgctgcattaggagggaatgctgttgtctcctacataatgaagcagtgtgtcttcatggagaatccaaataaaaaccaggcacagtgtcttataaatgtaagtggtgacgcagtggtttttgttcgtgaatctgacttagaagtggtgtcatctcagcaacctactaccaactgccagtcatcatgtactgaaggcgaagttacaacctgaggaaaattaggaaaaaagagctcaactaaatgaaattcatcaatctctgttattttgtcattaattatcttcttagacttaaaattgaacttgagataaataaggaagaattgagtagatttgatttgcctggagtcttttggaggcatgagaattttctaatcttgacattttgtttgcctgttctagacaggccctgtggggtcttgacccttcagtaagttaagataaatttttaaaagaaccgtagcaaagatggaacctttgtaatttatgttgattttaataaaatcataatttaaaaaatgaaatgggaagattgtcaggaaattaggatagctactctagtataatttagaaaaactaagcaagagattctccagttgctagtgagtaagcactctgatttgagaaatgtgtggggacaatggagaaaagttttcagaaaactgctatgtagatttctgaatgtgttgtattttgctgaggaattcggtaacaactgaaagggaaaagtgcttcagccatcttttgaaaacaagttaaaattctggaacttgtatctgtaatacatcctaactcttgtaaaagaaaataatttatcatagctggtgtcctttcattgaaagttgtaatactgtctctaaggagggaggaaaagattattatataattttataactggcaacatttgagttagtattgactttgtctaaaagaggcttgacttcaactgggataaaaatgtcagtgaattttgttaaagtagtaaaaatgcagttgacttagtaggaacataaaattatttcctaataagataatattgcactcctaccaaataaacaggattttagtaatatctgagggattgttgatggtgagttagactgtatttggcatagaatttggaaatgtaacttgaatgtaaatatgctgcaaaatgttgaatgtatacatagaaagactttttctgtcgacgccaaatgcccgttgtaaatgaaccttaaatattacattcctcctttgcacaataatatttctttataacacttatgattttttcccccaggacaacaaactgcccttaagagtcatttccttgttatcacaggtgtcaatatttttctgtattttgtttataattttattttttaaataaaaagtgtataaaaataaactggaatattcctaaatctcttttttacctccatcat

SEQ ID NO: 425618 - DNA, 4356 bp, Homo sapiens
ggggaggagagacaagcaggggcggcagaggctcaacgggatgctgactgggttttgcttttcgtcccagccttgtggggccgggacggaagaacccatcaaagcccttcctcccgccgcctctccggaatgaggtctcagcacccgcgcgggacagcacccttcctcctgcgacagagcccaagaagaggccgaaaccgagaccatgccagggaagctgaaggtgaaaatcgtggccgggcgccatttgccagtgatggaccgtgctagtgacctgactgatgccttcgtggaggtaaaatttggtaataccacctttaaaacagatgtgtaccttaagtcactcaaccctcagtggaactcggagtggtttaaatttgaggtggatgatgaagacttacaagatgaacctttacagatcacagttcttgaccatgatacttacagtgcaaatgatgccattggtaaagtgtacattgatattgatcctttactgtatagtgaagctgcaacagtcatctcaggatggtttccaatttatgacaccatacatggtatccgtggggaaatcaatgtagttgtcaaagtagacctcttcaatgatttaaatcgatttaggcagtcatcatgtggagtcaaattcttttgcacaacgtctattccaaaatgctatagagctgtgataattcatggatttgtagaagaacttgtggtcaatgaagacccagaatatcagtggattgatcgaattcgcacaccaagggcatcaaatgaggccagacagagactcatttcgttaatgtcaggtgagctgcagaggaagattggcttgaaagtacttgaaatgagaggaaatgcagttgtggggtacttacagtgtttcgatctggagggcgagtctgggttagtggtgcgagccataggaacggcgtgtactctggataaattaagtagcccagcagcattccttcctgcatgtaattccccatccaaagaaatgaaggagattcccttcaatgaagatcccaatcccaatactcactcatcaggaccctcaacccctctgaaaaaccaaacttattccttttcaccttccaagtcctacagtcgacagtcctcttcttctgacacagatttgagtttgacacccaaaactggaatgggaagtggtagtgctggaaaagaaggggggccctttaaagctcttttaagacaacagactcaatcagcgttggaacagagggaatttccattttttaccttgacggcatttcctcctggattccttgtacacgttgggggtgtagttagtgcacgttctgtgaagcttttggatcgtatccacaatcctgatgaaccagaaactcgagatgcatggtgggcagaaatcagacaagaaataaaatcacatgctaaagcattaggctgtcatgctgtagtgggctacagtgaatcaactagcatctgtgaagaggtctgcattttatctgcatctggcacagcggctgtactgaatcctagatttctgcaggatggcaccgtggaaggctgtttggaacagaggcttgaagaaaatttgcctacacgttgtggattttgtcatataccatatgatgaactgaatatgccatttccagctcatctcacatattgctataactgcaggaaacaaaaagttcctgatgttctgtttacaactatagacctcccaacagatgcaacagttattggaaaaggttgtcttattcaagcaaggttatgtcgcttaaaaaagaaagcacaggcagaagcaaatgctacagctatcagtaatctcttgccatttatggaatatgaagtgcatactcagctaatgaataaactaaaactcaaaggaatgaatgctttgtttggactaagaattcagatcacagtgggtgaaaatatgttgatgggcttagcgtctgccacaggtgtgtatttagcagctttaccaactcctggtggtattcagattgctgggaagactcctaatgatggctcatatgaacaacacatctctcatatgcagaagaagataaatgacacaattgctaaaaacaaagagttatatgaaatcaatcctccagagatatctgaagagattataggatcacccatcccagaacctaggcaacgctcaagacttctaagatctcaatcagaaagctcggatgaagttacagaattagacctttcacatgggaaaaaagatgcttttgttttggagattgatgacacagatgccatggaagatgtccattctctacttactgatgttcctcctccttcaggcttttatagttgtaatacagaaattatgcccggtataaataattggacctctgaaatacagatgttcacttcagtaagagtaatcagattaagcagcctcaacctgactaatcaagctctcaataagaactttaatgatctctgtgaaaatttgctcaagagcctgtactttaaactacgatctatgatcccctgctgcctttgccatgtaaattttacagtatctctgcctgaagatgaattaattcaggttacagtcacggcagtcgcaatcacttttgacaaaaatcaggctttacaaaccacaaaaacccctgttgaaaagtcattgcaaagagcctcaacagataatgaagaacttttacaatttccactggaactgtgttcagattcacttccttctcatccttttccaccagctaaagccatgacagttgaaaaagcaagtccagtgggtgatggaaatttccggaatcgttctgctccaccttgtgcaaattccacagttggggttgttaagatgacacctctttcttttattcctggagcagaaggaggagtcagtggttttctccatgcttttattgctgaagtgtttgcaatggtgagagctcatgttgctgcattaggagggaatgctgttgtctcctacataatgaagcagtgtgtcttcatggagaatccaaataaaaaccaggcacagtgtcttataaatgtaagtggtgacgcagtggtttttgttcgtgaatctgacttagaagtggtgtcatctcagcaacctactaccaactgccagtcatcatgtactgaaggcgaagttacaacctgaggaaaattaggaaaaaagagctcaactaaatgaaattcatcaatctctgttattttgtcattaattatcttcttagacttaaaattgaacttgagataaataaggaagaattgagtagatttgatttgcctggagtcttttggaggcatgagaattttctaatcttgacattttgtttgcctgttctagacaggccctgtggggtcttgacccttcagtaagttaagataaatttttaaaagaaccgtagcaaagatggaacctttgtaatttatgttgattttaataaaatcataatttaaaaaatgaaatgggaagattgtcaggaaattaggatagctactctagtataatttagaaaaactaagcaagagattctccagttgctagtgagtaagcactctgatttgagaaatgtgtggggacaatggagaaaagttttcagaaaactgctatgtagatttctgaatgtgttgtattttgctgaggaattcggtaacaactgaaagggaaaagtgcttcagccatcttttgaaaacaagttaaaattctggaacttgtatctgtaatacatcctaactcttgtaaaagaaaataatttatcatagctggtgtcctttcattgaaagttgtaatactgtctctaaggagggaggaaaagattattatataattttataactggcaacatttgagttagtattgactttgtctaaaagaggcttgacttcaactgggataaaaatgtcagtgaattttgttaaagtagtaaaaatgcagttgacttagtaggaacataaaattatttcctaataagataatattgcactcctaccaaataaacaggattttagtaatatctgagggattgttgatggtgagttagactgtatttggcatagaatttggaaatgtaacttgaatgtaaatatgctgcaaaatgttgaatgtatacatagaaagactttttctgtcgacgccaaatgcccgttgtaaatgaaccttaaatattacattcctcctttgcacaataatatttctttataacacttatgattttttcccccaggacaacaaactgcccttaagagtcatttccttgttatcacaggtgtcaatatttttctgtattttgtttataattttattttttaaataaaaagtgtataaaaataaactggaatattcctaaatctcttttttacctccatcat

SEQ ID NO: 425619 - DNA, 4359 bp, Homo sapiens
ggggaggagagacaagcaggggcggcagaggctcaacgggatgctgactgggttttgcttttcgtcccagccttgtggggccgggacggaagaacccatcaaagcccttcctcccgccgcctctccggaatgaggtctcagcacccgcgcgggacagcacccttcctcctgcgacagagcccaagaagaggccgaaaccgagaccatgccagggaagctgaaggtgaaaatcgtggccgggcgccatttgccagtgatggaccgtgctagtgacctgactgatgccttcgtggaggtaaaatttggtaataccacctttaaaacagatgtgtaccttaagtcactcaaccctcagtggaactcggagtggtttaaatttgaggtggatgatgaagacttacaagatgaacctttacagatcacagttcttgaccatgatacttacagtgcaaatgatgccattggtaaagtgtacattgatattgatcctttactgtatagtgaagctgcaacagtcatctcaggatggtttccaatttatgacaccatacatggtatccgtggggaaatcaatgtagttgtcaaagtagacctcttcaatgatttaaatcgatttaggcagtcatcatgtggagtcaaattcttttgcacaacgtctattccaaaatgctatagagctgtgataattcatggatttgtagaagaacttgtggtcaatgaagacccagaatatcagtggattgatcgaattcgcacaccaagggcatcaaatgaggccagacagagactcatttcgttaatgtcaggtgagctgcagaggaagattggcttgaaagtacttgaaatgagaggaaatgcagttgtggggtacttacagtgtttcgatctggagggcgagtctgggttagtggtgcgagccataggaacggcgtgtactctggataaattaagtagcccagcagcattccttcctgcatgtaattccccatccaaagaaatgaaggagattcccttcaatgaagatcccaatcccaatactcactcatcaggaccctcaacccctctgaaaaaccaaacttattccttttcaccttccaagtcctacagtcgacagtcctcttcttctgacacagatttgagtttgacacccaaaactggaatgggaagtggtagtgctggaaaagaaggggggccctttaaagctcttttaagacaacagactcaatcagcgttggaacagagggaatttccattttttaccttgacggcatttcctcctggattccttgtacacgttgggggtgtagttagtgcacgttctgtgaagcttttggatcgtatccacaatcctgatgaaccagaaactcgagatgcatggtgggcagaaatcagacaagaaataaaatcacatgctaaagcattaggctgtcatgctgtagtgggctacagtgaatcaactagcatctgtgaagaggtctgcattttatctgcatctggcacagcggctgtactgaatcctagatttctgcaggatggcaccgtggaaggctgtttggaacagaggcttgaagaaaatttgcctacacgttgtggattttgtcatataccatatgatgaactgaatatgccatttccagctcatctcacatattgctataactgcaggaaacaaaaagttcctgatgttctgtttacaactatagacctcccaacagatgcaacagttattggaaaaggttgtcttattcaagcaaggttatgtcgcttaaaaaagaaagcacaggcagaagcaaatgctacagctatcagtaatctcttgccatttatggaatatgaagtgcatactcagctaatgaataaactaaaactcaaaggaatgaatgctttgtttggactaagaattcagatcacagtgggtgaaaatatgttgatgggcttagcgtctgccacaggtgtgtatttagcagctttaccaactcctggtggtattcagattgctgggaagactcctaatgatggctcatatgaacaacacatctctcatatgcagaagaagataaatgacacaattgctaaaaacaaagagttatatgaaatcaatcctccagagatatctgaagagattataggatcacccatcccagaacctaggcaacgctcaagacttctaagatctcaatcagaaagctcggatgaagttacagaattagacctttcacatgggaaaaaagatgcttttgttttggagattgatgacacagatgccatggaagatgtccattctctacttactgatgttcctcctccttcaggcttttatagttgtaatacagaaattatgcccggtataaataattggacctctgaaatacagatgttcacttcagtaagagtaatcagattaagcagcctcaacctgactaatcaagctctcaataagaactttaatgatctctgtgaaaatttgctcaagagcctgtactttaaactacgatctatgatcccctgctgcctttgccatgtaaattttacagtatctctgcctgaagatgaattaattcaggttacagtcacggcagtcgcaatcacttttgacaaaaatcaggctttacaaaccacaaaaacccctgttgaaaagtcattgcaaagagcctcaacagataatgaagaacttttacaatttccactggaactgtgttcagattcacttccttctcatccttttccaccagctaaagccatgacagttgaaaaagcaagtccagtgggtgatggaaatttccggaatcgttctgctccaccttgtgcaaattccacagttggggttgttaagatgacacctctttcttttattcctggagcaaaaataactaagtatcttgggataattaacatgttttttattcgagagactacttctcttcgggaggaaggaggagtcagtggttttctccatgcttttattgctgaagtgtttgcaatggtgagagctcatgttgctgcattaggagggaatgctgttgtctcctacgtaagtggtgacgcagtggtttttgttcgtgaatctgacttagaagtggtgtcatctcagcaacctactaccaactgccagtcatcatgtactgaaggcgaagttacaacctgaggaaaattaggaaaaaagagctcaactaaatgaaattcatcaatctctgttattttgtcattaattatcttcttagacttaaaattgaacttgagataaataaggaagaattgagtagatttgatttgcctggagtcttttggaggcatgagaattttctaatcttgacattttgtttgcctgttctagacaggccctgtggggtcttgacccttcagtaagttaagataaatttttaaaagaaccgtagcaaagatggaacctttgtaatttatgttgattttaataaaatcataatttaaaaaatgaaatgggaagattgtcaggaaattaggatagctactctagtataatttagaaaaactaagcaagagattctccagttgctagtgagtaagcactctgatttgagaaatgtgtggggacaatggagaaaagttttcagaaaactgctatgtagatttctgaatgtgttgtattttgctgaggaattcggtaacaactgaaagggaaaagtgcttcagccatcttttgaaaacaagttaaaattctggaacttgtatctgtaatacatcctaactcttgtaaaagaaaataatttatcatagctggtgtcctttcattgaaagttgtaatactgtctctaaggagggaggaaaagattattatataattttataactggcaacatttgagttagtattgactttgtctaaaagaggcttgacttcaactgggataaaaatgtcagtgaattttgttaaagtagtaaaaatgcagttgacttagtaggaacataaaattatttcctaataagataatattgcactcctaccaaataaacaggattttagtaatatctgagggattgttgatggtgagttagactgtatttggcatagaatttggaaatgtaacttgaatgtaaatatgctgcaaaatgttgaatgtatacatagaaagactttttctgtcgacgccaaatgcccgttgtaaatgaaccttaaatattacattcctcctttgcacaataatatttctttataacacttatgattttttcccccaggacaacaaactgcccttaagagtcatttccttgttatcacaggtgtcaatatttttctgtattttgtttataattttattttttaaataaaaagtgtataaaaataaactggaatattcctaaatctcttttttacctccatcat

SEQ ID NO: 425620 - DNA, 2415 bp, Homo sapiens
cctagaagtgccattttaatagctatgagaccttgggcaagttacttaacttctctaaccttccatttcctcatgcatgaaatggggatgatgatgataacctgtgtttttgggtggttgtaaggattagatatatatatatatgtctggcttatggcagttatttaataagtggtagctattatttttttactttataaacaaccaacttttagctagcagaggtcgttaagcttttaaaattatgagttggttttcaaaaaggtttggaaaaaaccagtatcttacaactagataacataaggtttatctacaagttgacaatgatgaagtcgtctgaaaaagatggaaaaattgcactgggaaatagaacaactttcacactctccttgtaataatttgttcctacagcagataattttaatgctcagccgctttttctttttcttcactttataaccaatcattgtgtgtgtagctatactgcatcaacattttcttttgcaggaatgccatttttcttccaaaagaattccattccagcatttcctctcatgtttttctgtctctcttttttaattgcatgcagtgcatgataatttcttttctttcatgacatggcttagcctcacagacagctgaatgttgtcaccacttatttggaaacctcagggaataattgtgttaccagcgtctgttctgaatgttttctcatttttctccaattttagccatgacagttgaaaaagcaagtccagtgggtgatggaaatttccggaatcgttctgctccaccttgtgcaaattccacagttggggttgttaagatgacacctctttcttttattcctggagcaaaaataactaagtatcttgggataattaacatgttttttattcgagagactacttctcttcgggaggaaggaggagtcagtggttttctccatgcttttattgctgaagtgtttgcaatggtgagagctcatgttgctgcattaggagggaatgctgttgtctcctacataatgaagcagtgtgtcttcatggagaatccaaataaaaaccaggcacagtgtcttataaatgtaagtggtgacgcagtggtttttgttcgtgaatctgacttagaagtggtgtcatctcagcaacctactaccaactgccagtcatcatgtactgaaggcgaagttacaacctgaggaaaattaggaaaaaagagctcaactaaatgaaattcatcaatctctgttattttgtcattaattatcttcttagacttaaaattgaacttgagataaataaggaagaattgagtagatttgatttgcctggagtcttttggaggcatgagaattttctaatcttgacattttgtttgcctgttctagacaggccctgtggggtcttgacccttcagtaagttaagataaatttttaaaagaaccgtagcaaagatggaacctttgtaatttatgttgattttaataaaatcataatttaaaaaatgaaatgggaagattgtcaggaaattaggatagctactctagtataatttagaaaaactaagcaagagattctccagttgctagtgagtaagcactctgatttgagaaatgtgtggggacaatggagaaaagttttcagaaaactgctatgtagatttctgaatgtgttgtattttgctgaggaattcggtaacaactgaaagggaaaagtgcttcagccatcttttgaaaacaagttaaaattctggaacttgtatctgtaatacatcctaactcttgtaaaagaaaataatttatcatagctggtgtcctttcattgaaagttgtaatactgtctctaaggagggaggaaaagattattatataattttataactggcaacatttgagttagtattgactttgtctaaaagaggcttgacttcaactgggataaaaatgtcagtgaattttgttaaagtagtaaaaatgcagttgacttagtaggaacataaaattatttcctaataagataatattgcactcctaccaaataaacaggattttagtaatatctgagggattgttgatggtgagttagactgtatttggcatagaatttggaaatgtaacttgaatgtaaatatgctgcaaaatgttgaatgtatacatagaaagactttttctgtcgacgccaaatgcccgttgtaaatgaaccttaaatattacattcctcctttgcacaataatatttctttataacacttatgattttttcccccaggacaacaaactgcccttaagagtcatttccttgttatcacaggtgtcaatatttttctgtattttgtttataattttattttttaaataaaaagtgtataaaaataaactggaatattcctaaatctcttttttacctccatcat

SEQ ID NO: 425621 - DNA, 2210 bp, Homo sapiens
gtgttatagttagaacttcatataataattgaaaaatgtcatttaacacaaaaatcaatgaaatattatcatatattttgattacaatttattttgacaggcttttatagttgtaatacagaaattatgcccggtataaataattggacctctgaaatacagatgttcacttcagtaagagtaatcagattaagcagcctcaacctgactaatcaagctctcaataagaactttaatgatctctgtgaaaatttgctcaagagcctgtactttaaactacgatctatgatcccctgctgcctttgccatgtaaattttacagtatctctgcctgaagatgaattaattcaggttacagtcacggcagtcgcaatcacttttgacaaaaatcaggctttacaaaccacaaaaacccctgttgaaaagtcattgcaaagagcctcaacagataatgaagaacttttacaatttccactggaactgtgttcagattcacttccttctcatccttttccaccagctaaagccatgacagttgaaaaagcaagtccagtgggtgatggaaatttccggaatcgttctgctccaccttgtgcaaattccacagttggggttgttaagatgacacctctttcttttattcctggagcaaaaataactaagtatcttgggataattaacatgttttttattcgagagactacttctcttcgggaggaaggaggagtcagtggttttctccatgcttttattgctgaagtgtttgcaatggtgagagctcatgttgctgcattaggagggaatgctgttgtctcctacataatgaagcagtgtgtcttcatggagaatccaaataaaaaccaggcacagtgtcttataaatgtaagtggtgacgcagtggtttttgttcgtgaatctgacttagaagtggtgtcatctcagcaacctactaccaactgccagtcatcatgtactgaaggcgaagttacaacctgaggaaaattaggaaaaaagagctcaactaaatgaaattcatcaatctctgttattttgtcattaattatcttcttagacttaaaattgaacttgagataaataaggaagaattgagtagatttgatttgcctggagtcttttggaggcatgagaattttctaatcttgacattttgtttgcctgttctagacaggccctgtggggtcttgacccttcagtaagttaagataaatttttaaaagaaccgtagcaaagatggaacctttgtaatttatgttgattttaataaaatcataatttaaaaaatgaaatgggaagattgtcaggaaattaggatagctactctagtataatttagaaaaactaagcaagagattctccagttgctagtgagtaagcactctgatttgagaaatgtgtggggacaatggagaaaagttttcagaaaactgctatgtagatttctgaatgtgttgtattttgctgaggaattcggtaacaactgaaagggaaaagtgcttcagccatcttttgaaaacaagttaaaattctggaacttgtatctgtaatacatcctaactcttgtaaaagaaaataatttatcatagctggtgtcctttcattgaaagttgtaatactgtctctaaggagggaggaaaagattattatataattttataactggcaacatttgagttagtattgactttgtctaaaagaggcttgacttcaactgggataaaaatgtcagtgaattttgttaaagtagtaaaaatgcagttgacttagtaggaacataaaattatttcctaataagataatattgcactcctaccaaataaacaggattttagtaatatctgagggattgttgatggtgagttagactgtatttggcatagaatttggaaatgtaacttgaatgtaaatatgctgcaaaatgttgaatgtatacatagaaagactttttctgtcgacgccaaatgcccgttgtaaatgaaccttaaatattacattcctcctttgcacaataatatttctttataacacttatgattttttcccccaggacaacaaactgcccttaagagtcatttccttgttatcacaggtgtcaatatttttctgtattttgtttataattttattttttaaataaaaagtgtataaaaataaactggaatattcctaaatctcttttttacctccatcat

SEQ ID NO: 425622 - DNA, 2156 bp, Homo sapiens
gtgttatagttagaacttcatataataattgaaaaatgtcatttaacacaaaaatcaatgaaatattatcatatattttgattacaatttattttgacaggcttttatagttgtaatacagaaattatgcccggtataaataattggacctctgaaatacagatgttcacttcagtaagagtaatcagattaagcagcctcaacctgactaatcaagctctcaataagaactttaatgatctctgtgaaaatttgctcaagagcctgtactttaaactacgatctatgatcccctgctgcctttgccatgtaaattttacagtatctctgcctgaagatgaattaattcaggttacagtcacggcagtcgcaatcacttttgacaaaaatcaggctttacaaaccacaaaaacccctgttgtggaactgtgttcagattcacttccttctcatccttttccaccagctaaagccatgacagttgaaaaagcaagtccagtgggtgatggaaatttccggaatcgttctgctccaccttgtgcaaattccacagttggggttgttaagatgacacctctttcttttattcctggagcaaaaataactaagtatcttgggataattaacatgttttttattcgagagactacttctcttcgggaggaaggaggagtcagtggttttctccatgcttttattgctgaagtgtttgcaatggtgagagctcatgttgctgcattaggagggaatgctgttgtctcctacataatgaagcagtgtgtcttcatggagaatccaaataaaaaccaggcacagtgtcttataaatgtaagtggtgacgcagtggtttttgttcgtgaatctgacttagaagtggtgtcatctcagcaacctactaccaactgccagtcatcatgtactgaaggcgaagttacaacctgaggaaaattaggaaaaaagagctcaactaaatgaaattcatcaatctctgttattttgtcattaattatcttcttagacttaaaattgaacttgagataaataaggaagaattgagtagatttgatttgcctggagtcttttggaggcatgagaattttctaatcttgacattttgtttgcctgttctagacaggccctgtggggtcttgacccttcagtaagttaagataaatttttaaaagaaccgtagcaaagatggaacctttgtaatttatgttgattttaataaaatcataatttaaaaaatgaaatgggaagattgtcaggaaattaggatagctactctagtataatttagaaaaactaagcaagagattctccagttgctagtgagtaagcactctgatttgagaaatgtgtggggacaatggagaaaagttttcagaaaactgctatgtagatttctgaatgtgttgtattttgctgaggaattcggtaacaactgaaagggaaaagtgcttcagccatcttttgaaaacaagttaaaattctggaacttgtatctgtaatacatcctaactcttgtaaaagaaaataatttatcatagctggtgtcctttcattgaaagttgtaatactgtctctaaggagggaggaaaagattattatataattttataactggcaacatttgagttagtattgactttgtctaaaagaggcttgacttcaactgggataaaaatgtcagtgaattttgttaaagtagtaaaaatgcagttgacttagtaggaacataaaattatttcctaataagataatattgcactcctaccaaataaacaggattttagtaatatctgagggattgttgatggtgagttagactgtatttggcatagaatttggaaatgtaacttgaatgtaaatatgctgcaaaatgttgaatgtatacatagaaagactttttctgtcgacgccaaatgcccgttgtaaatgaaccttaaatattacattcctcctttgcacaataatatttctttataacacttatgattttttcccccaggacaacaaactgcccttaagagtcatttccttgttatcacaggtgtcaatatttttctgtattttgtttataattttattttttaaataaaaagtgtataaaaataaactggaatattcctaaatctcttttttacctccatcat

SEQ ID NO: 425623 - DNA, 2331 bp, Homo sapiens
acaaaacattaacaaaaatggccctttggttttcctcttactgattgtagaaagaagatactttaataacagataagtcaactactaacttttaaaaatatattcttcaacatttgattctctttttttaaaattttagggtaaaactagggaaatgaattattcacaaagctttgattataaaataaaatagaaacaactgaaatattgtaaattaagaagaataggaaataaagttagttaaagcacagtatgtggtcctttcattgatatttatgttagaccccactcaggctctccctaggagaccacacaactatgacatcaccagaaatgctcagcctgctaactgagaacttggttttggacaaatcagtgtctaaagcttgactctttactatctctcttatctgacttgaaaaggaccattctttttctgagttacagttaaattacatcatcgaaaggagtgttaagacgagtaagagacatcatccatatttttttctttgtttttttcttttgttttctgtctgtgttttcagcaacgtcagttgattacagttcctttgcagacagatgcagcagctggatagagctcattaaactgaaagctcagaccataaggcgtggatcaattaagacaaccatgacagttgaaaaagcaagtccagtgggtgatggaaatttccggaatcgttctgctccaccttgtgcaaattccacagttggggttgttaagatgacacctctttcttttattcctggagcaaaaataactaagtatcttgggataattaacatgttttttattcgagagactacttctcttcgggaggaaggaggagtcagtggttttctccatgcttttattgctgaagtgtttgcaatggtgagagctcatgttgctgcattaggagggaatgctgttgtctcctacataatgaagcagtgtgtcttcatggagaatccaaataaaaaccaggcacagtgtcttataaatgtaagtggtgacgcagtggtttttgttcgtgaatctgacttagaagtggtgtcatctcagcaacctactaccaactgccagtcatcatgtactgaaggcgaagttacaacctgaggaaaattaggaaaaaagagctcaactaaatgaaattcatcaatctctgttattttgtcattaattatcttcttagacttaaaattgaacttgagataaataaggaagaattgagtagatttgatttgcctggagtcttttggaggcatgagaattttctaatcttgacattttgtttgcctgttctagacaggccctgtggggtcttgacccttcagtaagttaagataaatttttaaaagaaccgtagcaaagatggaacctttgtaatttatgttgattttaataaaatcataatttaaaaaatgaaatgggaagattgtcaggaaattaggatagctactctagtataatttagaaaaactaagcaagagattctccagttgctagtgagtaagcactctgatttgagaaatgtgtggggacaatggagaaaagttttcagaaaactgctatgtagatttctgaatgtgttgtattttgctgaggaattcggtaacaactgaaagggaaaagtgcttcagccatcttttgaaaacaagttaaaattctggaacttgtatctgtaatacatcctaactcttgtaaaagaaaataatttatcatagctggtgtcctttcattgaaagttgtaatactgtctctaaggagggaggaaaagattattatataattttataactggcaacatttgagttagtattgactttgtctaaaagaggcttgacttcaactgggataaaaatgtcagtgaattttgttaaagtagtaaaaatgcagttgacttagtaggaacataaaattatttcctaataagataatattgcactcctaccaaataaacaggattttagtaatatctgagggattgttgatggtgagttagactgtatttggcatagaatttggaaatgtaacttgaatgtaaatatgctgcaaaatgttgaatgtatacatagaaagactttttctgtcgacgccaaatgcccgttgtaaatgaaccttaaatattacattcctcctttgcacaataatatttctttataacacttatgattttttcccccaggacaacaaactgcccttaagagtcatttccttgttatcacaggtgtcaatatttttctgtattttgtttataattttattttttaaataaaaagtgtataaaaataaactggaatattcctaaatctcttttttacctccatcat

SEQ ID NO: 425624 - DNA, 1568 bp, Homo sapiens
caccagatcctagtatctcgggactcttgtcctgtttattgattcctgagactacttctcttctgaaggaacgccgaaggaggagtcagtggttttctccatgcttttattgctgaagtgtttgcaatggtgagagctcatgttgctgcattaggagggaatgctgttgtctcctacataatgaagcagtgtgtcttcatggagaatccaaataaaaaccaggcacagtgtcttataaatgtaagtggtgacgcagtggtttttgttcgtgaatctgacttagaagtggtgtcatctcagcaacctactaccaactgccagtcatcatgtactgaaggcgaagttacaacctgaggaaaattaggaaaaaagagctcaactaaatgaaattcatcaatctctgttattttgtcattaattatcttcttagacttaaaattgaacttgagataaataaggaagaattgagtagatttgatttgcctggagtcttttggaggcatgagaattttctaatcttgacattttgtttgcctgttctagacaggccctgtggggtcttgacccttcagtaagttaagataaatttttaaaagaaccgtagcaaagatggaacctttgtaatttatgttgattttaataaaatcataatttaaaaaatgaaatgggaagattgtcaggaaattaggatagctactctagtataatttagaaaaactaagcaagagattctccagttgctagtgagtaagcactctgatttgagaaatgtgtggggacaatggagaaaagttttcagaaaactgctatgtagatttctgaatgtgttgtattttgctgaggaattcggtaacaactgaaagggaaaagtgcttcagccatcttttgaaaacaagttaaaattctggaacttgtatctgtaatacatcctaactcttgtaaaagaaaataatttatcatagctggtgtcctttcattgaaagttgtaatactgtctctaaggagggaggaaaagattattatataattttataactggcaacatttgagttagtattgactttgtctaaaagaggcttgacttcaactgggataaaaatgtcagtgaattttgttaaagtagtaaaaatgcagttgacttagtaggaacataaaattatttcctaataagataatattgcactcctaccaaataaacaggattttagtaatatctgagggattgttgatggtgagttagactgtatttggcatagaatttggaaatgtaacttgaatgtaaatatgctgcaaaatgttgaatgtatacatagaaagactttttctgtcgacgccaaatgcccgttgtaaatgaaccttaaatattacattcctcctttgcacaataatatttctttataacacttatgattttttcccccaggacaacaaactgcccttaagagtcatttccttgttatcacaggtgtcaatatttttctgtattttgtttataattttattttttaaataaaaagtgtataaaaataaactggaatattcctaaatctcttttttacctccatcat

SEQ ID NO: 425625 - DNA, 4377 bp, Homo sapiens
ggggaggagagacaagcaggggcggcagaggctcaacgggatgctgactgggttttgcttttcgtcccagccttgtggggccgggacggaagaacccatcaaagcccttcctcccgccgcctctccggaatgaggtctcagcacccgcgcgggacagcacccttcctcctgcgacagagcccaagaagaggccgaaaccgagaccatgccagggaagctgaaggtgaaaatcgtggccgggcgccatttgccagtgatggaccgtgctagtgacctgactgatgccttcgtggaggtaaaatttggtaataccacctttaaaacagatgtgtaccttaagtcactcaaccctcagtggaactcggagtggtttaaatttgaggtggatgatgaagacttacaagatgaacctttacagatcacagttcttgaccatgatacttacagtgcaaatgatgccattggtaaagtgtacattgatattgatcctttactgtatagtgaagctgcaacagtcatctcaggatggtttccaatttatgacaccatacatggtatccgtggggaaatcaatgtagttgtcaaagtagacctcttcaatgatttaaatcgatttaggcagtcatcatgtggagtcaaattcttttgcacaacgtctattccaaaatgctatagagctgtgataattcatggatttgtagaagaacttgtggtcaatgaagacccagaatatcagtggattgatcgaattcgcacaccaagggcatcaaatgaggccagacagagactcatttcgttaatgtcaggtgagctgcagaggaagattggcttgaaagtacttgaaatgagaggaaatgcagttgtggggtacttacagtgtttcgatctggagggcgagtctgggttagtggtgcgagccataggaacggcgtgtactctggataaattaagtagcccagcagcattccttcctgcatgtaattccccatccaaagaaatgaaggagattcccttcaatgaagatcccaatcccaatactcactcatcaggaccctcaacccctctgaaaaaccaaacttattccttttcaccttccaagtcctacagtcgacagtcctcttcttctgacacagatttgagtttgacacccaaaactggaatgggaagtggtagtgctggaaaagaaggggggccctttaaagctcttttaagacaacagactcaatcagcgttggaacagagggaatttccattttttaccttgacggcatttcctcctggattccttgtacacgttgggggtgtagttagtgcacgttctgtgaagcttttggatcgtatccacaatcctgatgaaccagaaactcgagatgcatggtgggcagaaatcagacaagaaataaaatcacatgctaaagcattaggctgtcatgctgtagtgggctacagtgaatcaactagcatctgtgaagaggtctgcattttatctgcatctggcacagcggctgtactgaatcctagatttctgcaggatggcaccgtggaaggctgtttggaacagaggcttgaagaaaatttgcctacacgttgtggattttgtcatataccatatgatgaactgaatatgccatttccagctcatctcacatattgctataactgcaggaaacaaaaagttcctgatgttctgtttacaactatagacctcccaacagatgcaacagttattggaaaaggttgtcttattcaagcaaggttatgtcgcttaaaaaagaaagcacaggcagaagcaaatgctacagctatcagtaatctcttgccatttatggaatatgaagtgcatactcagctaatgaataaactaaaactcaaaggaatgaatgctttgtttggactaagaattcagatcacagtgggtgaaaatatgttgatgggcttagcgtctgccacaggtgtgtatttagcagctttaccaactcctggtggtattcagattgctgggaagactcctaatgatggctcatatgaacaacacatctctcatatgcagaagaagataaatgacacaattgctaaaaacaaagagttatatgaaatcaatcctccagagatatctgaagagattataggatcacccatcccagaacctaggcaacgctcaagacttctaagatctcaatcagaaagctcggatgaagttacagaattagacctttcacatgggaaaaaagatgcttttgttttggagattgatgacacagatgccatggaagatgtccattctctacttactgatgttcctcctccttcaggcttttatagttgtaatacagaaattatgcccggtataaataattggacctctgaaatacagatgttcacttcagtaagagtaatcagattaagcagcctcaacctgactaatcaagctctcaataagaactttaatgatctctgtgaaaatttgctcaagagcctgtactttaaactacgatctatgatcccctgctgcctttgccatgtaaattttacagtatctctgcctgaagatgaattaattcaggttacagtcacggcagtcgcaatcacttttgacaaaaatcaggctttacaaaccacaaaaacccctgttgaaaagtcattgcaaagagcctcaacagataatgaagaacttttacaatttccactggaactgtgttcagattcacttccttctcatccttttccaccagctaaagccatgacagttgaaaaagcaagtccagtgggtgatggaaatttccggaatcgttctgctccaccttgtgcaaattccacagttggggttgttaagatgacacctctttcttttattcctggagcaaaaataactaagtatcttgggataattaacatgttttttattcgagagactacttctcttcgggaggaaggaggagtcagtggttttctccatgcttttattgctgaagtgtttgcaatggtgagagctcatgttgctgcattaggagggaatgctgttgtctcctacataatgaagcagtgtgtcttcatggagaatccaaataaaaaccaggcacagtgtcttataaatgtaagtggtgacgcagtggtttttgttcgtgaatctgacttagaagtggtgtcatctcagcaacctactaccaactgccagtcatcatgtactgaaggcgaagttacaacctgaggaaaattaggaaaaaagagctcaactaaatgaaattcatcaatctctgttattttgtcattaattatcttcttagacttaaaattgaacttgagataaataaggaagaattgagtagatttgatttgcctggagtcttttggaggcatgagaattttctaatcttgacattttgtttgcctgttctagacaggccctgtggggtcttgacccttcagtaagttaagataaatttttaaaagaaccgtagcaaagatggaacctttgtaatttatgttgattttaataaaatcataatttaaaaaatgaaatgggaagattgtcaggaaattaggatagctactctagtataatttagaaaaactaagcaagagattctccagttgctagtgagtaagcactctgatttgagaaatgtgtggggacaatggagaaaagttttcagaaaactgctatgtagatttctgaatgtgttgtattttgctgaggaattcggtaacaactgaaagggaaaagtgcttcagccatcttttgaaaacaagttaaaattctggaacttgtatctgtaatacatcctaactcttgtaaaagaaaataatttatcatagctggtgtcctttcattgaaagttgtaatactgtctctaaggagggaggaaaagattattatataattttataactggcaacatttgagttagtattgactttgtctaaaagaggcttgacttcaactgggataaaaatgtcagtgaattttgttaaagtagtaaaaatgcagttgacttagtaggaacataaaattatttcctaataagataatattgcactcctaccaaataaacaggattttagtaatatctgagggattgttgatggtgagttagactgtatttggcatagaatttggaaatgtaacttgaatgtaaatatgctgcaaaatgttgaatgtatacatagaaagactttttctgtcgacgccaaatgcccgttgtaaatgaaccttaaatattacattcctcctttgcacaataatatttctttataacacttatgattttttcccccaggacaacaaactgcccttaagagtcatttccttgttatcacaggtgtcaatatttttctgtattttgtttataattttattttttaaataaaaagtgtata

SEQ ID NO: 425626 - DNA, 933 bp, Homo sapiens
ggggaggagagacaagcaggggcggcagaggctcaacgggatgctgactgggttttgcttttcgtcccagccttgtggggccgggacggaagaacccatcaaagcccttcctcccgccgcctctccggaatgaggtctcagcacccgcgcgggacagcacccttcctcctgcgacagagcccaagaagaggccgaaaccgagaccatgccagggaagctgaaggtgaaaatcgtggccgggcgccatttgccagtgatggaccgtgctagtgacctgactgatgccttcgtggaggtaaaatttggtaataccacctttaaaacagatgtgtaccttaagtcactcaaccctcagtggaactcggagtggtttaaatttgaggtaagtttttaaatgtcagcatttttgagtgtatttttttgaggtgactcttttccctcaggaataatgagaaccttttatttcaggcatagtagtatttctacatcacaaaaatattttcttttctgcttacctaggaatattgagtctaaaaaaagttgtattacatttaagaaaatacagtatatgataacacattaacaaaagaagtcttcagatgtattatattattattattgtagttttctctagattttagcacataccaaaaattacttaagaataatatatggattaaaataaatttttaaaaattgtagtactatatattgtgaatattgccatttaaatcatttgtaagtgtacagtttggtagcattaattacattcacagtgttttgctaccatcaccgctatttccagaactttttctttatcctaaatggaaattgtgtactcactaaccaataacttcccattccctcctctccctagactctggtgacctctaatctactttctgtctctttgaatttgcttatgctagatat

SEQ ID NO: 425627 - DNA, 806 bp, Homo sapiens
gtcactgttataattattttgatatttagcatttcccaaagttatacggtctgaaaaatgttaacttgtttgtgttttttcctttatagtgaagaggtctgcattttatctgcatctggcacagcggctgtactgaatcctagatttctgcaggatggcaccgtggaaggctgtttggaacagaggttgtcatggcagcctggcttattttctataagggcagagaagggagaggtcgactttttttctgagagttgggataattcttctccgtagggtggcttacaggggtacagtgtagaaatcaggaccaagcacttcactaatttttaactaacccgtagtaacagaggagtattggattctgcactatatggcacacattattgtttctagtgtcttgataagtgacatgtatgattaccagttgaagaatttcaggtgtccatttttttttgctttgtcatgatatagaaataatctttggatctttctcttcctttcatttccctgtgtctcacctccaaaaacagaaagaggttatgaaacaatttttataaaaaacaattcttaatttacaaaatagtaaaagtactgcattttatcaagattatctgtagatataatatatatggtccttccgtgtccatagggaattggttccaggaccccttgcagataccaaaacctgcagatgctcaagtcccttatataaaatggtatagtatttgcatgtaacctatgcacattctcccctatactttaaataatctctagattatttataatacctgatataatacctg

SEQ ID NO: 425628 - DNA, 300 bp, Homo sapiens
tccgcgccccgagagccgccatttttgagagcgggggaggagagacaagcaggggcggcagaggctcaacgggatgctgactgggttttgcttttcgtcccagccttgtggggccgggacggaagaacccatcaaagcccttcctcccgccgcctctccggaatgaggtctcagcacccgcgcgggacagcacccttcctcctgcgacagtgagtggcgacccgtggcgcgactgccgggcgcccgcgcgcgcccccgcgcgctccttcgctgtcagttaccccgcgcgcctccgcccct

SEQ ID NO: 425629 - DNA, 2354 bp, Homo sapiens
cggccccccccggccacggcgcaccgcctccccgcccccgcccgccctcccccaccgcgcgcgctccgcccgccccggagcctcgccctccgccacgatgagcaaatgagcgcgagcgagggcatgaaatttaaattccactcaggggagaaagtgctgtgcttcgagcctgaccccaccaaggcgcgagtgctgtacgatgccaagattgttgatgttattgttgggaaagacgaaaaaggcagaaagatcccagaatatctgatccattttaatggttggaacagaagctgggatagatgggcagcagaagatcatgtgcttcgtgataccgatgaaaatcgtagattacagcgtaaattggcaagaaaagctgtagctcgcctgaggagcacaggaagaaagaagaagcgctgcaggttgcctggtgtggactctgtcttaaaaggcctccccactgaagaaaaagatgaaaatgatgaaaactcattaagcagttcctctgactgtagtgaaaacaaggatgaagaaataagtgaagaaagtgatattgaagaaaagactgaagtgaaagaagaaccagagcttcaaacaagaagggaaatggaagaaagaacaataactatagaaatccctgaagttctgaagaagcagctggaggatgattgttactacattaacaggaggaaacggttagtgaaacttccatgccagaccaacatcataacgattttggaatcctatgtgaagcattttgctatcaatgcagccttttcagccaatgagaggcctcgtcaccatcacgttatgccacatgccaacatgaacgtgcattatatcccagcagaaaagaatgttgacctttgtaaggagatggtggatggattaagaataacctttgattacactctcccgttggttttactctatccatatgaacaagctcagtataaaaaggtgacttcgtctaaattttttcttccaattaaggaaagtgccacaagcactaacaggagccaggaggaactctctcccagtccgcctttgttgaatccatccacgccacagtccacagagagtcagccgaccaccggtgaaccagccacccccaaaaggcgcaaagctgagccagaagcattgcagtctctgaggcggtccacgcgccacagtgccaactgtgacaggctttctgagagcagcgcttcacctcagcccaagcgccggcagcaggacacatccgccagcatgcccaagctcttcctgcacctggaaaagaagacacctgtgcatagcagatcatcttcacctattcctctgactcctagcaaggaagggagtgctgtgtttgctggctttgaagggagaagaactaatgaaataaacgaggtcctctcctggaagcttgtgcctgacaattaccccccaggtgaccagccgcctccaccctcttacatttatggggcacaacatttgctgcgattgtttgtgaaacttccagaaatccttggaaagatgtccttttctgagaagaatctgaaggctttattgaagcactttgatctctttttgaggtttttagcagaataccacgatgacttcttcccagagtcggcttatgtcgctgcctgtgaggcacattacagcaccaagaacccccgggcaatttattaaaatgttgttggttctgtaagagcaactgctctgtctagtttggcgctctgggttccaggtgaataactaacaaggtggtgggtctttacccacagcgcaaacacaatgcccaccttggggctctgttgtttgagttgcccacatactgcagttattctgttaggaatgattccctgggtgcctgaaagtgctctgacacgacacttgttactttgcaggccatctgtgatggcaaggaaaaagcaactatgttcacagtgaaatattcgtggaataggttaggccatttcagtagacattgcagttagttagcaagaaccacattgtctctttatttgttagcattaaacaaatttttttttgcaaattggttttatttttttgatgaagccgagcaactctgtccaaaaaggtttagtttgtactcggaaaccacaaagtagtctcaaagtattttagagggaatcgatattgatggcaaaagaaaatttgcagctatgcatttgcttctaacggttccctctctgtgaaacattatttttggtgatctaaagaaagcattgcctttcttatttgagattttacagctatactttgttgtgtaatgttatggttccctttctgtaaaatgttatttttggtgatctaaataaagcctgtcttgtttgaaagaaaaaaaaaaa
